United States Patent Application Publication US 2022/0031776 A1 - sequence listing, part 4

SEQ ID NO: 73 - DNA, 86716 bp, Unknown
  source: /note="Description of Unknown: MKP2_coc_1 Mutant Bacteria sequence"
ctgcagagtcaagcatttatttttgcttttctctgcgaggttctcaccggaaccccgctgacccggcggcttgtttgccgttgttccgtgtcagtggaggcgcattatagggagtaattctgaggtggcaaggggaaatgcaaaaaaacttttcgttcgctcgattttccatcacaacgcgagttttacgcgctatttgcgcgccatttgtgcgatttcccgagcaaaccgggatacctgttgccagtcggtatagaccacttctttgcgggtatccgtttcacccccggtcattttcataatcaggcggatcataaaccgatcgtaccagctgtagcgcgggtagcgcagcgcgccggcaaataccgcgcagctctgcggctgccacggcgagttcagcagaaacttacgcgtatagctgttggtctgcggcgtgcgcttctcgggtttacgcgccaccaggttaaccgaaaagaatgcccccggcagcgcctgcaatgctgccagatgctttttcacaaagcggtccaccgccggatgaaagtgcccatagcgaatcgacgcgccaatgaccacccgatcgtagtgatgccattcgacgacatcggtacggttcaggttcagggtgtccgcatcgatgcccagctctttaagctcagaggcgagaaacgaagcgatttcacgggtctgcccgtcgcgggtggagaagagaattaaagttttcacgagcactcctgttattcgcgccagaaagtgggggtaaagagcaccagtaaggtgaacacttccagacgaccaaacagcatattagcaatcaggatccatttcgcgaccgggttcatggtggcaaagttatccgcgacgacgccgagcccaggcccgaggttgttcaatgtcgccaccacggaggcgaaagcagagaagtcatccaccccggtggcgataatcgccagcatactaatgataaagaccagcgcataggcggagaagaatccccatactgcttccagaatacgttccggcagcgcgcggttacctaatttaatgctatacaccgcattcgggtgcaccagccgcttcagctcacggttgccctgcttgaacagcaacaggatacggatcacttttaatccaccgcccgtggagccagcgcagccgccgataaatgcggagcacagcaacagcaccggaaggaacagcggccagcgtgcaatgctatcggtggtgaaccccgcggtggtcgccatcgacaccacctggaaaaacgcctggttcagcgtcgtcaacaccgagccgtacacgttatgaagccatagcaccagcgtacagacgatgaccagcgtcaactggacgccaatgaacatcctaaattcagggtcgcgccagtacaccttcaggctgcgtccgctcaacaacgaaaaatgcagaccgtagttacagccggagatcagcaggaagatggcaatgatggagttgatcatcgggctgttgaaatagccgacgctggcatcgtgagtcgagaaaccgccgatggcgatggtggcgaaactgtgcccgatcgcatcgaacgccggcataccggcaaaccagagcgccaatgcgcaggcgatcgtgagtaacacatagatgagccacaatgtcttcgccgtctcggcaatacgcggacgcatcttgttatccttcagcgggccgggcatttccgcgcggtagagctgcatccccccgacgccgaggataggcagaatcgctaccgccagcacaatgatccccatgccgccgaaccactgcagcatctggcgataaaagaggatagcgtgcggaagcgagtccagccccaccagagtggtcgccccggtcgtcgtcaggccggaaaatgactcgaagaaggcatccgtcaccgtcaggttcggctgttcggagaagataaagggcaaggcccccacgctccccagcacggtccagaacagcaccacgatcagaaacccttcacgagatttcagttcgcctttttgcttacggttcggccaccacagcatggagccgatcgccagagcgacaaagaaggtttgagtgaaggcccgtcccgcgccatcgcgatatatcagggccactaatcccgggacgatcatcgtccccgaaaacaagatgaccagcagtccaacgattcgggttatggcgcgaaaatgcatctctggcgcttcctttgataggcaaaaaacagaggggattattcgttaatcttcagtaattgcaatgaaccacgactaaaatcagccagtcttgctgaaaaagccgccacttcggcctggggaagcgccacgcgcagccgaactgacgccagatattcgctttcaacgacgtttccggagaattgggcgagcagcgcttcgacgccggccagttgcccatactcacactgcaaagtatatgccgttaacggcgtcttgcgcagcgtcgtcagctgcgccagcgcctgatgcaccccgccgccataggccttaaccagaccgccggtgcccagcaggataccaccgtagtaacgcacgacgacagcggttatctcgccgacgccgcttcccatcagctgcgccagcatcggtttacccgccgttcccgccggttcgccatcgtctgaaaaccccagctgttgcgaatcatcaggcggccccgcgacccacgccacgcagtggtggcgggcatcagggtgatccgctctgacggactcgacaaaagcttttgccgccgccacgccgtcggtatgcgccaacagcgtgataaaacggctttttttaatctcctcaacgacggtaaccggcgccgccgggattaaccagctctccatcaggccagcttcagatcgcgcgtcatattttcgatactgttttcgtgaatcaccacgttatcttcgatacggatcccaccgaacggcttcatggcgtcaattttttgccagttaaagtgcttgctgaacgggccctcacgccacggcgccagtaacgactcgatgaagtagatgccgggttcaatagttaacaccatccgcggctcgataatacgggtgcagcgcagatacgggtatttcgacggcgccgccagatgcgtaccggtgtcatcctgcataaagccagcgacatcatgcacctgcagacccagcggatggccaatcccgtgcggcataaacggcccggtcaggtcattctccaccatcgcctcttcgctcatgtcggtaaccaactggtgtttacgcaacagcttcgcgatacgctgatggaactggatatggtaatcaatgtaactggtaccggccttcatggtactaatcagcgcctgctgctcatcgttaacgtctttgatcagatgggcaaagtcgttatcgccgtgcgccgcccaagtgcgcgtcagatctgcggcatagccgttatattccgcaccggcgtcgagcaggaaactgcgcatctccgccggggcacgatggtccagtttggtgtagtgcaggacggaggcatgctcattcagcgcgacaatattgctgtaaggcacgtcggtatcacgatggccggtggcggtgagataggcctggttgatatcgaattcgctcattcccgactggaaagcttcgtaggccgcacgatgaccattcaccgccgacttctgcgcttcacgcatgcaggccagctcgtaatcggttttgtaagcccggtagtaatgcaggtagtcgataacccctttcgggttgatcttatccgcggcgatacccaggcccagcgcgcgctcaggcaccggaccgatatagccaatattaccgcgagcagcaggcagctggctgccgatgccatcggccttcggtagcgcgatcacgtctatctcttcggtccagaaagaggtcggcaacggctcaacgttatgccagtaatctaccggcagatagaaccacagcttcggtttattcacaccgtccaccagcagccagcagttaggcacctgagtcacaggcacccaggctttgaactgcggattgaccttgaacgggtacggatggtcatcaaggaagacgttaaccagctcgccggagtgaatcagcagagcatccatttgaaaacgggccaggacgtcgcgggtacgttcttgtagggtaacaatatgatttttatagagcgcggccagggattccatcttttatcctttgcttttatgggatcgtgatacaccgcatcttagcacatcgacctgcgtgcgggtgatttccgccggatgtgatccgaccagcaattatttaaagagtaatttgcaattctttaacataaattccacactccgtttcatctggtatgaccagatcatattgctggattcaggagactgacatgctctacaaaggcgacaccctgtacctcgactggctggaagatggcatcgccgaactggtgttcgatgccccaggttcggtcaacaagcttgataccgcaaccgtagccagcctcggtcatgcgctggacgtactggaaaaacaaagcgatctcaaaggtctgctgctgcgctctgaaaaagcggcatttatcgtcggcgcggatatcaccgaattcctctcgctgttcctggtccctgaggagcagttaagccagtggctgcattttgctaacagcgtcttcaatcgtctggaagatctccccgtccccactatctctgccgtcaatggctatgcgctgggcggcggctgcgaatgcgtgctggcgaccgactatcgcctcgccacgccggctctgcgcattgggctgccagaaaccaagctcggcattatgccgggcttcggcggttccgtgcgtctgccgcgcctgctcggcgccgatagcgcgctggaaattattgccgccgggaaagacgtcggcgccgatcaagcactgaaaatcggcctggtggatggcgtggtcgctgcggaaaaactacgcgacggcgcgctggcgatcctacgtcaggccatgaatggcgacctggactggaaagcgaaacgtcagccgaagctggagccgctgaagctcagcaaaattgaagccgccatgagcttcacgattgccaaaggcatggtcgcgcaaaccgccgggaagcattacccggcgccgatcaccgcggtcaaaaccattgaagccgccgcgcgtcttggtcgtgaagaagccctggtgctggaaaataaaaactttgtcccgctggcccataccaatgaggcccgcgcgctggttggtatcttcctgaacgaccagtacgtcaaagcgaaagcgaaaaagctgaccaaagatgtcgagacgccgaagcatgctgccgtcctgggcgctggcattatgggcggcggtatcgcttaccagtcagcctggaagggcgtgccggtggtgatgaaagacatcagcgacaaatcgctgacccttggcatgaccgaagcggcgaagctgctgaataaacagctggaacgcggcaaaatcgacggtctgaagctggccggagtgattagcaccattcagccaaccctggaatacagcggttttgaccgcgtggacgtcgtcgttgaagcggtggtggaaaacccgaaagtgaagaaagccgtactagcggaaaccgagtcaaaagtgcgcccggataccgtgctggcgtccaacacctcaacgatccccatcagcgagctggccagcgttctgcagcgcccggaaaacttctgcggtatgcacttctttaacccggtgcatcgcatgccgctggttgaagtgatccgcggcgaaaaaacctcggataataccattgccaaagtggtggcctgggccagcaaaatgggcaaaacgccgattgtggtgaatgattgtcccggcttcttcgtcaaccgggtactgttcccctacttcgccggcttcagccagctgctgcgcgacggggcggacttccgcaaagtcgacaaagtgatggagaaacagtttggctggccgatgggcccggcttatctgctggacgtggtcggcatcgataccgcgcaccatgctcaggcggtcatggcggcgggcttcccgcagcggatgcagaaagattatcgcgacgccatcgacgccctgtttgacgccaaccgtttcggccagaagaacggcctcggcttctggcgctataaagacgacagcaaaggtaagccgaagaaagaagaagatgctaccgtcgacagcctgctggccgacgtcagccagtcgaagcgcgatttcagcgatgaagagattatcgcccgcatgatgatccccatggttaacgaagtcgtccgctgcctggaagaaggcattatcgccagcccggcggaagcggatatggcgctggtatacggcctgggcttccctccgttccacggcggcgcattccgctggctggacaccatcggcagcgcgaagtatctcgatatggcgcagcaataccagcaccttggcccgctgtatgaagtgccagccggtctgcgtgacaaagcgcgccataacgaagcgtattatccccaggtagagccagcccgtccggttggcgctctgaaaacggcttaaggagtcacaatggaacaggttgtcattgtcgatgcaattcgcaccccgatgggccgttcgaagggcggcgcatttcgccacgtgcgcgcggaagacctctccgcgcacctgatgcgtagcctgctgtcgcgcaatccgtcgcttgaggcaagcgcgatagacgatatctactggggttgcgtgcagcaaaccctcgagcagggttttaacatcgcccgaaacgcggcgctgctggcggagatcccgcattcggtaccagcaaatacggtcaaccgtctgtgcggttcttccatgcaggcgctgcacgatgcggcccgtatgatcatgaccggcgatgccagcgtctgcctgattggcggcgtcgagcacatgggccatgtgccaatgagccacggcgtcgatttccatccgggcctcagccgcaacgtggcaaaggcggcagggatgatggggctgactgcggagatgctggcgcgtctgcacggtattagccgcgagatgcaggatcagttcgccgcgcgctctcacgctcgtgcctgggccgcaacccagtccggcgcattcaaagcggagattatccccaccggcggccacgatgccgatggcgtactcaagtcctttaactatgacgaggtgatccgcccggaaaccaccgtcgagacgctgtccacgcttaaaccggcgtttgacccggtgaccggtacggtaacggcgggtacctcttccgccctttccgatggcgcagcggcgatgctgctgatgagcgaaagccgcgctcgcgagctggggctgaagccgcgcgctcgcgtccgttcaatggcggtggtcggctgcgacccgtccattatgggttatggcccggttccggcctcaaagctggcgctgaaaaaagcgggcttatccaccagcgatatcgacgtttttgaaatgaatgaagcatttgccgcgcagatcctaccgtgtattaaagatctgggcttaatggagcagatcgatgagaagatcaacctcaacggcggggcgatcgcgctcggtcatccgctgggctgttccggggcgcgtattagcaccacgctgatcaaccagatggagcgcaaagacgctcagttcggcctcgccaccatgtgtatcggcctgggacaagggatcgctaccgtgtttgagcgggtttaagcgaaagggtatctcaacgccattgccaccagaacctggcggctatggcgaagagagcaggtttagttgccgttcttcccgcctgtcaggggcgggttttttattttcagataaacgcaaacgcatcgccaaacaggcgatcttcacgcgcgccgcgctcattacagaacaggtcgcgagcgatcttcgccatctcaaaacgaccggcaatgtagatgtcatgctcggccagcgtaccgtaatcctgcagcacggcggtgagtaccgtaccggagcgaccacgccacccttcttccggctgttcgaccaccggctcgatgcgcagattcggatgcttgatgcttaacgcttccagctcggccagatcgtacagatgcttagcctcgcggccgccccaataaatggcgatatcgcgatccgggttacgcgccagcgcgcttaacagaatagaacgcacataagagaatccggtaccgccggcgatcagaatcagcgggcgatcttcgtcatcgcgcagccacgcttcgccatgcggaatatcaacctcaatttcacgctctttcagaatgcgatccatgaccgccatcgcgtacagattgagctccgaggcgccgatatgcagctcgataaattcctgttccgccggcgtggaagccatggagaacgggcgcttgtcgcgctcatccattaccaccatcagatactggccggcacggaaggaaaatgccgcttccggcactaatcgaacacgatatacggtatcggtaatcgcctccaccgaggtcactttacagcttaaggttgtcatgcgtcccctctgtcgggtcaatagagcaaaacagcggcgttagccccgcttactgttgtttaaagatggccagttcatcccagatggcgtcaatacgcgccgtaacggcaggatcttttttgattgggcgaccccattcacgctgggtttcgccaggccatttattggtggcatccagccccatttttgaacccaggccggaaaccggcgaggcaaaatccagataatcaattggcgtattctctaccagtaccgtatcacgagccgggtccatacgggtagtgatcgcccaaatcacatcgttccagtcgcgtgcattgacgtcgtcatcgcagacaatcacgaacttggtgtacataaactggcgcaggaacgaccagacgcccatcattacgcgcttggcatgtcccgcgtactgttttttcatggtcaccaccgccaggcgataggagcacccttccggcggcagatagaaatcaacgatttccgggaactgcttttgcaggatcggcacaaagacttcattcagcgccacgcccagcaccgctggctcatcgggcggtcggccggtataggtagaatgataaatcgcgtcttcacgctgggtaatatgggttaccgtaaataccgggaagctgtccacttcattgtagtaaccggtgtgatcgccatacgggccttccggcgccatttcaccggcctcaatgtagccttcaagcacaatttccgcgctggccggcacttcaaggtcattggaaacgcacttaaccacttcggtcttggtgccgcgcagcaggcctgcgaaagcatattccgacagggtatcgggcaccggcgtcaccgcgccaagaatggttgccggatcggcgccaagcgccacggaaaccgggaagcgttcgcccggacgcgccgcgcaccactcctggaaatccagcgcgccgccgcgatgagacagccagcgcataatcagtttgtttttgccgatcagctgctggcgataaattcccaggttctgccgctctttgtgcggcccgcgggttaccgtcaacccccaggtgatcagcggcgcggcatcttccggccagcaggtcataatcgggattttattcagatcgacatcatcgccctggatgattttttgctgacagggggcgccgcgcaggcgtttggtcggcatattcagcacttgcttgaactgcggcagcttatcaaacaggtcgcggaagccttttggcggctcaggttctttcagaaaggccaacagtttacccacctcgcgcagcgaactgacatcctcctgccccatccccaacgccacgcgacgcggcgtgccgaacagattgcacagcaccggcatggtatagcctttcggattctcaaacagcaacgccgggccgccggcgcgcagagtccggtcggcaatttcggtgatttccaggtgaggatcgaccggcagagtgatacgttttagttcgccctgttgttccaggagtgtcagaaagtcgcgaagatcgtgatatttcatggaagtgttattgacctctctacaggcggctaattatacggtgttcgacggcgcgatgctgtaattttgttaaattagcgtgaaagaacgctgaaatttggatttcaattataatggctttcgcgattacaccagccatttgttatgcttgccgttattagaagtggaatgagtcattatgcaagcctggtacttactgtattgcaaacgtgggcagctacaacgagcccaggaacatctggaacgtcagtcagttaactgcctgatgccgacgattgcgctggaaaaaatcattcgcggtaaacgcaccatggtcagcgaaccgttgttcccgaactacctgtttattgagttcgatccagaggtgattcataccaccaccatcagcgccactcgcggggttaacaacttcgtgcgctttggcgccctacccgctatcgtcccctcggcggtcatccatcagctttctatctacaaaccggaagggattaccgacccggaaacgccgcatgagggcgatagcgtgctaatcaccgacggcgcgtttgaaggcctggaggcgatcttcaccgagcccgacggcgaagcgcgctctatgttgctgttaaacctgctgaataagcaagtcctgcagagcgttaaaaataccgacttccagaaaatctaaacgccgttaatgtcgacgccaaacagcgccctgacgtttgcgtccgtttgcgcctccagccattgcgcctcctcgccgcgccaggccgcgacgctggccaggatatgcggcaaatacgcgggctcgttacgccgcgaggccggtttcggcttgagatcgcgcggcagcagataaggcgcatcggtctccagcagcagacgttccgccgggatcgccggcagcagctcgcgcagctccagtccccgccgctcatcgcaaacccaaccggtaataccgataaacaggcccagatccaggcattcctgcacctcgctgcggctgccggtaaagcagtgcagcaccgcgcccgggagcttctcaagccagggtttaagcagcgtcagaaaccgatcgtgggcgtcgcggcagtgcaaaaacaccggcatcgacagctcagcggccagcgccagctgggcgctgaacgctacctcctgctcgtgcggcgtggaaaaattccggttaaaatccagaccgcactcgcctatcgccaccacctgcggctcgccggcgagggtataaatcgcctcggcgaccgctggcgtccagctgctaccgtcatggggatgaacccccgccgtggaccagcagccggaatagcggctcgccagtttctgcgcctgctggctctccgccaaatttgtgccggtcagcagcatgccgttaacccccgccgccagggcgcgcgccactacctcatcatgatcgcgggaaaactgcgaactggtcagattaacgccgatatcaaacatgatcgctcccatatgccaaccgccctgacgggcggttggcggtattactcttctctgtgctctgcggcttcagcttcggccgcggcgtcgtcatcgcgcgtcaggcgcttcccggtgtagaagcgggcaaagaacaccccgacttcaaacagacagtacatcggaatggccagcagtgtctgcgagaatacgtccggcggcgtcagcagcatgcccaccacgaaggcacccaccagcacatacggcctttttttacgcaagtcttccggcgtggtaacgcccatccagcagagcaacacaatggcgaccggcacctcaaaggagaccccgaatgccataaacagcgccatcacgaagtcgagatagctgcgaatatcggtcgagaccagcaccccttccggcgccgcatgggtcaggaagccgaacgccagcggaaacacgacaaaataggcgaaagccatgccgatatagaacagcagggtactggataccagtaaaggcaccaccagccggcgttcgtgcttatacaacgccggcgcgacgaaggcccatacctggtaaagaataatcggcaccgacaggatcaccgacaccatgaaggtcaactttatcggcgtaaagaaaggtgaagcgacatcggtggcgatcatcgtcgcgcccacaggcatcttactgataagcggggccgagaccagctggtagatatcattggcgaaatagaccagcgccaggaagatcaccagaatagcaatgatgctgttgagcagacgcttgcgcagctcaatcagatgcgaaattagcggttgtgtatcgtctacgcccatgtttacggtttatcactcgatgcgggggaagaatggggaactgccgccgtagcggacgttttctctgcctgaaggtcagccggtgaagcagattgctcggcggcaacgggatctggcgcatgagccggagcgctggcctgatgttctgccgtcgccggcgtgacgtcctggcgctgcgcttcgctgcctttgaccaccggattaaggatggtattggcttcgtcgctggctttttcgggatcgtgggcgctataggagcgcttcatcgactccgcggcctcgcgcagttcatccatcgaggctttcagctccggcgtcaggttattcaggctagccttttccaccttcttcaggctctcctggaactcctgcagttttagctcctgggccagctcattttgtaccgtggtcgccagcgagcgtaacgtacggatccagccaactaccgttttaaccgctacgggaagccgctgtggccccagaacaatgaggccaatcacaaacaccagcagtagttcactaaaaccaatatcgaacacgagttacacctgctctttgtcgtggcgttttgtctcgtctttttttgcatcatcctgtttatcggcgatggttttcgccgtgaaatctgcgtctggcgccgacttttcgggtttatcatcatcactcatagcttttttaaagcctttgatagatgcccctaagtcagaccccagcgagctcagcttcttcgtcccaaaaagcagaactacgatgacgacaacaattaataactgccaaatactgataccacccatacacgttcccctatgacagatgatgaattgtgtggacgcattatacacgccatcctgcgagccgcctcttcgtcaggccgccgacatgattttgcgcaaataagcctgcgtcatgaagaggcgaaccgatcagtgggttttccgccagccaataagccaggtcaccacaccgccggccatcagccaaccgggcatcattccccactcagggcgatggataaagagcagcgtaccactgagcaataaaaccgcgcctataccaaacaggtaacgggattggccctggcgcacatgacgcacatgcatatcccgcacaatagtatcgacgctggtctgcagctgtttactctgctgcaggctctgatacaccagctcaggtatttccggcattctttcgatccagaacggcgctttgtctttaaacgcgcgcaccagcgccggaatgccgacctgatctttgatccacgactcgaggaaaggcttcgccgttttccacaagtctaactgaggatagagctgccggcctaccccttctacgtaaagtaatgtcttctgtagtaaaacgagctgcggctggacttccatattgaaacgccgcgcggtattgaacagattaagcagcacgtggccgaaggagatctccgccagcggcttctcaaagatcggctcgcagaccgtgcggatcgcgaactcaaactcttcaacgttggtatcgggcggaacccaaccggaatcgacgtgcagctcggcaactttacgataatcgcggttgaaaaaggcgataaagttttccgccagatagcgcttatcttctttgttcagtgagccgacaataccgcagtcgatgccgatatactgcggatcttccggatgctcgtagctgacgaatatgttgccaggatgcatatcggcatggaagaagctgtcgcggaacacctgggtgaagaagacctggacgccccgctccgccagcagctgcatattggtgccctgggcctccagcgcctccacatcggacaccgggataccgtaaatgcgctccattaccatcatgctttcgctgcagtagtcggggtacacctccggcacgtacagcatcgggctgtcttcgaaattacgccgcagctgaatagcgttggcggattcccgcagcaggttcagctcatccagcagcgttttttcatattcacgaactacctcctgcgggcgcagacggcgaccgtcaggcagcagacgcggtacccagcgcgccaggcggtagatgagcttcatgtccgctttaatgatcggcaaaatatccgggcggataaccttgatcaccacctctttgccattctctttcagacgcgcggtatgcacctgggcgatggacgccgaggctaacggctcaacggagaaatcatcaaaccaggtctcgaccggcagcccccccatcgctttctctatctgctgctgcgcgagcttcccttcaaagggcgccacgcggtcctgcaacagcgccagctgatcggcaatatgcggcggaaagagatcccggcgggtggaaagcatctggccgaattttatccacaccggccccagctcctggagcgccagccgaaggcgggcaccaagaggctgatcctgatggcggtttggcatccagaacagcatccgccgccagatacgcagcggcagcgtgatccgcattttggggatgagctcatcgagcccgtagctcaaaaaggtgtggatgatgaaatacaggcgccgtaattctcctggcgtcatttgccctccagcgtttccagccgtttttccagtgcggccagcgcgcgctcaatagccgttgtctcttcagcaaaccaggccagctccagcggccccggcgccaggcgccactcttcagtgatcgcttccgcgacatagcgctgctggcgctctgcccccttcagcagaaactgagcgccgccgcgcaggactttaccgacgccttcggccacaatatcgccggtatagggcgccagcagttcagcgggatcaaactctgccaggtcgcacagggagaccatattctgcaccacctgcagatcgccctgcacttccagatcaccgctgcgaataagcgccgtgagctgctgacgattgcgcagttttggcagcacgctgagccgggtaatcacggtgcaatcggcctctccgtcccaggcgctcaggacgtcaacctggcgttcgctgaataccagcaccacgggcgtggcgaaatcctgcagctggacccgcaataccttgcccagcaggcgctggcgagcgggtttaagcgctttgtcgcgccagaggaaagtattcagcgccgtttcaatgccagcggtaaccaggggtgtgaaaggcatagcgtccctcctgtcagaacttgtaaccgcgatgcaaagcaacgatacccgccgtcaggttgtagtaatccacgttttcgaagcccgcatcctgcatcatccctttcagggtttcctggtccggatgcatacgaatagattccgccaggtagcgatagctgtcgccatcttttgccaccagctcgcccaccttcggcaggatatggaaggagtaagcgtcgtaggctttgctcagcggttcgataatgggtttagaaaactccagcaccagcagacgtccgcccggcttcagcacgcgatacatcgaacgcagcgctttctctttgtcggtcacgttacgcagaccgaaagagatggtgatgcagtcaaaggtattatcagcaaaaggcagggcttccgcgttggcctgaacatactcaacgttgcctacgatgccgatattgcgcagcttttcgcggcccattttgagcatagaatcattgatatcagcaagcatgacgcggccggtttcccctaccaggcgggagaacttggccgtcaaatcaccggtaccaccagccagatccagcacggtctgcccgcgacgtacgccgctgcagtcgatggtgaaacgcttccacaaacgatggatcccaaacgacatcaggtcgttcatcacatcatattttgcggcgacagaatggaatacatgcgccaccatatctgctttctgctctttagcgaccgtctgaaagccaaagtgcgtcgtttcttgtgaatcctcaaccatctctatgcctgcttgcttttcaagaaaatgttcactgagtgtatcagactcagcgcatttcccatacgtttcagcatggcggagccgcctcccggctacgcaccgtctcggcagagtcgggtgaaaatgcgtcattttccggcaggttatcctcatcttcgagacgatattgctcgtcctgagccgtagcttgttcgactaaatcaggattaatcccgcgcttgacctccacgcccaggccgcgaaaggcctccgcctgggccagcagattaccacgcccggaagcgagctttttcatcgcctggcgatagctctcttgcgccttatccaggctctggccgatggcggacatatcatccacaaacaggcgcattttgtcgtaaaggcgccccgcccgctcggcaatcttttgcgcgttacgactctggtgctcatagcgccacagattggcgatagtgcgcagggctaccagcagcgtcgtcgggctaaccagcataatattattttgcagcgcctcgctgatgagctcaggctggcgatcgatggccagcaggaacgccggctcaacgggaataaacatcagcacatagtcgagcgagcgcaggccaggcagctgttgataatccttgcgtcccagcaggcgaatatggttacgcaccgaggcaaggtgttcctgcagcgcgacttcgcgggtgtagtcgtcttcggcgttgaaatagcgctcataggcgaccagggtcattttggcgtcgatcaccacgtccttaccctgcggcaggcgcacgataacgtccggctgcatccgcgagcggttgtcggtctcaatactgacctgagtctggtactcatagccttcgcgcaggccggaggcctccagcacgcgggttaagaccacttccccccagttgccctgagttttgttatcccccttcagcgctttggtcaggttcagcgcctcctgtgccatctgcgcgttcaactgctgcagattgcggatctcatgcgccagggtatgtctttcacgcggctcctggccaaagctctcctgcacctggcggcggaacccgtccagctgttcgcgtagcggcgtcagcaggccatgcaggctctggcggttttgctcatcgacccgccggttgctgtgttcgaaaatacggttggcgaggttttcaaactgctcgctaaggcgctgctcgctgttcatcatctggcggatcttatcttccgcatgcagctgggtggattcgagccgggtggtgacctcacggagatcggcctcgagcgaggtattgatatcccgtaggctgcgcagctcgttgttcagcagctcacactcctcacgccagtgggcctcctgcgccagttgctggcgggcggcgctcagctcaatatccaactctcgccgttcctcgatgagatcggcccgaatttgatcggcgcgcgctttggtcgccagccagccgaccattaacccggctgccagtgcgataaccgcgctgataataatggagagatccacgacgccccctgcgataacctgatgacacaaaatagaattgtgctgtacaaacgtccagtttaaaaggaatttcctgcgagaggcgacgcaaaaaagaaaggccggaggatccggcctgacagggaaagtgttgagttacagcagacgacgcgccgcttccacgacgattttcaccgcgtggctttcggtttgcttcatggtttcggcgttagggatctcttgctgggtacggttcacgataaccccagccaccatcccggcgcgcaggccctggctggcgcacatggtcagcagcgtggcggattccatttcatagttcatcacgcccattgcctgccactcttccattgagcccttgaagcggctcacgacgcggccggagaaggtgtcgtaacgctcctggcccgggtagaaggtatccgaggaagcggttacgccgatatgggtggtggcgccgattgatttcgccgcttccaccagcgcggtggtgcaggcgaagtctgcgacggccgggaattccatcggcgcgaagtgcaggctggcgccgtccagacgaacggaggcggtagtcaccaacacatcgccaacgttgatgtgcggttgaatcgcacctgtggtgccgatacgcaggaaggtacgcacccccagctgcgccagctcttccacggcgatggaagtcgacgggccgccgatgccggtagagcagacgatcactggtttgccgtccagctccgcgcgccaggaggtaaattcgcggtgagatgccagtttaaccggcttatccatcagcgcggcgatcttttccacacgctccggatcgccagggacgatagccagcgtagccccttgtaaatcgttcttggtgaggccgagatgaaaaacatcagacttggacataaaaaactcctctgtgggtcgaattatcagcagaagcaaaacggtactgtacagaagcccctggcaacattttgtgatgatagtcaccaagaccaataatagttgcagttgtttttcagtaaatagtgatacacatcacattaacaagttatattcatcatcacagaacaaaagatagccgctttcaggcactgtgctttattaccgcccgaactaaaggtaaagggtctatagttactgatgcgctaataaataagggtacggagaataccatgaccaccaccaagcaacctggattcgcacctgcagcttcaccacacgccgcaaccgccgttcatacgccggaagagcatattatcgccggagagacgtcgattccctctcagggtgaaaacatgccggcctaccacgcccgcccgaaaaatgccgacggtccgctgccgatcgttatcgtggtacaggaaattttcggcgtgcatgaacatattcgcgatctttgtcgccgcctggcacaggaaggctatctggctatcgcgcctgaattgtacttccgtcagggcgatccgaatgagtaccacgatatcccgaccctgttcaaagagctggtcagcaaggtgccggacgcgcaggtgctggcggatctcgaccacgtcgccagctgggcggcgcgccacggcggcgatgcccatcgtctgctgatcaccggcttctgctggggcggacgcattacctggctgtatgccgcgcataacccgcagcttaaagcggcagtggcctggtacggtaagctggtgggagaaaaatcactgaattcgccgaagcacccggtagatatcgccgtcgatctcaacgccccggtgcttggtctgtacggcgctaaagacgccagcattccgcaggacaccgtcgagactatgcgtcaggcgctgcgggcagccaacgccacggcggaaatcgtggtctatcccgaagccgatcatgcctttaacgccgactatcgcgccagctatcatgaagagtcagccaaagacggctggcagcggatgctcgcctggtttgctcagtatggcggtaaaaaagggtaatcgccctaagcatgaaaaaaggaggcaaatgcctcctttttgatttttcgcgtaacgattaggcggactggcgcagatttcgcgccgcttgcaccatattcgccagcgcggcgcgggtttccggccagccgcgagttttcaggccgcagtccgggttaacccacagtcgctccaccgggatacgctgcgcagctttcttcagcagcgcttcgatccactccacgctcggcacgtttggcgagtgaatatcatatactcccggcccgatctcattggggtactcgaacgcttcgaacgactccagcagctccatatcggaccgcgaggtttcaatggtgatcacgtcagcgtccagcgcggcaatggagtccatgatgtcattgaactcgcaatagcacatgtgagtatggatctgcgtgtcgtctttggcgaccgcagcattaaggcggaaggcttccacaccccactgcagataggcatcccagtcgctgcgcttcagcggtaacccttcgcgcagcgccggctcatcaatctggatgatgccgatccccgccgcctccagatccgccacttcatcacgcagggccagcgcaatctgtttcgcgatggtttcacggctgacatcctcccgcgggaaggaccagcacagaatggtcaccggtccagtgagcatccctttcaccggcttgtcggtcagcgactgcgcatacttcgcccagtcgacggtgatcgcctgcggacggctgacgtcgccgatcaccaccggcggcttcacgcagcgggaaccatagctctgcacccagccgttttgcgtgaagataaaaccgtccagatgttcgccgaagtattccaccatgtcgttccgctcggcctccccgtgcaccagtacgtctaaacctaaccgctcctgctcgacgatcgcctgcttaatatgttccgcaatccccgtccgataatgactggcgtcaaggttaccctttttgaagtccaggcgcaggccgcggatctcggtcgtttgcgggaatgacccgatggtggtggtcggccatttcggcaggttaaagcgctggcgctgtgcctgcgcgcgaacctcataggggctggcgcgctggctgtcctgagcagtgatcgccgccagccgtttttccacctccgcgttgtgcacgcgggtcgaatggcgacgggcctggattggcgcgctccactcggtaatcgccgctgtatcgccgctgttcagcgcatcgcgcagcagcgccagctcaccgcatttctgcagcgcgaaggcaaaccagctcttcacttccgcatcaaggcgcgtctccacgcttagatcgatcgggctatgcagcagagagcaggatgacgcgacccatagctcgcgcttaccgacgaggtctttaatttgcgcatacttttcggtgagatcggcgcgccagacgttacgcccattgatcaagcccgcggacagcagccagtcggccggcaggcggttgtgcagttcggcaacatcatctttgccgtgcaccagatcgacgtgcagcccctggaccggtagcgcagcaatggtcgcgagattgtcgctaacgccttcaaaataggtagtcagcagcagcttcacctggccctgcagggcgtcataagccggttgaaaggcctccagccacgctggcggcagctccagcaccagcgccggttcatcaatctgcacccaatcgatgccgcgcttcgccagttcggccagcacctgctggtaaaccggcaggatggtattcagcagggtcaggcggtcaaacggttcacctttcactttacccagccacagataggttaccggccccagcagcacgggcttgatcttgtggcccagcgccagcgcttcgtctacttcatccagcagttgggtccagctcagtttgaactgctggcccttcacgaactccggcaccatatagtgatagttggtgttgaaccatttggtcatttccgcagcggcggccggttcgccagtcggcgcgcggccgcggccaatgcggaacagggtatcgatgtcgatggatccgtctttgttctgatgacgagccggcacgttgccaagcagcaggctggtagtcagaacatggtcgtaccaggcgaaatcccccaccggcagcagatcaacgcccgcctgtttctgctgctcccagtgacgggcgcgcagctcacggcctaccgccagcagttcctcgcgagtggcgttgcccgcccagtagctctcttgcgcttttttcagctcgcggcgcaggccaacgcgaggaaaaccgagggtgtggttaataattgtcatttatgttcctctcttatttcattgaatctgaagaaaaaatctcaatagttcggcttgcaggaaggcggcaacgatgcgcatccccaggagcttactgaaggaagtgactggggtaagcaaggcagccaacgcatctgcaagtcgaaatatgacgagttttagacgtccagatgtttacacatccataattgacagttactgtatattcctcaagcgcaaattgctcatggcgaagtgaaggactttcatgatcgaaattaaacatctgaaaacgctgcaagcgttgcggaacagcggttcactggcgggtgcggcagcggccctgcaccagacccagtccgccttgtctcaccagttcagcgatctggaacagcgccttggctttcgtctctttgtgcgtaagagccagccgctgcgttttacgcctcagggggaaatcctcttacagctggccaaccaggtgctgccgcagatcgctcgcgccctgcaggactgtaacgaaccacagcagacccggctgaggctggctatcgaatgtcacagctgtattcagtggctgacgccggcgctggagaatttccgcgcccgctggccacatgtggaggtcgacttccattccggcgtcaccttcgacccacagcctgcgctgcagcagggtgaactggatctggtgatgacctccgatattctgccgcgcagcggcctgcactactcgccgatgtttgattttgaggtgcgtctggtgctggcgcccgagcatccgttagctatgaagacgctggttaccccggaggatctggccgcggaaacgctgttgatttatcccgtgcagcgcgggcgcctcgatatctggcgccacttcctgcagccggccggcatcagcccgcagctgaaaagcgtcgataacacgctgttgttgatccagatggtggctgcccggatgggcatcgccgcgctgccgcactgggtggtggaaagctttgaacgccagggcctggtggtcaccaaaaccctgggtgagggattatggagccggttgtacgcggccgttcgcgatggcgaacagcgtcaaccggtcaccgaagcgtttattcgctctgcgcggaaccacgcctgcgatcatctgccgtttgtccggagtgcggagcgacccagcggcgatggacccacagcgaggccaggatcaccaacgctccgctaataaagctcggccagtgcggctgctcctgccagatggcaaggttaaccagcagcccggcggggacatggacgttattcatgatccccagcgtgccggcatccacctgggtggcgccatagttccacataaagtaacccagcccggaagccaccacgccgagccacaccagcacgctccactgcagcgtggtggtcggcagcttctgggcgttgccgagcataaaccacgccgccaccgccacgataaaggccccgacatagaaccaggcaaaggcattgtgctgcggcatcggacgcacctccatcagacgcttataccccaccataccgatggcgaagcagaggtttgacagctgtaccagtaacagcccggtccagaaatgatcgctgactttgtcatagcggataatcgccgcccccagcaccgccagcgcggcactcagcagatagccccagcgcagcttacgtccgctgagcaggtcgtagatcagtgtgatatacaggggagtaaacacggtaaacagcagaaattccgagaccgtcagatagagataggcgcggaaagccagcaggtacatgatgcctagctgcatcgcgcccaccagcatatagagcacgatcgtgcgcggcgactggccgcgcgtgcgcaggaaaggcaggaacaccagcgccgccaggcccacgcgcatcagcaccgaaaaatagctgtcgacgctaccggccaggtattcgccaatcaggctaaaagaaaaggcccacaggatagtggtgataattaacagcgccacaatggtcgtctcgttggataaagaacaggcattgtagcgaagagtcaggttgacgactggacacttattcgccagtcgtcaatctttttcagtcgaggtatagcttacgcaggtagtgcgggacagcatcgtcggcgttactgccgatcacttccagttccggatgcagatccttcagccgctggtgggcgttggccatgatgcagcctttgccagccatcgacagcatctcagcgtcgttcataccgtcgccgaaggcgatgcaatcggaaagagtgtagccgagcatcttcgccaccgcctccagcgcatgccccttcgataccccacccgccataacttccaggcaggttaaggtggagaagctgacgttcacccgatcgccccagcgggcgttcatcgcctgctccagcggcagcagatgctcatgatcctcgcaggtaaagaatactttgctgatcccctgcggatccagttcgcccggctcatacagcttgtagttaaacaccgcctccttgaagaagcgcatctcttccggacgatggcggttcatataccactcgtcttcccgataaacgttagtgacgattttcgggtcgttacgcacgatctcaaacaggtcggcggcaatatcgcgatcgaggttatgggcaaagatttgctgaccatcgctatcgtgaacgcgggcgccgttagaggtgatcatgtacgaccggatgccgagattatcgcggatttgcccgacgtcgatgtagtgacggccggtggcgaagacgaaattgatcccacgggcggtaagcagctttagcgtctctttggcatacggggtcaggaaatgatcgggggaaagcagcgtgccgtctaaatcagacgcaacaacctggtacataaaaaagttaacctctaagcagggcgacgagcgttatcgtcggattaagtatgtcgattgaaaaactcgacgatggcattgagcgcgactgagcgcatagcgtccttttcaaaaaggatctcatgatatgccccttcaatgacgagcggtttaccgccctcacaaggatggccggcagcggcccgtaattcgcaatagcggtcgtgcatcagattatcgaccacccgctcctcctccgcctgtaaaagcagcgtcggggcggtatctttttccacattcgccagcacttcgtcgccggccagcatgccctcacgcacccagtgccaggtcggaccgccgacctgcagccgcggctcatcggcatagaagcgcaggttgcgacgatagcgttgccgactgtgcgtcagcacgttaacggcaaaaggcagcgcccgccagcgcccggtgccgatggcatactcttcgcgaatgcgctgatggccctcagcccagtcgagaatatggcgcaccatccagtccggcagccgaatgataatcccgaacatcggcgcgcagagcgctattgcatcgcaatgcgcccggtaacgttgcagaaaaagcgtggcaatcgctccgcccatagaatgagcaaggataaaccgttttcgccagtgtccaggaaccacctgctgctgccagagcgcggccaggtcatcaacatagtcgctgaagttaaccacgtgtccgcggtgggtatctgagagcaggcggcccgagcgtccctgcccgcgatggtcaatgatcatcacgtcaaagccgcagtgaaagagatcgtaggccacttcagcatacttcacgtagctttcaatgcgcccggggcaaatcaacaccagacgatcgttatgttgcgcgcaaaagcggacaaagcgtaccggtacatcgtcgacgcctttaaattcagcttcttcgcgctgtcgccagaaatccgtcagcggccccatgctaaaggccgcaaacgcgttttctcgtgtttcccagtcctttttctgcccaaacatcgggtttacacccctgttaaccgctgaaaatcgtttttttaccgtgtatcacacaatgctgacacaatagcgtattgtggcataaaaacagacaatcagggagtttctcatgaccattgagtggtggttcgcctacctgctgacatcaattattctcagcctgtcgccgggttccggagcgattaataccatgaccacttccattaaccacggataccgcggcgcggcggcgtcgattgccggtttgcagaccgggctggccattcatatcgtgctggttggcgttggtctcggcactctcttctcccgctcggtgctggcctttgaggtgctaaaatgggccggcgccgcctacctgatctggctgggtatccagcaatggcgggcggcaggggcgatcgacctgaatacgctggcgaaggcgcagacgcgcggcaaactgttccagcgcgcggtgttcgtaaatctcaccaatcccaaaagcattgtttttctggccgccctttttccgcagtttatcctgccgcaccagccgcaggtgatgcaatatctcgttctgggcgtcaccaccatcgtcgtcgatatcattgtgatgattggctatgcgaccctggcgcagcgcatttccgcatggatcaaagggccaaagcagatgaaggcgttgaacaaagtctttggttcactgtttatgctggtcggggcgctgctcgcctccgcccgccatgcctgaatcatggaatctcgctcgcaaagagaggttcgcgaggtgaacgacgctttctctctgcgcgagccggcgcgcaaagtgggtaattaattttattgcccgctgtcggcgctgaacccgccgtgccaggatgccgccagatacgtgattcatggatgaacggcaatggcggaaacggcgacccctcatgatgcggtatttaaaacttttctctcacgggtagagacggcgcgcgattttatcgagctccacctgcctccgtcgttaacacagatctgcaaactggacaccctgcgtctggaatccggcagctttcttgaagacgatctcaggccttactacagcgatatcctatattcgctggaaaccacccgcggtgcgggctatgtccatgttctgatcgagcaccagagcgcacccgataagctgatggcctttcgcttaatgcgctatgccatcgccgccatgcagcggcacctggagagcggccataaaacgctgcctctggttatccctattctcttctatcagggacgacgcagcccctatccctggtcgatgcgctggctggataattttgccgatcctgagaccgccagccagctctatagcggggcgtttccgctggtcgatatcacggtgatccccgacgacgacatcatgcagcaccgcagcatggcagccctgacgctggtgcaaaagcacatccgccagcgcgatatggcgcaattgctggataagttgacccacctcttaatgctggagcagatgagcggacaacaaatcaccgtattggtaaactatatggctcaggcaggggatgccgaagatactcggacactcttgtacgggctggcacagcgcgtgccgcagcatggaggattactgatgacgctggcggaaacatggcttgcagaaggtatggagaaaggcgtacagcagggcataaaagaaggtaaacaccaggctctggtgcaggttgccgaagcgatgcgcagtcgcggtattgatgaccaggcgattatggaaatgaccggtctgtctgaagacgagctgcagcggcttcgccactgatactttcccacccggaaacaaccgggtgggaaacagcatgccggttaacgcgagataatcaggtggatgccgaagcccgcaaacagcgtaccggcgataccgtcgatccacttcgccatccgctgatagccgcggcgcatcccgggcagggcgaacaggctggcaaccaccataaaccaggccagcgtctcaacgataatcagcaggaaaatgccccagcgcgcgccggcgccgacgctgtcacccacgaacagcgaaaacaccgagccgaagtagataatcgctttcggattcgccagattggtcagcaatcccttcacgaagctgcgtccgctgcgggccagctccacctgcggctccgccgaggccaccttctcttttttcagcgcgccacgcagcatctggtagcccatccagcatagatacaggcccccgccgaccattataatgttatgcagccacgccatccgggcgaggatcaggttcaggccgagcagcgccactcccgcccagaccatgacgccgcaggtgatccccagcacacccatcatcgcctctctgcgcgagcggctgatggccgtttgtgagacaaagaaaaagtccggccccgggctcatcagcgcaatgatatgcaccagcgccacggtgaggaaaagcatcagcatagttaactcgcaggaaaataatgaagagagaaactattctggcactttttcagccagctgactactcatcgtcgccatcaacatgcgcccgaatcagcgccataaacggcttcccgaaacgctcgagcttgcgtgtccccacgccgttgacgctgagcatttcgccggcggtcagcggcgattgttcggccatctcgataagcgtcgcgtcgttgaagaccacatatggcgggatgttctcttcgtcggcgatcgctttacgtaatttgcgcagcttggcgaacagtttacggtcgtaattgccgccaaaggatttctgcatcgcctttggcttcagcgccacgatacgcggcacggcgagctgcagcggcacttcgccacgcagcaccggtcgcgcggcttcggtcagctgcagcgcggagtgctgggcgatattctgcgtcaccagcccaaggtggatcagctggcggatcacgctcacccagtgctcgtgactttgctcccggccgataccgtaaaccggcagcttatcgtggcccatctctcggatgcgctggttgttggccccgcgcaggacctccaccacgtaacccattccgaagcgttgattgacccggtaaatcgttgaaagcgccttgcgggcgtccattaagccatcgtactgctttggcgggtcaagacagatatcgcagttgccgcacggctcctgacgcccttcgccaaaatagttcagcagcaccagacggcgacaggtctgcgcttcggcaaacgcccccatcgcattcagcttatgccgttcgatatcctgtagcggcccggcgggtttttcttccagacagcggcgcagccacgccatatccgccggatcgtaaaacagcatcgcttccgccggcaggccatcacgcccggcgcggccggtctcctgatagtaggattcaatattgcgcggaatatcaaaatgcaccacaaagcggacgttcggcttgttaatgcccatcccgaaggccaccgtcgccaccacgatctgcagatcgtcgcgctggaatttctcctgcacctcggcgcgcacgtcgttttccagaccggcatggtaagccgccgcgctaataccgcggctttgcagcctggcggcggtgtcttccactttcgaacggctgttgcagtagataatgcccgatttgccgcgctgatcctgaacgtagcgcatcagctgatcgagcggcttaaatttctccatcagcatatagcggatgtttggccggtcgaagctactgacctgaatcagcggatcgttaagccccagcaggcggacgatatcgcggcgggtggtgtcatcggcggtggcggtcaacgccataaacgggatctgcggcatccgctgacgcagctggcccagcgcggcatattccggacggaagtcatggccccactgcgagatacagtgcgcttcgtctaccgccagcatcgccagattccagttcgccagatgctcaagaaagttatccagcatcagccgttccggcgcgatatacagcagacgaacctgcccgctgcggcagccggccatcacctcctgctgctgctcgcggctttgcgtcgagttcagacaagccgccgccacgccgttggccagcagctgatcgacctggtccttcatcagcgagatcagcggtgagaccacgaccgtcagaccgcccatgaccagcgccggcacctgatagcacagcgacttgccgccaccggtcggcatgaccaccaggcagtcccggccttcgagcgccgtctcgataatcgtttcctggccaggacggaactgctggtagccgaaggtctcttgtaaaacctgcttagccagcgattcctgatttaatacttccgcctgtgccacgttgaccccatttgcctgaaaagaaaacaggcgctattttcagcgcctgcgagccagagtgcaacgattaaaacagatcgttgagcattagcccgacgccgacgcgcgtttggttaaagttatagtcgataagcgactcgccatagccgctgtagatctgcgtataggcgcgaacatgtttggtaatgggatagctcacgccaagttccgccccgccgtagccggtgttccagttgtattgcccctgcgcgctgaggatcgcctctcccagctggtagcccaccttcagccggtaatagcccatatatttggtgatatccgggttatcatcggtgttgcccaccacataccagggcttcacttccaccagccagttaccgttttgcgccatcaggcgggcataaagccgattccagctgcgcgaggtggggtcggaacgcccattcgagtcgtggttataccccatctcgatatcgcgcagcgtccagccggcaaactggtagtcggtcgcaaagcccaaaaacagctggggttcataattggtttcgcgaaacggcgccgactctttgctgttagagagctgccaccaggatttctgggtataggacgcgcccagcagcgaattatcgcccaggataccgcgccacagcgggaacgccaggcttagctgaaacttcacttcatctttacgggcattttcggcccagtcatagctgcggatcgcctctttattgaggtcgctggtccacgtatagagcagatagttgctctcataagggtagagcaggaaaggattatcatggtcctggagcaggttggcgataatgctgccgcgcactgccggtttgtcgtgtaccgacgcgtcctgcgccataacaccggccggtagcgcgcacagcgccaccaggcaggccaaagagatacgcatgctggtctcctgaaaaatagtttttatttttgtttaacctgaagccattctacctgtttattaatcacctgccccctaatccgctccgaaagtggaaatcaatattttagaagcataaaatcaacattttattaacgaatggaaccggtgttatgtctgaacttactgccgaagcagccctgaaactggtaggggagattttcgtctatcacatgccgtttaaccgcgccctcggtctcgaactggaacgctacgaaaaagcgtttgcccagcttagctttaataatcagccgatgatggtcggcaactgggcgcaaagcattctgcatggcggggtgatcgcctccgcgctggacgttgccgctggcctggtctgcgtcggcagtacccttacccgccatgacaccatcaacgaagaagagttgcgccaacggctttcccgtatgggaaccatcgacctgcgcgtggactacctgcgtccgggccgcggcgaacgttttaccgccaccagcaccctgctgcgcgccggcaataaagtggcggttgcccgcgtggaactgcataacgaagctcaggtctatattgccagcgcaacggccacctatatggtgggttgattggccaaaatcgagtaacatcactctctttggcaatggattttaccgatggatgcgaaacagacgcggttggggatcattctggccctcgccgcctactttatctggggtatcgcgccagcgtacttcaaacttatctactatgttcccgccgatgaaattttgacccatcgcgtgatctggtctttcttcttcatggtggcgctcatcagcgtcagccgccagtggccacaggtgaaaaagctgctgaaaacgccgcgcaagatcttcctgctggcgctctcggcagtgctggtcggcggtaactggctgttgttcatctgggcggtgaataaccaccatatgctggaagccagcctcggctactttatcaacccgctggtgaatattttgttggggatgattttcctcggcgaacgctttcgtcgtctgcagtggctggcggtgatcctcgccttttgcggcgtgctggtccagctgtggacctttggttcgctgccgataatcggtcttgggctggctttcagttttgccttttacggcctggtgcgaaagaaaattgctgtcgatgcgcaaaccggcatgctggtggaaacgctgtggctgctgccggtggcggcaatctggttgttcggcatcaccgacagcccgaccagccatatgggcgagaacccctggtcgctcaatctgctgctgatggccgcgggcgtggtgaccaccatccctttgctgtgctttaccggggcggcaacgcgtctgcggctctccacgctgggctttttccagtacatcggtccaacgctgatgttcctgctggcggtgacattctacggcgaagtgccgggcaaggataaaatggtgacctttggctttatctgggtcgcgctggcggtgtttatcgtcgatgcgctgtatacccaacgccggttgcgcagaggctaagcctgcatcagccagtaaagaagggagccgacgctccctttttttacagccagtttttacgcttgaagtagagatatggcgccaggccggccaacatcataaacacgatggctcccggataaccaaagctccaatgcagctccggcataaattcaaagttcatcccgtagctggaggccaccagagttggcggcaggaataccaccgagaccaccgagaagatcttgataatgcggttctgctcgatattgataaaacccatcgccgcctgcatcaggaagttcaccttctggaacagcgattcgttgtgcggcagcagagattcgatatcgcgcaggatctcccgcgcctgctccagctggcccgccggcaggcgcgccttgcgcacgaggaagttcagcgcgcgctgggtatccatcagacagaggcgcaccttccagccgatatcttccagttccgccagcgtcgacagcgcttcgtcgtactcgtcgccctgatggccttccataatgacgcggctcagcttttccaggtcgctgtagatgttttcaatttcatccgccagctgctcgattttggtctcgaacaggtcgagcagcagttcgtaggcgttgccgtcgaccagcgtctggttacgcacgcgcatacggtagaggcggaaagcgggtagttcgcgctcgcgcagcgtgaacaggcggccttcgcggatggtaaacgccacggtagagttgccggcgtgatcgtcggcatcttcaaaaaagaagaacgagtggatgtgtaacccgtcttcatcttcaaagaaacgcgcggaggcttcgatatcttccagttccgggcgcgtcgccaggttttgacccagttccgtctgcacgcggcttcgctcatcgtcgtcaggctcgaccagatcgacccacaccgagctggcgaggtgtttgatctcatcggcttccaggcgcgttaaacgattgttttccagttgaaatgcgctcagcatgaccgggactcccaatgcaaaaaaattatcggacagttcggtgggcacacagaaacaaattgggtttcagaccattaagcctgactcagcgcgacgggaatggggcaggtcgctgacaaccgctaaggctatcagcataagaggatagccttaggagttgttcctgaatgacaggaagttgagccagcatctactgggtgtgtccaaggcgaatgtcctcttagcgtaatcgtgcgcgcatgttacgccagcgcaaaatcggcgtcaacacgcaacggaacgcgaaagcgcaaatcaggcgccttaacgtataaaggtagcagaatattacaaaataatgatatttttcttaaagttacactgcctccagccgggcgtaagccgccaccagccatttgattccctggccctgaaaagccacctgcagtcggctgtgctcgccgctgccttcgaggttgacaatagtgccttcgccaaacttcggatgccgtacgcgctggcctaacttgtagccggtatcgctctcggcaatcggcgcgcccagtcgctgatggtttaccgggcggctcaccgtggctcgcagacgcacttcttctacgcactcctgcggcagctcgccgataaagcgcgacgggcggtgataaacctctttcccgtacagacggcgggtttccgcataggtcagcgtcagcttctgcatggcgcgcgttacgccgacgtaggccaggcgacgctcctcctccaggcggccgccttcatcaagggccatctggctcgggaacatcccttcttcgacgccgacgatgaacacctgcgggaactccagccctttcgccgagtgcagggtcatcagctgaaccgcgtcctgccaggtgtccgcctgcccctcgcccgcttccagcgcggcgtgggagaggaacgcctgcagcggcatcagatcttcatcttcttcgttgtagctgaactggcgcgtcgccgtcaccagctcctctaagttttcaatacgggtctggcccttctcgcctttctcctgctcgtacatcgcgcgcaggccggagtctttaatcacccgatcggtctgaacgtgcagcggcatatcggtggtctcctgcgccagcgcgtcaatcagctccataaagcgctgcagggcgctggcggcgcgaccggccagcgctttttctttcaatagctcacgactggcctgccacagcgtcagctggcgatcgcgcgacgtctggcgcaccacgtccagcgtgcggtcgccaatgccgcgggtcggcgtattaaccactcgctcgaacgccgcgtcgtcgttgcggttggcgataaggcgcaggtaagagagcgcgtctttgatttcctgacgctcgaagaagcgcatgccgccgtagatacggtacggcatgctggcctgcaggagggcctcttccagcacgcgcgactgggcgttactgcgatagagaatggcgcattgctccagcgcgccgccgttctcctgccaggttttaattcggttcaccacaaagcgcgcttcgtcgagatcgttgaaggcgcagtacagcgaaatcggctcgccgtcggcgccgtcggtccacagctttttgcccaggcgcccgttgttgttttcaatcagggcgttggcagcgctgagaatattgctggtcgagcgatagttctgctccaggcggatggtttccgcgccggggaagtcgttaaggaagcgctgaatgttctcgacctgcgcgccgcgccagccatagatagactgatcgtcatcgccgacgatcatcaccttgccggtatcgcccgccagcaggcggatccaggcgtactgaatgttgttggtatcctggaattcatcgacaaggatattggtgaagcgctcgcggtagtgctgcaggatatgcggtttgttcagccacagctcatgggcgcgcagcagcagctcggcgaagtccaccagcccggcgcggtcgcaggcttcctgataggcctgatagaccttctgccaggtctgctcgaccgggttgccgtagctctgaatatgatgcgggcgcagcccttcatctttctggctgttgatgtaccacatcgcctggcgcggcggccactgtttctcatcgaggttcatcgccttaatcagacgcttcagcagacgcagctggtcttcgctgtcaaggatttggaagtcctgcggcaggttggcatccagatggtgcgcgcgcagcaaacggtgcgccaggccgtggaaggtgcccacccacatgccgccctgggtggtgcccatcaactggccgatacggtgacgcatctccgccgccgctttgttggtaaaggtcaccgccataatggaatacggggaacagttctccacgctcagcagccaggcgatacggtgcaccagaacgcgcgtcttaccactgcccgcccctgccagaaccagcatattggtgcgcgaggccgctacggcttcacgctgtttgtcattaaggctgtcgagcaggtaagaaacgtccattggcaccgccggaagagaaggggttccacgaacccctgttaatatatacagagtgactggtgattatatcagcgaggtcagagatgccaaccgtgaaatttcaatatgcggcagcaggcggctgtccgcggtgtgcatcaggtccgcgccttgcggtttgatccagcaggcctgcatcccacagcgaatagcgccggccacgtcggtggtcagatcatcgccgacgtgcagaatctgcccgagcggcacattcagacgctccgccgcaaggtggtacatgtcggcaaacggcttggagcggccatccggcccggcgcgcagcacgaagcggaaatagtcgctcagaccgaacagttccgggcgggcgttgccattggtaatcgccaccagcggccacttcttcgccagcttcgccagcgtatcgtgcgtttcctgcgggacatcgacgcggctgcgccagtgagcgaagtgttccatcgccgcatcggcccccgctttcgccgcttcggcggagagcccggcattacgcatacctaactccagcgcacggtggcgccagacggtcacgtcatgataaatctcaggttcagcagccagcagcgtctgacgcagctgattaagctcatgggcgtcgaactggctgagcgaaggatggtagctgcgcacaaaggccagcgactcgtgcatcgtccggtcaatcaccgggcggttatcgtaaagggtatcgtccaggtcaaacgtcagcgcggaaatctggcccagaggtcggtaaaaacgcattatttcccccgtttagcgcgcggatgcgcggcatcgtacaccgaggcaaggtgttgaaaatcaagatgggtatagatttgggtggtggagaggttagcatgccccagcagctcctgcacgccgcgcagatcgccgctcgactccagcatatgggtggcaaaggagtggcgcagcttgtgcgggtgcacatggctgttcagcccctgcttaatgccccactcggcgaatcgcttctgtacgttgcgcgccgaaatacgtttgcccagcttcgacaaaaacagcgcgtcgtcgtcggtaccgaacaggccgcgcaaatccagccagtgctcaatccatgccaccgcgttgcgaccgatcggcaaacgacgctccttgctgcctttgcccatcacccagacctcaccgctttcgagatcgaggtgtttgatatccaggttgaccagttcggacaaacgcaatcccgcgccgtacatcacctccagcatcgcccgatcgcgcaccgccagcggatcgttgagatcgatatccagcagtcgattgacgtcatcgacgtcaatattttttggcaggtggcggggaattttcggcgcggcaatccccttcgccggattggcgctgagctcgccctgaccgaccagccagtcgaagaaactgcgcagcgccgacaggcgaagcgccaggcttgccgggcctaaccccgcgcggcgactacgcaccgcaaagcttcgcacctgagcggcatcgcactgcgaccagcttttcaggcccgcctcatccgccagggcgatcagcgcgtccagctgtcgctggtaattcagtaacgtgatcgggctgagctggcgttcaacgccaagatggcgaagaaagcgggcgacggcggagaagagaggagaatcggtcatgcgcgttcaatccagcgctccagcaggccgggcagcatctgggcaatctcctgcaacagctgcgtcccctgccctggctgataatgctgcgcatcgcggctgctgaagagcatcacccccggggcattatcgccccccagcagcgatatcgccacagacccaatggccttcgcctccggcagcaccaccagcagctccgggccgttcagcggtccaagatagtggcgcgcctggcccagacgttgaatacggatcggctcaaacgcctgccggtttaatgccagatgggtaaacttcgagggcgcgccgaggcgccagcagtcaggaaacaggcgcaccgtggcgcccgccagccccagctcgcgtgcccagcggtgaaggcggttgagcatatcgtcaaggctctccgccgccgccagccgcgtttgcagctgcagcaggcgctggaacaggctttcattagcgaccgcctgctccatcagcagcgacatattttcttccagcacatgaatatggttacgcgcccgcatcatgtgccactccaccagcgaaaacgtaccgcgtaccggatgcgggacgcggagatgttcgacctgggcggcattacgaataaaaaattcaggatgttgcaacagatagtccaccactgcgcgatcgttcaacgcgctggcaacctcctgctgttcttccccgattggtttcataaatgaataaatccatcatagacatgggccgccgggccggtcataaacagcggctggcccgggcctttccaggcgatatcaagacgaccgccgggtaattccacgcgtaccgtttccgccagcagcccctgctggatccccaccgccaccgcggcgcaggcgccgctgccgcaggcctgggtttcccccgcgccgcgttcgtagacgcgcagacggatatgagaccgaccgaccacctgcataaagccgatattggcgcgctccggaaaacgctcatggctttccatcaccgggccgagagtttccaccgctgccgtatccacatcatcaacctggatgacgcagtgcggatttcccatggacaccacgccgcacaatactgtctgctcggcggcacgcatgatataggtcttttccgctttgttggcgcggaacggcacctgggacggctcgaagttgggctcgcccatgttcacccgcaccagatcgtcttccgttacgcttaataccatacgcccgttggccgtactcacgcggatatcacgtttattggtcaggcctttcagccggacgaagcgggcaaaacagcgcgcgccgttgccgcactgcgacacttcgctgccgtcggcgttaaagatccggtagtggaaatccagatccggatcgtagggcggttcgacgaccaatagctgatcgaacccgacgccaaggtggcgatccgccaggcggcgaatcagctccggcgagaaaaaaacattctgcgttaccgcgtcaacgaccataaaatcgttgccaaggccatgcattttagagaactgcatcatctactccagttgcgcggaacagaacgttatcgttagtaattgacctggctcggaccaccggtatcgccacgatcgttacgatccggcgttgcgctctgaatgccagggttaaccggtttggtcggcggcggcgcggttttgtccgccggtgggaaatagagaggccctttcagaccgcagccggtcaggctgaagatcgcaaacaaaacggcaagcgtaggaaaaacgtttttcattgatagttgcccgtgattcattctttctgctttctatcatcgcaggagaagacgtaaaagcaagcctttagcatccgactgcgcgcgcttttgtttcgcgctatactgcgacccatcttcaaaaatcaaaaaagcagaatcaaattatgaacgacagtgaattccatcgcctggccgatagcctgtggatgaccatcgaagaacgtctggacgactgggacggcgatagcgacatcgactgcgaaatcaacggcggcgtgctgaccatcagctttgaaaacggcagcaaaatcattattaaccgtcaggagccgctgcaccaggtgtggctggccaccaaacagggcggctatcacttcgatctcaaaggcgacgagtggatctgcgatcgcagcggcgaaaccttctgggatctgctggagcaggcggcgagccagcaggccggtgagacggtgaaattccgttaatgacgtgtttcccggatagcggcgcatcgcgccttatccgggctacccgacgacttagaaccgtagccctgctaagcgcagcgccagcagggaatatctgcggatagcggctcacgtcttctccgggccaaatctacgagtagcgctgctgcagcaccggcgaggcggtaacgtcctggctggtgggtatcgcggcggcaatcgcctgagtgcggaaagggatcacctgggtgcgcccgtctacctcgacaatctgatagaactgcggcaggttgaagttgataaagctggagccgtaggtgaaacgatcgtgcgatgacgaatagaagcggctgacgtcgcgcaccagctcctctttactgccctcgcagtgatgatagacctcggcgcggttgctctcatcaagaatatagatgttaaaaccgctgtcgttgttatccgcgtcttcaaagaagaactgaataatcccttcgctggcgaagccatccaccaccgccggcagcttaacgtgattggtttccacctgcaccgacagcccgtgcagcttgttgtgcgagatagcgccgtagaactcaatggcgttttccagcttctgcaccgaaacgttaagccgctcgaagaacagcccccacgtctggccggagacgcgcagcgctttgaagcgcccggtatcctggcgggtactggagagacgcagttcgatacattcggagatcatctgctgcacgcgggtgcggatcaggccgcgcaggtgctggctatagcagaacacctccacgctgtccggcggcgcggcgtcctggtgcattttgccgaggatcgttttcagcgcctcgatcatcgcctgttcgccgttaaagtgcagcgtacgcacttcgttccacgagttgcgatacagcaggtcgacgctgccgatcaggcatttttgctcttcgccgaagctgaaaacatccagtttacggaaatcgaagtgcaccacctggttgcggaaggccgcggttgggtcatattcgaggttgacgataatcgccaggtggcggatttcgcacgggctgtacagcgcctttggcgtcggcgccggcaggcgcagcgggaagtggtgcgacacgtcggccaccatctcctgcagcttcgccagatcgacgatgccgttgcccttaataaacaggcgggtgcgtgaggtcagcaggccgttaaaccaggcccaggccaccagcttattaagataacggttatattccagcggctgatggctgatgatcgattccatgtccggcgcgcggttgtacagataccaaccggtacggttggcgcggcccggcggcacgtggataaaggtcaggttcggttccgaaagatccggcgaaatttgcgggtttaccagcgtcactttccccggcagcgcttcaaaggccgcatacagcttacgggtcagcacgccaatatcctgcgggctggcggagacgctaaggttattgcgccgcgcgaagcggatcagattacgatagctctgcatcatggcgtcgagcagttcgttgtgcgccttgcgcacttcatcgattttccagttggcgcggttgtcgagcatcatcagacgcttttcgtcccagccccaggcattcaccaactggctgacgacttcgcgacgccagccgacgcaggcgcgttcgcggctgagtttttcacaaactttcaggtagaagcagcggcgcaccagatcgaggcgggtttcatcttcgatggcctgcagataggtggtcacgcgctccagcatcatgcagtacgggtcgaggccgaaggagacaatctccccgtcgtgcagacgctgtttgatatctttcgctaacaggcggttattggggtattcccaggagtaggcttccagcagcagcgttttcagcaccgctttatagggggagtcgatacttttatacagctgccataggctggcgccgaagtactcttccgccgacagcgaactgaggccgccgagatcgagccattcgttaggcgtcagcacgccctgggcatacagccccatcacgtaatcatcgtaatgctcctcttcatcgcacggcaccatattccacagaatacgcttgccggcgaggcgcaccgcggtgcggtagaactcatcaagcaacaggatatgctgggtcgaaccgcagtcttcgccgccgaggctaccgctttcgttatgacggaaacggttttcgtcgatcaggaagaagctgacttccacgccgagcgaggcagcccagctctcaagcaggctgcattttcgctgcagcagctgacgctcttcgctatccagccaggcctggtgacatacccagatatcaagatcggaagagcagctctggccgacggaggaagtactgcccatcgagtagacgccggtgatcggcagctcgcctttcggcggctcctgagtctgcataccgcgatgcagttccagttcttcaagatagtggcgttgggtttcatcaggcgtgtagaggcaaatgccacggggaacgttaccgtcaaggtaacccggcatcagcgggtgatgataatgtaataacgttggcagtagactgtaaacctgctggaaagcgggtcccatggcagcaagcgcgcgatccacgcgcaattggttgatggcatccagtctctgtttcagtgtctcaatatagaggtacaagacatatcgcctgatgttcaaaaacccgaggtacaatagtacggaggatttcagtatttcaacaaaaaccgtcaccattcgtcgtcggtgtggttgtgatgagcagcggactgacaaatggtttaaaacgtgatcaatttaacaccttgctcattgaccgtaaagaaagatgcgctacatacaagtgtagcaccgtttattacctgtaaattcctcactacgcctccggcaaccgccacgcgcatgaaaggttaaaaaagagtgggccggagccacctcccacataaaccgtgaaaactaacatccgtaagacaacaatgttaggatggatagtggtcgataatgacggtaacaagcatgttagacaaagttttgaaaattgccacacggcaaagcccgcttgcgctatggcaggcgcagtatgttaaagcgcgcctggaacaagcgcatcccggactgaaggtcgagctggtgccgatggtcacgcgcggggatgtcatccttgatactccgctggcaaaggtggggggcaaaggcttatttgtgaaagagttagagctcgccatgctcgaagggcgcgccgatatcgccgtccattcgatgaaagatgtgccggttgaattcccggagggcctggggctggtgactatctgcgagcgcgacgatccgcgcgacgcgtttgtctccaatcgctatgcctcgattgacgaactgccggccggcagcgtcgttggcacgtcaagtttacgccgtcagtgccagctggccgccacccgtccggacctggcgatccgctctctgcgcggtaacgtcggtacccggctgagtaagctggataacggcgagtacgacgccatcatcctcgccgccgccggcctgaagcgcctgcagctggaagcgcgtattcgccagccgctgtcgcctgagcaatctctgccggcggtcggccagggcgcggtcggcatcgaatgccgtcttgatgatgcatggacccgggggctgttagcgcctctcaaccatacggaaacggcggtgcgcgtgcgcgccgagcgggcgatgaacacccgcctcgaaggcggctgccaggtgccgatcggcagctatgcggaactgaaggacggggaactgtggctgcgggcgctggttggcgctccggatggttcacagctggtgcgcggcgaacgacgcgggccagcggaacaagcggaagccctcggcatctcgctggcggaagagcttctggataatggcgcccgcgagattctcgcggcggtttatgatggagaagccccgcgatgagcatcctggtcactcgtccactaccgcaaggagaagcgctggtcagccgtctgcgggccatgggacgcgtggcctggagctttccgctgatagaatttacgcccggcagggagcttcccgcgctgggcgatgcgcttgcccgactggggcccgacgatctgctatttgcgctatcccagcatgcggtggaattcgcccatgcccgtctgcagcagcagggcctgccctggcccacttctccgcgctattttgccattggccgcacgacggcgctggccctgcatacggtcagtgggcagcatatccattacccgttagatcgggaaattagcgaagtcttgctacaattacctgaattacaaaacattgccgggaaaaatgcgctgatcctacgcggcaatggcgggcgggaactcttaggcgcgacgctgaccgagcgcggcgccagggtcacattttgtgaatgttatcaacgtagtgcaaaacattacgatggcgcagaagaagcgatgcgctggcaatctcgcggagtcaccacgctggtggtcaccagcggcgagatgctgcagcagctatggtcgttaataccgcaatggtatcgcgaacagtggctcctgcactgccgcgttgtcgttgtcagcgaacgtctggcccttcaggcccgggaactgggctggcaggagattcaggttgccgatagcgccgacaacgatgcgctgctacgcgcattacaataactctcaacattggaagccataatgacggaacaacaaaatcaatccgccgtggttgaagagaccagggaggccgtggagaccacaccacagccagagaacactgagaagaagaaggcaggcaataaaaccagcctggcgctcagcgcgatcgctatcgccattgcgatagccgccggcatcggcctgtatggcctgaacaaacaacaggccacgcggcaaaacgcaactacctctgaattagcaagccaggtcgcggcgctgcaaaaagcgcaggaaaatcaaaaaagtgaactggaaggtgttatcaaacagcaggccgaccagctaaacgaagccaaacaccagcaggagacgctggccaaacagttggatgagctgcagcaaaaagtggcggtgatttccggtagcgatgccaaaacctggctgctggcccaggccgacttcctcgtcaagctggcgggacgtaagctgtggagcgatcaggatgtcaccaccgccgccgcgctgctgaaaagcgctgacgccagcctcgccgacatgaacgacccaagcctcatcggcgcccgccgggcgatcaccgacgacatcgccaccctctccgcggtaagccaggtggactatgacggcatgatcctcaaggttaatcagctggcgaatcaaatcgataacctgcggctggccgataataacgatgacgattcgccgatggacgctgatagcgatgagctttccagctctatcagcgaatggcgcgtcaacctgcagaaaagctggcagaactttatggacagctttatcaccgtgcgccgccgcgatgaaacggcggtcccgctgctggcgccgaatcaggatatctatctgcgggaaaatattcgctctcgcctgctggtcgccgcgcaggcagttccgcgccatcaggaagagacctggaaacagtcgctggataacgtctcgacctgggtacgcgcctattatgataccgatgacgccaccaccaaagccttcctcgacgaggtggacaagctcagtcagcaaagcattaccatgacggtgccggaaacgctgcagagtcaggcgttgctggaaaaactgatgcagacccgagtgcgcaacctgatggcgcagcctgccgttaccgcgggcggcgcgccttcgcccgcacctgctgcgccggccgcccccgctgcgccgcaaggagagtaacgcatgctgaaaattcttttactcttcgcactgttgatcgccgggatcgtgctcggcccgatgatcgccgggcatcagggctacgtcctgatccagaccgataattacaatatcgagaccagcgtgaccgggctggtgatcatcctgatcctcgccatggtggtgctgttcgccattgaatggctgctgcgccgcattttccgcaccggggcgcatacgcgcggctggtttgtcggccgtaaacgccgtcgcgcgcgtaagcaaaccgagcaggcgctgcttaagctggcggaaggtgattaccagcaggttgagaagctgatggcgaaaaatgccgatcacgccgaacagccggtggtgaactatctgctggcggcggaagcggcccagcagcgcggcgatgaagcgcgggccaaccagcatctggagcgcgccaccgagctggcgggcgatgacctgatcccggtggaaatcactcgcgttcgcctgcagctggcgcgtaatgaaaatcacgctgcgcgccatggcatcgataagctgctggaaattaccccgcgtcatccggaagtgctgcgcctcgccgaacaggcatacacccgcaccggcgcctggcagtcgctgctggacatcattccgtcgatggcgaaagctaacgtcggcgatgaagcgcaccgcgcggcgctggaacagctggcctgggttggcctgatggataaagcgctggccgatggcggcagcgaaggactacgcgaatggtggcgcaaccagagccgtaaaacgcgggcgctggtgccgctgcaggtagcgatggccgagcgcctcatcgagagcgacgatcacgataccgcgcagcaaattatcattgatggtctgaagaaacagtatgatgaccgtctggtgatgccgatcccgcgtctgaagaccaataacccggaacagctggagaaagtgctgcgccagcagatcaaagccgttggcgaccgtccgctgctgtggagcaccctgggccagtcgctgatgcggcacggcgaatggcaggaggccagcatcgccttccgcgccgcgcttaagcagcgtccggatgcctttgattacgcctggctggcggatgccctggaccgcctgcatcagccggaagaagccgccgctatgcgccgagatggactgctgctgacgctgcagaataatcctcagccataacctggcatggctatcgcctcctgcggggcgatagcccttctcccccgccttcgcattgacggatccctgaaagaaaaaaacgcctgcgctgaaatcagggcaggcgttaaaacaggtctgtttgacaacaaattgggtgcttcactcaacgtaatgtccatggtgtttgatgaggcataaatgcgacatctgtcagtggacgataagcaccgtaagaacggctctgcatcattccggagtttatgaggcacgaaggcgaacataagagatggaatgagcatctacccggttattatcgcacaggatccggggaaattgcatctaccacagtgatgaattgagagttttcctgacgcgtattcttaagcaaagagaagattttttatcagcaagatcagagaaataagagatggcggacggcagcagaaaacaaaaaaccccgccgaagcggggttcaaaattggtcggcgagagaggattcgaacctccgacccactggtcccaaaccagttgcgctaccaagctgcgctactcgccgaaatactgctttttgaatttttagttcaattcgttaaagtcgtggtgcgaggggggggacttgaacccccacgtccgtaagaacactaacacctgaagctagcgcgtctaccaattccgccaccttcgcaaattcacaactctatcaaataatggggtggctaatgggattcgaacccacgacaactggaatcacaatccagggctctaccaactgagctatagccaccactgcaaaccttttacgcggtattaaaaccaccgcagctccagcaccgggttaatggtgcgcccgacaggattcgaacctgagacctctgcctccggagggcagcgctctatccagctgagctacgggcgcttagcgccgttgcggggtcggataatacggacttcctaccccgctgtctagtgcctttttaaagaaaattatcgtttgctcatgctttgttcgttttgacggttattcagccgtattattgacttgcccctgtcttccgaggccaaacaccttataaatcagggtgacggcggccagaaaaataatgccgacgaagagcgacatccgggtttcatcattcagtcccatcccgaccagcacgcagatcaggaaggccatcgtgaaatagttggcccacggaaacagcagcgaacggaacggatggctggcaatcgccgcctgatgcacgcgacggaaacgcagctgactaatcaggatcacaaaccagggcaccatccccggcaggacgctggcgctatagacatagacgaacacccgctgcggattaggaataatgtaattcaggcaggagcccaccagcaggatcagaatcgacagcgccacaccgacggacggaacgccgttgcgcgataccttaccgatcgccgccggcagctgacggttcttcgccagggcgtacagcatacgtccgcagctgtacattccgctgttgcagccggaaagcgctgccgtcagcaccacgaagttgataattcccgccgccgcggtaataccgattttggcaaacgtcagtacgaacgggctgccattggagccgatttgatcccacgggaagatagtgacgataacgaaaatcgcgccgacgtagaaaatcaggatccgccacaacactttgcccaccgcgctgcgcagcgtcacctgcgggtttttcgcttcacctgcggtaatgccgatgagctccaccccctgataggacgcgaccacgatacacagcgccgtcaggaagcccttccagccgccagcaaagaaaccaccatgttcggtgagattaccaaaaccgatggagtggccgccgttgccaaagccgaagaaaatgacgcccagacccacgacgatcatcacgataatggtggtcacttttatcatggcgaaccagaactcgatttcaccatatagccggaccgccgcaaggttcgccagcgccaccagtcccacggcaattaacgccgggatccactgcgccatctccgggaaccagaactgcacatagaccccgatggcggtaatctccgagatccccaccgccatccacataaaccagtaggaccacgcggtcagatagccgaagaaggggctcatatagcgatgcgcatacaccgcgaaggagccagtgacaggctcaaggaacagcatttcgcccattgagcgcataatgaaaaagacgaacaggccagcgataatatacgccagcagcacggaaggcccagcccatttcaaggtactggccgcccccataaacaaccccacgccaatcgtcccgccaagggcgatcagttcaatatgccgggcctccagtccacgctggagctccgcttttttctcagtcatatatcctcttgtgtttgccgtattccgggtactcccggttattgttattaactgaaaccatagccttgccgacgcgcaggtctccccggcgcgtatgaagcctgcgaatggttaattaattttgcggaaatggcaaataaagtatcaggcgagtgaagagattacacagaatatgtatgcaaactcgcctggttgcagtggaatatcagagcttaccggaataatgccaacgtaaatagcgcagcagacggaactgtcttttgatacggctcggctgcaaaagcaggcgatagaaccactccagccccagatcctgccagaacttcggcgcccgatggacgtgcccggtaaaaacatcgtaagtgccgccgacgcccatatacagcgcgtgcggatacaggcgccggcagtcgcgcataaagatctcctggcgcggcgaccccatcgcgacggtgacgattttcgccccgctgtcgcgaatgcgttcgaacaatgcctggcgttgctcaggggtgaaataaccgtcctggctgccgacgatgttcacctgccagcgctgacgcagcctggattctgtctgcgccaggacctcaggtttaccaccaaccaaaaacaccggtgtcccttcagcgccggcgcgctgcattaacgcttcccagagatcggccccggcgacgcgggatacctgggcctgcgggtattttttgcgcagcgaacgcaccacgctgatgccatcggcatatttaaactccgccgcctcaatcagcgcccgtacctccgggttatcctctacggccagcattttctcagcattaatggctaccagcgtcccctcccggagcgcgccgtcggcaaacaaataatccagagcgtgcggcatatcgcgccagcctatgagctgcagccctcttaacaggtacaacggcgcggaaatggtcccagtcatgtccatccttctcagacttgcggttgcgaaagcggttttacgcgcttatgaatcagtcccacgctatccaggaaccagtacagcagtttcgccgccagcaagcagataccaaagatcacgaggaaaaacaccacgcgggagccgaacgaatccagcccctcgcgcgccagcactatcatgttgaagatagcgccgaaacagaaactgtgcaggatagccgctttatagcgattgctctcccggttgcccagctcatacagccagtcgaaccatttaataatcaaccctaccgccacggcgcccagcggtacgaaccagacgccgcccatcaccaccagcgagccaatcagcgtcggcgagatcgccagccccgaatggttgtttaatacttcccaggtaaagtagttggcggtattgagcaccatcgtcgggcgaccgtgccacagccagctggggataaagacgtagaagtcgcggatcatcggcgccagaccctggaaatcgatcttttcgtagttctgcagcagcagcgccaggttctcccacggtgagaaggtgtcgcgcgtgagatacagaaaggtataaaacgcttcgtcgccgctgacgttcatcccgtagcgcttcagcgccagccagaacatgccgacaatacccagcacacccgccgccgccagcatccacaggctgatccagccgcgaataataccgatgaacagaaagatggcgaaggcgatgataatattggcgcgcgtcccgccgacgatggcgtaggtcagcaaaccaaaggccaccgtgctgacgaggaagaagatccacgccttataatcctggcgcagaaaatagaccaccagcatcgccggaataaagaagtaaaagaagcgcttcaacgccacgccggacacttcagcagagaaaatctggctgtaggagttgagcttaaacagcaggaaaccgttgtgggcgaagaagatgccgacgcacagcagcgccagccccatcaaaatgccccacgccagatgggtttccacccggttcatggtaaacagcgggcgatgcgcaacctcacgcgatgccgaacgcagccgcgttttataggtcacgtagtagactgcgtagaagcacaccgcgatcagcagcgtctgcagcaaaatctccggcggcgccacgctgacgtcaaagcggaacaccagaatactggtcagcgggaagccgaagaaaaaggtcagcagaaacagcaacgagaaaaaaacgttgaagttaaagcgtacccgacggaactcaaaccaggtggcggtggcgatgaacagcgtcgacagcagccagaccaccagcagcccgctaaattgcattaacgtcatgcctgcccctccgccgctaaccgtagcgcccgccgccagcccgtcagatagttcggccggaagaaggcgatagcggatttatccacgctcgccagctgacgctgcgcttcgcgcaccacgctgacgtccagcgcgtcgctggtgaacagcaccggcacatgctgctcggccatatcctgccagaacgggttttcccgattgagcacgcaggggatgcccgcctgaatcagcagacacagggtgccgatcccctgctggcgggcaaacagaaaatagcccagatcacagcggcgcagcagcgccagataatcatgaaactccagcttctcgctgaggatctgcagatgctcaccgctaaacagcgccgcccccgcctcgcgaacctcattgatataggcgtcgttattcgctggatagcccatcggcacgatgacgtttaccgtatcgccaaactgctgatggattgccttcagcgcggcaatatgttcattgctgcgatccccggagttgcccaccagaatagtcagggtatcaccgcgcggagcgttatcggccagggtattcagcgccggatccatacgggtcgggaagtagagcagctcgcccgggacgcgcggatggcggttagcgaaccagctgagatcgccgcgggtggcgaaaacgcgccctacccgcccctgcgccatacggcgcagcggatagaacaggcgaaacttcaggctggcagaattttcatacagatccgccccccagatatgccagttaaactgcgacgggcggatgccgccgctcaacagcgccagccacagcccggtattgaactggccgtggaagaaaaagcgctgctggcggttggctttcgcggtagcaatcactgcctgcgccagcgcctttttccccggataacaggtgacatccagcgccggatacccatcacgcacgctggcctcatcaccgacgatcataaatctcctggcctgcgggtcggcggccagttcgtcgttaaagaaccgcagtacggtctggttatgatgcgggatatccgatcccagtacatgtatcagtgctgtcatgcccgtttacgccagagtaaaaacacgccactacaaagggcgaaataaacaatataagtggccatatatgcctgcgccgcgccaaccgcgccgtgcgccggtataagccagtgtgagaatgcggtcagcagtgcgaactggctgatttccgtcagaatataaaaacgcagcgacgctttggcgatcaccagatagccatagacgtaagcacctacttttaaaacgtcgcccaccagctgccaggcaaacaggtcacgcatcgcggtaaagcgatcggaaaacagcagccagatggcaaaatcgcgcagcagccagaccgtcaggctcgccgccgctactgccggcaggacgaatttcagcgacttgactatctcgcgggtgatatccattttggcgctcagccgcgacagcgtcggcagcagatagacgctaaacgaggcggtaataaactgcaggtaggcatcggagatgctgctcaccccctgccagatcccgaccgcctcccagccgtaatgcgccgccagcagattacgcatcatcacataggctaccggcagggtcaccgaggttatcagcgccatcagggtaaatttcgatagctgtcccgccagaccgttatcccagcgcggacgcagggcgctcagcgggatattaccccgccgccagagcataatacccgccgggaccaccaccagcgctggaactaacgccagccccagcagcgcgccctgatagcctcccaacacgtagcaagcatagtaagccgccacgccgatcaggctcccggcaatcagcgagaaggcgttacccgccgcatcgcgaaagcctttcatcagcgccagcaggaaattcgcccaggcgatccccatctgcaccagcgccaccaggcgtaccagcccctgatagtgcgtatggccgaacagcccctggcttatcggcgccgccgccagtaaaaataccagcgccagcagggtggaaaagccaagcaccatcgccgacgaggtgcccaccacctgcttcaggcgcgggggatcgtcgtgatgctgcgccaccagcttcgtgacgccattaaatatcccggccccggccagcacgccgagtacggtgaccagttgccggaagttaccggcctggccaacgcccgccggcccaaacgagacggccagcagcttgacgaccagcagaccggcgccgattttgaccagcgtcgatgccgccgtccacagtgaggcttttgctaacgacatatcaggagaagtagctcagcagcgagttaatcaccgtccgctggttcaccacagacagattgtaaaacagcggcaggcgtaccagacgctcgctctcctgagtggtgtagcggtcttcaccgcggaattcgccgaactgttcgcctgccgggcagctgtgcaggggaatgtaatggaataccgcgaggatctccgcctctttcagccaggcgatcagtctgctgcgatcctcgatatcacgcagcttaatgtagaacatgtgcgcgttttgcccgcagtcggccggaaccgtcggcagttcgatacgcccggcgcgcgccagcggcagcagcgcatcatagtagttctgccacagggccaggcgctgctggttgatgcgctccgccgcttccagctgcgcccacagataggcggcctgcaggtcggacatcagatagctggagccaatgtcccgccaggtatatttatccaccaggccgcgaaagaactggctgcggttggtgcctttttcgcgaataatctccgcgcgttccaccagcgtgcgatcgttgatcagcgtcgccccgccctcaccgccggcggtgtagtttttggtttcatggaagctgaagcagccgatatggccgatggtgcccagcgcgcgccccttgtaggtggacatcaccccctgcgcggcgtcttccaccacaaacaggttgtatttgtcggcgatggccatgatggtgtccatctcgcaggctacgccggcataatgcaccgggacaatcgcccgggttttatcggtgatggcggcttcgatgagcgtttcgtcgatattcatcgtatcgcgacggatatcaacgaagacgattttcgccccgcgcagcacaaaggcgttggcggtggagacaaaggtatagctgggcataatcacttcgtcgcccggctggatatccagcagcagcgcggccatctccagcgaagccgtgcaggaaggggtcagtagcgcttttgccgtgccaaatcgctgctccatccactgctggcagcggcgcgtaaagccgccgtcgccgcacagcttgccgctgttcatcgcagactgcatgtaatcaagctcggttccaaccaccggcggcgcgttaaatgggatcatgggggtcacctgtatagccagtaggcggtgctttccacgttagcaccgctgagaatataacgtttaagcgcggcggtgttgcccatctgggtcgccacccgcagtgtagaaagtccgcgcgaggcggcccagtaccgcgccgcctgcatcaactgcgccccggcgccgcgtccggccagcaggccgatacgcgcttcggtcgcagtgatctgccgcagggagacaaaggcgcgaatatcgccctcaggatggcgggaaatcaggcactgatgatcgaaggtgccgcgcaccgcattttcaatccactgggcatagaagcggccgctggcgtcggcagcgtaccagggcgcgcgaaagcggctcatggcaaatgcctgcgccgcctgctcgcgcagcggcgcaatatccgcttccacggcgacgtctgcgccggcatctgcagggctgcccaccggcagcgccagatcgacctcaccttccaccagctgaaaacccagccgctgcagcgcgtccagccggacggtgtcgctggcggcgatcttcgcctgccctcgcgaccaccccgccagcgcctcaggcgtcagccgcggcgcgtgctcgtcaaagcgcacgatcgcgctgttcacggcaaagaagcggttctcccactccagggggtcaatactggcgcggacgggcacggagcagatccagcagatattggccgtagccggttttttccagccgcttcgccgcacgtttgacgccgtcgtcgtccagccagccgttacgccagccgatctcttccagacaggcgattttaaagccctggcgcttctcgacggtctgcacgaacatgctggcctcgatcaggctatcgtgggtgccggtgtccagccaggcaaagccgcgtccaagcagttcgacggtcaatgcgccatcctccagatacatctggttgatggaggtgatttccagctcgccgcgctcggatggcttgacccgtttggcatactccgtcaccttgccatcgtagaaatagagaccggtgaccgcccagttcgacttcggctgcttcggcttctcttccagcgatagcgcacggaagttatcatcaaactccaccacgccaaagcgctcaggatccatcacctgatagccaaaaatcgtcgccccttccgtgcgggcagcgacgctgcgcagcttcgggctaaagctttggccgaagaagatattgtcgcctaacaccagacacgccggttcgccgttaagaaaggcttctccgatgataaacgcctgggctaaaccatccggcgtcggctgtacggcatagtgcagcgcaatgccaaactctgagccatcgccgagcaggcgctggaaatcacgtaggtcgtccggcgtggtgataatcaggatctcacggatcccggccagcattaataccgacagcgggtagtagatcatcggcttatcgtagatcggcaacagctgcttcgatacgccgcgggtgatgggatgtagccgcgttccggaaccgcccgccagaataatacctttcatcattccccccagagatgattagctttgcagcccaagacgctcgccctgatagcttccgtcctgaacccgacgccaccaggcctcgttcgccagataccacgccacggtcttacgcataccggaggtgaaagtctctgccggcgtccagcccagctcgcgggcaatcttcgaagcatcaatggcatagcgcagatcgtggcccggacgatcggcaacgaaggcgatcagatcgcgatagtgcgccacgccctgcggcttatccggcgccagctcttccagcagctgacaaatggtttccaccacctcgatatttttccgttcgttatgaccgccgatattgtaagtttcgcccggttcgccgcgggtcgccaccagatacagcgctctggcgtgatcttccacgtacagccagtcgcggatctgttgtccattgccatacaccggcagcggcttgcccgccagcgcgttaaggatcgtcagcgggatcagcttctcgggaaagtgatacgggccgtagttatttgagcagttggtgataagcgtcggcaggccataggttcgcagccaggcgcgcaccaggtggtcgctgctggctttcgaagccgaataggggctgcttggcgcatagggcgtggtctcggtaaagaaatcatcgctgccgtgcagatcgccatacacttcatcggtggagatgtgatggaagcgaaacgccgatttttgcgccatagccagggtattccaccagctacgggccgcctccagcagcgtataggtgcccacgatattggtctcgataaacgccgccgggccgtcaatcgaacgatcgacatggctttccgccgccaggtgcatcaccgtatccggttgatgctgacgaaaaatgcgatccagctcggcgcggtcgcagatatccacctgttcaaaggcgaaacgcgcatcctgcgccaccggcgccagcgacattaaattgccggcgtaggtcagtttatccaccaccaccacgcgatcggcggtgtgctggataatctcccgcactaccgccgaaccaatgaagcccgcgccgccggtgaccagaatggttctcaccgccacactcctttggtgtcgacgataaacgcctgggtgacgctatcgccgctaacggctttaaattggttatgatcgaccagcatcaccagcacatcggcgctggccagcgccgcctcaagggtcgccagcgtacacagtccatcgagtttcttcggcagcgcgtgaatgttgggctcaaccacctgggtcgtgccgctgtgccagcgggcaatctgcgcggcaatttccatcgccggactttcgcgcaggtcgtcaatattcggtttaaaagcgaggccaaaacaggcgatcgtcagttcgctggcccgcttgttggcggcattcaggcagtccgccacctgcgctttcacctgttcgataacccattccggcttgtggtcgttgacctcgcgagcggtgcggatcagacgcgcctgctgcgggttttgcgccacgataaaccatgggtcgacggcgatacagtggccgccaacacccgggcccggctgcaggatattgacgcgcggatggcggttcgccaggcggatcagctcccagacgttaatcccctggtcggcgcaaatcagcgacagttcgttggcaaaagcgatgttgacgtcgcggaagctgttttccgtcagcttgcacatctcggcggtgcgcgagttggtcaccacgcattcgccttcaaggaagattttatacagctcgctggcgcgagcggagcagaccggcgacatgccgccgataacgcggtcgtttttaatcagctcgaccatcacctgaccgggcaatacccgctccgggcagtaggcgatattcacgtctgccgcttcacccacctgctgggggaagctaagatccgggcgcatctccgccagccactcggccatctgttcggtcgacccgaccggtgaggtggactcgaggatcaccagcgaccctttctttaacgtcggcgcaatggatttggcggccgactcgacaaacaccatatccggctcgtggcgatctttaaacggcgtcggcacggcaatcaggtaagcatccgcctccaccggggtggtggcggcgcttaaatacccctgctcgaccgcggtcttcaccacgctcgccagatctggctccacgatatgaatctctccacggttaatggtctccacggcatgttgattaacatcaacgccgaccacccgcttctgccgggaggcgaacgcggcagcggttggcagcccgatatagccaaggccaatcactgaaatggtagaaaaactcatagcgttacctgattatttttaagtgcagacaaaatgcgacgacatgcttcgccatcgccatagggattatgcgcgcggctcatcgcctggtatgcagcatcatcctccagcagtcgcgtcacttccgcgacgatgcgctggctgtcggtgcccaccagacacacggtgccggcggccaccgcttccggacgttcggtcatatcgcgcatgaccagcaccggcttacccagcgagggggcctcttcctgaatgccgccggaatcggtcaggatcagccaggcgcgatccatcagccagacgaacggcaggtaatcctgcggttcaatcaacatcacattgtcaatatgaccaagaatacgattcaccggctcgctgacattaggattcaggtgaaccggatagacaatctgcacctcagggtgggtatgggctatctcggccagcgcctggcagatctgttcaaaaccgagcccaaagctttcccgccggtggccggtaaccagaatcatctttttaccgtggctgatgaaaggatagcgctgcagcagggtctcccgtagcgcttcatcacccagcacccgatcccgcacccagaacagggcgtcaatgaccgtattcccggtaaccgtgatccgactgtcggcaatattttcccgcagcaggttctgccgcgaggtttccgtgggggcgaaatggtatgtcgccagatggccggtcaacgtacggttgccttcttccggccacggcgaacttaaatcgccggtgcgcaggccggcctctacgtgacccaccggtatccgctggtaaaacgccgccaggctcgccgccatggtggtggtggtatcgccatgcaccagcaccacgtcgggtttaaacgactccagcaccggcttcagcccttcaaggatgcgacaggtgatctcggtcagcccctgccccggcttcatgatgttgagatcgtagtccgggacaatagagaaaagtttcaacacctgatcgagcatctcccgatgctgcgcggtcacgcatactttcgcctcaaaatgaggatcctttgccagcgcatggaccagaggcgccatcttgatggcttccggcctcgtgccaaatacagttagtactttcacatcgattctcttcgattaggcgatgaaggtcatctgcccttcaccacaggccgcaatcacaggacacgacgacgcgataacgccacgcctgcgccgatgagcgcacccacaatcccccacatcaccatcagaaatacacggcgcgggctatcgcgttttacaggttcttccggcgtccgcaaataccggtaagtctgaaaacgcggatctaacgttggaccgacgttcaacgtgctcagcatggcgcggttctggtcgtaatcgaggtcatattccggcccgacggcctgcaggttttccagcctggcctgcagcatcggcctgcccaataaaaatagctctgaatccggcaactgatcggcaggaacatccgtttcgctacgtgaaatattgtgctgctgagccaccttcagcgcctgctccacgctgtgcgtccggcggttgaagatggcctcggccacctcttcctggcgcttcacctgcgccttcatctgcaccgtccgcgccgcccaggcgcctttaagttcgtcgttaagatggcctgccgcccgctggctggcgaaggccacatactgacgcaacagattattggcatcctgcccggtctcggcggtcagtttgacgctgtcgttaatgctcttggccgcatcgcctggcataaactggatattgttaatcaggtcatccagcatcgccgcatcagcgcgggcattacccgactgacgctgcttgtagtagtccgtttgcagccagaaatcgcgccgggtatcccaggaggccagctgcatgatgaactctttatacgcttcatccatggcggaaggctggtcgaccgaggcgaggtcggctttaatgtccagattgcgtaagaactgctgttgggaatagtatccccccaacatattgacagtaggccgatcggtgatcgccgtggcgctccactcctggcgagcaaagaaggtgtacaccagcacgatggcggcgaagagtacggcgccgccgactatccagccttttcctgcccataaagcgcgaaacagcccgcgaatatccagctcgttctcaacgttcactgcttgtgctcccggtaatggttgagtcatcacatccccagctctacttggttagtttcggattattgccgctgtgtcgccgaattctgcgtctgatgcgcttaaccaggcgcgccactttccaggcgcgcttaatacagtagccataaagaaagaaggctaccaaaaagagaattaacatcacccattccggcacaatgcgggtgtattccgccacgacgccaaccagcgccagcagggcggcggccagggtaatcaggacaaacgcctggcgggaagtaaacccggcgcgcatgatcaaatgatgaatatgctgacggtccggtgagaaaggactcatgcctttgcgcaggcggcgatacataatcgccaccatgtccatcagcgggatagcgataatccacagcgcggtcaccgggctaatgggatgcgttttaccttgcgtggtttccagcaggatccagatgatggtgaagccaatcatcgtgctgccggcgtcacccataaagactttatagcggcggccgagggcgccaagattgagaagaatatagggtagaatggcggcgatcatcgcgaaacaccacatcgccaggctgtactgaccatcaaaccaaaggataatcccggtcgccgcaaaagagaccgatgacagtccgccgagcaggccgtcgataccatcgaccatgttgaacgcattgatagcggcccagacggcaaacagcgtcaggaagaagccgaagggccccagcaccagttcccacgatccaaaaataaagcccaaactactcagatgcagattccctgccatcatcataatcacggcgatcgcggcctgaatgaccgcgcgaattttcacgctgatgtcgaagcgatcgtcaagcgcgccaaccagcaccaatacccccgcgcaggccagatacagcgaggcgtgaggaatataataatcggcgatggcgaaagtgaaacagatacctgcataaactgagataccaccgaccaacggaatcaacccctgatgccgtttgcgatagttgggtttatccactaacccgatcttttttgccactttccgcgcgacaaaaataaagagggtcgtgaataagaaaatactgattaattcagtaatagcagtgagtaaattcacaacgcatgtgctctcagcatagttaatccgggaagtatagcgatgatgccccaactccagaaggggaaaagcagaacattacaaatttattgtatagattttagtctgttaaagctgtctccgcctgctatccggcgccattatacgacaactttcgtcccgctttctctgtctctggatcatacaaaccccaaaatgaaaacgccacgcaaaggcgtggcgtttttggctttttttaccttacgagcgcttcatcatatcgaagaagtcatcattcgtcttggtcattgccagcttattgatgaggaattccatcgcatcaatctcacccatcggatggataattttgcgcaggatccacattttctgcagctcttcctgagtggtaagcagctcttctttacgggtaccggaacggttgtagtcgatagccgggaagacgcgtttttcagcaatcttacgagagaggtgcagttccatgttaccggtgcctttaaactcttcgtagataacttcgtccattttggaaccggtgtcgatcagcgccgtggcgatgatggtcaggctaccgccctcctcgacgttacgtgccgcaccaaagaaacgcttcggacggtgcagggcgttggcgtccacaccaccggtcaacactttaccggaagccggaaccacggtgttgtaggcacgcgccagacgggtaatagagtcgagcaggatgataacgtctttcttgtgttcaaccagacgtttcgctttctcaataaccatctcggcaacctgcacgtgacgggatgccggctcgtcaaaggtggaagcaaccacttcacctttcaccagacgctgcatctcggtcacttcttccggacgttcgtcgatcagcagtaccatcaggacacagtccgggtgattgtatgcgatgctctgcgcgatgttctgcagcagcatggttttaccggctttcggcggcgcgacgatcagaccacgctggccgcggccaatcggggaggccagatccagtacgcgagcggttaagtcttcggtagaaccgttaccacgctccatacgcaggcgagagttcgcgtgcagcggcgttaagttctcgaacaggatcttgttacgcgcgttttccggcttgtcgtagttaacttcgttaactttcagcagcgcaaagtaacgttcaccctctttcggaggacgaatcttaccggaaatggtgtcaccagtgcggaggttgaaacggcggatttggctgggggatacgtagatgtcgtcagggccggcgaggtaggagctgtctgcggagcggaggaatccaaatccatcctgcagtatctccagtacgccgtcgccaaagatatcttcgccactcttcgaatgctgcttgaggatggcaaaaataatatcctgcttacgcatacgagccaggttttccagccccatattttcgccgagagtaatcagctcagaaaccggcgtattctttaattcggtaagattcatagtggtgtgggttcttaaactcggggtaaatctcgaacttaatgttgtgaatggtatggcaggaacttccatgcctgttaacggccttcatctcgtgtctgtacgttgcctggtcacaggaaagaacgcagaactgaaacgactagacggaatgagtgaaaagcccggaattattagcttcacgcgcatttatgcgggatgcttcgggtaaaacaagattcaaacaaggtatgtttaaaacgaagtctgtggattaacttagcacgactccagccgggcgtccagagttccgcaaaaaataggaatctggacgccggaacagcaattcgcttacgccaggttagcgtcgaggaactctttcagctgacccttggacagtgcgccaactttagtggccgccacttcgccgtttttaaacagcagcagggttgggataccgcgaatgccgtatttcggcgcagtgcccgggttctggtcaatgttcagcttagctacggtcagtttgccctgatactcttcagcgatctcatccagaatcggggcgatcattttgcacggaccacaccactctgcccagaaatcgacgagggtcagcccgtcagccttgagtacgtccgtgtcaaaactgtcgtcagtcaggtgaataattttatcgctcatatttaactccacaggaataagcctggtgtgttggtgtcgtagccatcaacgacgcgctgcggctacgttatgcacgctattcttcaggatacctcaattctctggcctgccaactggcgcaatccatcatggactcgcctgttgacgccagggtgcctgaacgcgaactgcatgctgcagatttatcgctcccgactcgcttagtagtctaagctatcctggattcgttcagttaccgtagacgtaccttgaataatttcgtacaccgccaacgaaaggttgacgttatttcaccggatacgctttcttaatgcaatagttagctgatattctaccacactatgagcaaaacacatttaacagaacagaagttttccgacttcgccctgcacccggcagtcattgaagcccttgaaaagaaagggtttcataattgcacacccattcaggccctcgcccttccgctgacgctggaaggccgcgatgtcgccgggcaggcgcaaaccggtaccggtaaaacgatggcgttcctgacgtcaacgtttcattatcttctctctcacccggctatcgccgatcgccaggttaaccaaccgcgcgcgctgattatggcgccgacgcgtgaactggcggtacagatccacgccgacgctgagccactggcgcaggccaccggtctgaagctgggtctggcttacggcggcgacggctacgataagcagctgaaagtgctggaaagcggcgtcgatattctgatcggtaccactggtcgtctgatcgattacgcgaagcagaaccacattaacctcggcgccattcaggttgtcgtgctggacgaagccgatcgcatgtacgatctcggctttattaaagatatccgctggctgttccgccgcatgccgccggccactcagcgcctgaacatgctgttctccgcgaccctttcttatcgcgtccgcgaactggcgttcgaacaaatgaataacgccgagtacgttgaagtcgagccggaacagaaaacgggccaccgtattaaagaagagctcttctacccgtccaacgaagaaaaaatgcgcctgctgcagacgctgctggaagaagagtggcccgatcgcgccatcgtcttcgccaataccaagcatcgttgtgaagatatctgggggcatctcgccgccgacggccatcgcgtaggtctgctgaccggcgacgtggcgcagaaaaaacgtctgcgtattctcgaagaatttacccgcggcgacctcgatatcctggtcgcgaccgatgttgccgctcgtggtttgcacattccggccgtgacccacgtctttaactacgatctgccggacgactgcgaagattacgttcaccgcatcggccgtaccggtcgcgctggcgccagcggtcactccattagcctcgcctgcgaagagtatgcgctgaatctgccggcgatcgaaacctatattggtcactcaattccggtcagtaagtacaacccggacgcgctgatgaccgacctgcctaaaccgctgcgtctgacccgtgcgcgcccaggcaacggcccgcgccgtaacggtccaccgcgcaatcgtcgtcgttcaggttaagagatctatgccatacgctcagtcattcagaatctgccagggcgaccttcctctggcgacccgctcagtgatgtggatcgggcctaagcgccccgccgaccagggagccttctgaacgatgaagagtatgagctccacctcgctatatgccgccattgatttgggctccaatagtttccatatgttggtggtgcgcgaggtggcgggcagcatccagacgctgagccgcattaagcgtaaggttcgactggccgccggcctgaatagcgacaacaccctctccgcagaagcgatggaacggggctggcagtgcttacgcctgtttgccgagcgcctgcaggatattccgccgacgcaaatccgcgtcgtggccaccgccacgctgcgtcttgccgtcaatgcgggggagtttctggcgaaagcgcaggagatcctcggcactccagtgcaagtgatcagcggcgaagaagaagcgcgcctgatttaccagggtgtcgcccacaccaccggcggcgccgatcagcgcctggtggtcgatatcggcggcgccagcaccgagctggtgaccgggaccggcgcacaaacaacctcgctgtttagcctgtcgatgggctgtgtcacctggcttgaacgctattttgccgaccgtagtctgacgaaagagaatttcgatctcgccgaagcggctgcgcgcgaggtgctactgcccgtcgccgatgtgctgcgctatcacggatggaaagtgtgcgttggcgcctccggcaccgttcaggctctgcaggaaattatgatggcacaggggatggatgaacgaatcaccctcgccaaactccagcagcttaaacagcgcgctatccagtgcggacgtctggaagagctggagatcgaaggcttaacccttgagcgggcgctggtgtttcctagcgggctggcgatcctgatcgctatcttcagcgaactgaatattcagtgtatgaccctcgcgggcggcgcgttacgcgaaggcctggtgtacggcatgctgcatctctccgttgagcaggacatccgcagccgcacgctgcgtaatattcagcgtcgttttatgatcgacaccgaacaggcccagcgcgtcggcggccttgccagtcatctgctcagtcagttggatggcagctgggagctggatccgctaagccgtgatttactccttagcgcctgtgcgctgcatgagattgggctgagcgtggattttaagcgcgcgccgcagcacgccgcctatctggtcaataacctcgacctgccgggctttaccccggcgcagaagaagctgattgccacgctgctccttaaccagactaacgctatcgacctctcttcgcttcatcaacagaatgccgtcccaccgcgggtggctgagcatctgtgtcgtctgctgcgactggcaatcctgtttgccagccggcggcgcgacgatctgttgcccgccattcagctgaccgctcaagacgaacaactgacgctgatattgccgggaaactggctggatgaacatccgctgggtcgggagatggtcgatcaggagtgtcagtggcaaagctacgtccactggatacttcgggtcgccagcggcgatacgctgaaataatatccagccaggagggcggatgcgggaagaactggatttcaaatcgctacgctttttctctgcgctctaccgcttgggcaatgtttccccagcagcggacgcgctcgatatcagccagcccaccggcagccttttgctgaaaaaactacgagatcattttgctgacccgctgtttgtccgggtcgggcagcggatgatcccgacgccgcgagcggacgcgatcgcccccaccatctcgactcttctccagcttgccgataacgatttagcggtcaaacctgaatttcttccccagcagagccagcgtaattttacgatcggtatgaccgatatcagccaaatgacgctgctgcctttattgcaaattgcgctccagcagcaggcggcggacgggatcacctttacggtacagaatctggatgagcagaccctcaacgccctcgaatccgggaaatgcgatctcgcgatcggctatctgacgcagcttccggaaagcgtctaccagcaacatctcttcgatcaatcatatgtctgcctggctgcggaaaaccatcctcgcattcgtgcacagctccgcgccgaagactggcgccaggaaaagcatctggcgatccgcgtggaggggactgcccatggcgatatggataagctgcttgatgagcaccacatgccccggcgcattgcgctaacgttaccaagttttttaggtaccggtgagctggtggccgaaagcgatatgattgccgtcgtcccggaacaggtggcgcggcatatcacccggcgctatccctgccgcagctggccgctgccttttcccctcgccaaaatcgccatccgtcaggtctggcatcagcggctgcaccgcgatcccggacatatctggctacgctcgctgatcgctacgcttgccgatcccgcacagcagagtacttctattaaaatctaagtaacaaattacgcccgtgtattggttttattaataacccctattacgtttggtttattgctggtaatacgtgaaagcttttattctcctcgcatcaagccacactgacacatatcgcaaggaaaatatcatgcgcggaaaaattgctttagaagaacacgtatccactcctgaaaataaccgtctgtgggattcatctggtgaagcaggtcgtaacggcacagaatatatgaaagatgttgaacgccgcctgctggatcgcagcattcagctggaagaaatggcgcagcgtcatattgatcatgtaattctttctctgacttcacctggcgcccagtctattttagataaagccaaagccgtctcttttgcccgcgataccaacgattttatcgttgagaattatgttaagccaaatccggacaaattcagcgccttcgccaccctggcattgcagaacccggaagccgcggcggaagagctggagcgcgccgtgaaaaagttaggcatgaaaggtgcgctgatcaacggctacaccaacgttaaagatagcgagcatggcctgtatcttgatgacgaatccatgctggtattctgggataaggtcaacgagctgaacgtgcctgtctatctgcatcctcgtgaaccgctggaaggcccggcgcgcggcatctataccggttacgaaagcctgatcggctccgcctggggcttcgctcaggaaacggcagtgcatgctattcgtctgatgatgagcggtctgttcgatcgttatcctaacctcaatctggtgctgggtcacctcggcgaagggctggtacatatgctgccgcgcactcaacatcgtctctatcgtcagcgtttcggctgcggtctgggtaaagcggaaaaaccgttaatgcactacctgcagaataacttcatcgttaccaccagcggccatttcaatacccattcactgaataatgctattgaagtcatgggcgccgatcgcgtgatgttctctgtcgattatccgtatgaagatattcatcaggcctgcgactggtttgatcctttagaacttgaagcaggcctgaaagagaaaatcgcctggggtaatgccagccgcgtatttaacattaaataattaatttaaatatttcagggcctgtatattcaggccctgatttttattagggaaaataaattatggctataggtatatttgtctgtagcggctcgcttctcgttggtgcgctggcgggcgcttcactgaatcgttttattccggaacatttcaaaaaaaccttaccgttgatcgccggactgatctcaatcagtatgggcatattctttgtcaataaattgcataacctgccgccgattgccctggctattattgtcggcacgattatcggcggcctgttgaatattgaaaaatggattgaacgagccggaacaacgctgcgcagccccattgaacgtatttttccggcgcagtccagcgccagcgtcggtgcggaagattttatgaatcagtttatcgccgtgctgatcctgttctgcgccagcggtaccggcatcttcggcgccttaaccgaagggatgaccggcgacccgaccattctgctgaccaagtcgatcctcgacttttttactgccgcgattttcgcctccacgctggggtatatcatcaccgtgatctttattccccagctgattgttttcgttatcctgtttttcgcggcaacctttatcatggcgttaatcaatccgtcgatgatcgccgacttcaccgcctgcggcggcatcattatgctggcgaccggtttccgtctgtgcgggatccgtgccttccctaccgccaatatgctgccctcgctaatactggtgatgcccttctccgccgcctggcagcagtttatcgcctgagacgctaagcttttttcgcctttgccagcatcgcccgaatattagcgacgttggcctggcctttttgcatccgctcttcaggcgtaatggttttgcgtgcctgctcccagataaggtcgtcctgaggtagctccagcagaaaacgactcggttcaggacgcaccagttcgccatattgccggcgctccttacagagcgtaaaggtcagctctttctgcgcacgggtgatgccaacgtaggctaaccgtcgctcttcatcgacgttatcttcatcaatgctgctttggtgcggcagcaatccctcttccattcccaccagataaacgtaggggaactccagcccctttgacgcatggagagtcatcagctgcacctgatccagctcttcatccgattcgccgcgctccatcatgtcgcgcagggtaaagcgggtgaccacctgggtcagggtcatcggctcatcgatttcgctgccttccagcatctcggtcatccaggtaaacagctggttgacgtttttcatgcgcatttccgcggctttcgggctgggcgaggtttcatatagccaggattcgtagtcgatcccgcgaatcaaatcgcgcacggcgttgaccggctcgcgttcggccagctgctggatctcgcgtagccagtgggtgaagcgggtgagggattcatagccgcgcccggtcagcgtctggctgagacccatatcaaagctggcggtgaacaatcctttgttgcggcccatcgcccactcaccgagcttttgcagcgtcgccgggccgatctcgcgcttcggcgtgttgactatacgcaggaaggcgctgtcgtcgtccgggttggtcagcacgcgcagataggccagcagatctttaatttccggacgcgaaaagaacgacgtgccgccggagattttgtacgggatgcggttctgcatcagcatcttttcaaagacccgcgactggtgattgccgcgataaaggatcgcgtagtctttgtaattggttttattaatgaagtggtgggcgatcagctccccggccacgcgctccgcttcatgatcttcattgttggcggagagcactttcagctccgcgccatatcccagttcggagaacagccgcttttcaaagacgtgagggttattggcgatcaaaatgttggcggctttcagaatacgcccggatgagcggtagttctgctcaagcttgatcacctgcagcgccgggaagtcctggctgagcagcaccaggttctgcggccgcgcgccgcgccaggagtagatcgactggtcgtcatcgcccaccacggtaaagcgcgcccgctgacccaccagcagtttcaccagctcatactggctggtattggtatcctgatactcatctaccagcaggtagcggatcttattttgccagcgctcgcgcacctcctcgttgcgctgcagcagcagcgttggcagcaggattagatcgtcaaaatcgaggacattgcaggccttcatgtgcgcgtcgtatagcccatagcagtgggcgaaaatacgatcccgttcgcctttcgcgccagcggcggcctgcgccggggtttttagatcgtttttccagttggagatcgtcgagatcagctgctgaagcaccactttgtcatcttcgatcaacccttcggtcagttccttaagcagcgccacctggtcggtatcgtcgaataaggaaaagttagacttcatacccagcgcagcgtattcgcgcttaatgatatccagccccaaagtgtggaaggtggaaatcatcaggccacgcgcctctttgcgccccagcgtttgcccaacgcgctctttcatctcgcgcgcggctttgttggtaaaggtcacggccgcgatatggcgcgcctgatagccgcagccgcggatcaggtgggcgattttattcgtaataacgcgggtcttaccggaaccggcgcccgccagcaccaggcacggtccggtgacgaattcgacggcttgttgttggccagggtttaaacgcatgggagtcttgctcaatcttcgaacggggtggggattgtagcagaaagcggagccgagatttactgactgatggtaaagtgtcagccacgcaaaccatcctgagaatgatgtcatggcaaaaagcgcagcggccctgcatatcctggtcaaagaagagaaactggcgctggagatcctcgccaaactggagcggggcgtcagcttcgatcatctggcgaaacgctattctaaatgtccgtctggccgcaacggcggcgacttgggcgagtttcagcaaggcgcgatggtcggtccgtttgatcaagccgtcttcagctgtccgctgctcaaaccctatggcccggtgaaaaccaaattcggctaccacatcatcaaggtgctgtatcgccgctagcgcgtgatactatggcgccctgatttatcccaactcactcaaggcgcaatcatggctaaaaccgcggcagcactgcatatcctggtaaaagaagagaaactggcgctcgatctgctcgagcagctcaaaaacggcgccgatttcggcaagctggcaaagaaacactccatttgtccgtcaggcaaacgcggcggcgatctgggtgagttccgccagggccagatggtaccggccttcgataaagtggtcttctcctgccctgaactggagccaaccggcccgctgcatacccagttcggctaccacatcatcaaagtgctgtaccggaaataataaaaaaacccggggatcttaatctccgggtttttgcctgatggcgcttcgcttatcaggcctactaaacaaatccatgcctctatggatttcggcttgccggaaggcggcaaggaagtacatccccaggaacaaagattactatgtgactggggtgtacgtaccgtagccaacgcatcggcaagtcgaaagacgacgaggaattagccggctaccgcgatacgcttcatatcggtcatataaccgcgcagtttcttaccaacctgctcgatagcgtggctgcgaatcgcttcgttcacatcgcgcagctgcgcgttatctaccgcgccttcggcaatcgctgtgcccaggtcgccggtctgcagggtggtcatgaactctttcagcagcggtacgcaagcgtaagagaacaggtagttaccatattcagcggtatcggaaataaccacgttcatctcatacagacgcttacgggcgatggtgttggcgataagcggcagctcatgcagtgattcgtagtaagcagactcttcgatgatgccggaggccaccatggtttcgaaggccaattcaacgcccgctttcaccatcgcgatcatcagaacgcctttatcgaagtactcctgctcgccgattttgccttcatattgcggcgcggtttcgaaggcggttttgccggtctcttcacgccaggtaagcagtttcttatcatcattcgcccagtccgccatcatgccggaggagaattcgccggagatgatgtcgtccatgtgtttctggaacagcggcgccatgatctctttcagctgctcggacagcgcataagcgcgcagtttcgccgggttggagaggcgatccatcatcagggtgatgccgccctgcttcagcgcttcggtgatggtttcccagccgaactgaatcagtttttctgcatacgccggatcggtaccttccgccaccagcttgtcgaagcacagcagagaacccgcctgcagcatgccgcaaaggatagtttgctcgcccatcaggtcagatttcacttccgccacgaaggaagattccagcacgcccgcgcggtggccgcctgtcgccgccgcccatgctttggcaatcgccatgccttcgcctttcgggtcgttttccgggtgtaccgcgataagcgtcggtacgccgaaaccgcgtttgtactcttcacgcacttcggtgcccgggcacttcggcgccaccatcaccacggtgatgtctttacggatctgctcgcccacttccacgatgttgaagccgtgggagtaacccagcgctgcgccgtctttcatcagcggctgtacggagcgcacaacgtctgagtgctgtttgtccggcgtcaggttaaccaccaggtcggcctgcgggatcagctcttcataagtgccgactttgaagccgttttcagtcgctttacgccaggaggcgcgcttctcagcgatcgcttctttacgcagcgcataggagatatccagaccggagtcacgcatgttcagaccctggttcaggccctgcgcgccgcagccgacgatgaccacttttttaccctgaaggtagcttgcgccatcggcgaattcgtcgcgcgccataaagcggcatttgcccagctgtgccagctgctggcgcaggttcagtgtattaaagtagttagccatgtctgtaactccgtgatgttgtgtcgtgcttattgttcggttcgcttttgcgagaatgaacttactatatgacaggaattttattgcggaaattgatatattcacaacgtcacgttgcattttatgaaatacaaaaccggggagtacgcgccgtggatttacgcgatctgaaaacttttctgcatctggcggaaagccgccattttggccgcagcgcgcgggccatgcacgtcagcccgtcgacgctttcgcgccagatccaacgcctggaagaggacctcggccagccgctgttcgtgcgagataatcgcacggtgacccttaccgaagccggggaagagttacgtacctttgcccagcaaactttattgcagtaccagcagcttcgtcacgtcatcgatcagcagggcccttcgctctccggcgagctgcatatcttctgctctgtcaccgccgcctatagccatctgccgccgatcctcgaccgctttcgcgccgcgcacccctcggtggagatcaagctctcgaccggcgacgccgccgacgctatggagaaggtcgtcaccggcgaagccgacctggcgattgccggtaagccggagactctgccagggtcggtggcgttttcgatgctggagaacctcgccgtggtgttaattgccccggcccttccctgcccggtgcgcaaccaggtgaccgtcgagcgccccgactggtcgacagtgccctttatcatggccgaccaggggccggtacgtcggcgcatcgagctgtggtttcggcggcataaaatcagcaatccgtcgatctacgccaccgtcggcgggcacgaagcgatggtgtcgatggtcgccctgggatgcggcgtggcgctgctgccggaagtggtgctggagaacagtccggagccggtacgcaacagggtgatgatcctggagcgcagcgatgagcaaacgccgtttgagctgggtgtttgcgcacaaaaaaagcggctgcatgagccgcttattgatgctttctggaaaattcttcccaaccactaacccgcgaggaaaaagcggaatgccgggttatgcgtttcgtcgtggcactcatagcccagctcattgagacgagtttcaaagtccggctcgtgctcgcccaactcgaaggccgccagtacccgaccatagtcagtgccgtggctgcggtagtggaacagtgaaatattccagtgggtgccaagggtatgcaggaatttcagcagcgcccccggcgattccggaaactcgaagctgaacagccgctcctgcagcgcttttgacggccggccgccgaccatatagcgcacatgcagcttagccatctcatcatcagagagatccaccacgctgtagccgccgtcgttcagtaactggaggatctctttccgctcttccaggccacgactcaggcgtaccccgacaaaaatacaggcgtctttggcatcggcaaagcggtagttgaactccgtcaccgagcgtccccccagtagctggcaaaacttcaaaaagctacctttctcttccgggatcgtcaccgccagcagcgcttcgcgctgttccccgagctcgcagcgctcggacacgtagcgcaggccgtggaagttgacgttggccccggacagaatatgagccagacgctcgccgcggatgttatgctgggcgatatactttttcatccccgccagcgccagcgcgccggaaggctccgccaccgcccgcacatcttcgaacagatccttcatcgccgcgcagatagcatcgctatcgacggtgatgatatcgtccagatactcctggcataaacggaacgtttcatcgccgatgcgtttgaccgccacgccttcggcaaacaagccgacgcgcggcagatccaccggatggcctgcgtccagcgccgccttcaggcaagcagaatcttccgcctccaccgcgatcactttgatctgcggcatcagctgcttgatcagcaccgccacgcccgctgccagaccgccgccgcccaccgggacgaatacgcggtcaatatgggcatcctgctgcagcagctccagcgccagggttccctgtccggcgatgaccattgggtgatcgaacggcggcacccaggtaaaaccctgctgttgcgccagctcaatcgctctcgccttcgcttcgtcaaagttggcgccgtgcagcagcacttcgccgccaaagccgcgaacggcatcgactttgatatcggcggtcgctaccggcatcacgatcagcgccttaacgcccagccgcgatgcggaaaacgccacgccctgggcatggttgcccgccgaagcggtgatcaccccgtgggatttctgttcggcagtcaggctggacatcatcgcgtaagcgccgcgcagcttaaagctgtgtaccggctggcgatcttcacgcttcaccagaataacgttatccagccgcgacgagagcttatccattttttgcagcggcgttttctgcaccgcttcataaaccggcgcgcgcagcactgctcgcaggtactcggcgccctcaggggcgccggacaagggttgtgaatccgccatgattagccacccagcttggatttatcgcgtaccgcgcctttgtcggcgctggtcgccaggctggcgtaggcgcgaagggcaaaggagacctgacgctggcgattcttcggcgtccacgcctggtcgccacgcgcttcctgggcttcacgacgcgccgcaatttccgcatcgctcagctgcagctggatgctgcggttcggaatatcaatcgcgatcatgtcgccatcttcaatgagcgcaatgttgccgccgctcgccgcttccggagagacgtgaccgatagagagccctgaggtgccgccggagaaacggccatcggtgatcagcgcgcacgctttgcccagccccatcgacttcaggaagctggtggggtaaagcatctcctgcatccccggcccgcctttcggcccttcgtagcggatcaccacgacgtcgccttccacgactttaccgccgaggatggcctcaaccgcatcgtcctggctctcatatactttcgccggaccggtaaatttcaggatgctgtcgtccacgccggcggttttcacgatacaaccgttttctgcgaaattgccgtacagcaccgccaggccgccgtccttgctgtaagcgtgttccagagaacggatacagccttcggcgcgatcgtcatccagggtatcccagcggcagtcttgcgagaacgcctgggtggtacggatgcccgccgggccggcgcggaacatttttttcaccgcgtcgtcctgggtcaccatcacatcgtactgttccagggtctgcggcagcgtcaggccaaggacgtttttgacctcgcgattcagcagcccggcgcggtccagctcgcccagaatgcccagcacgccgccggcgcgatgcacatcttccatatggtatttctgcgtgctcggcgccaccttacacagctgcggcactttgcgggagagcttatcgatatcgctcatggtgaagtcgatttcagcttcctgcgccgccgccagcaggtgcagaacggtattggtggagccgcccatggcgatatccagcgtcatagcgttctcaaaggccgccttgctggcgatattgcgcggcagcgcggaagcgtcatcctgctcgtaatagcgtttggtcagctccacgatacgtttcccggcgtttaggaacagctccttacgatcggcgtgggtcgccagcagagagccgttgcccggctgcgacaggcccagcgcttcggtcaggcagttcatggagttcgccgtgaacatcccggaacaggagccgcaggtcgggcaggcggagcgttccacctgattactctgctcgtcggacactttcggatccgccccctgaatcatcgcatccaccaggtcaagcttgatgattttatctgacagcttggtcttcccggcttccatcgggccgccggacacaaagatcaccggaatgttcaggcgcagggaagccatcagcatccccggggtgattttgtcgcagttggagatacaaaccatggcatcagcgcagtgggcgttaaccatatactccaccgagtcggcgatcagctcgcgggatggcagtgaatagagcatacccccgtggcccatagcgatcccatcatccactgcgatggtgttgaattctttggccacgccaccggcggcttcaatctgctcggcaaccagtttgccgagatcgcgcaggtgcacgtgcccggggacaaactgggtaaaggagttaacgacggcgataatcggtttgccgaaatcggcatcggtcattccggttgcgcgccacaacgcgcgggcgcccgccatattgcggccatgtgtggtggtggcggaacggtacttaggcatgctctttttactcccatctgtgtttattaaatgggacggtgcgtgccgtcccatttttaattacttacttaccggatccaaccagccccatttatcttctgtttcaccggtgaagaggccaaagaaggcttcctgaatgcgtttggttaccggaccgcgacggcctgcgccgacctggatgccgtccacgctgcgcaccggggtgatttccgccgcagtgccggacatgaagacttcatccgccagatacagggattcacgggacaacacctgctcgcggacttcgataccaagatctttcgccagtttgatgatcgcgtcgcgggtaatgcccggcagcgcggaagaggtaaacggcggggtgaacagtacaccgtccttcacttcaaacaggttttcccctgcgccttcggagatatagccgttaacatcgagggcgataccttcctgataaccgtgacgacgcgcttcgctgccgaccagcagagaggagaggtagttgccgcccgctttcgccgcggttgggatggtgttcggcgccgcgcggttccaggaagagaccattgcatcgatcccctgctcaagcgcttctgcgccgaggtaggctccccatgggaacgccgcgatgatcacgtcagtgttgtaacccggaggcgggtttacccccatgccgacatcgccaacaaacaccagcggacggatataagcgctggtcagattattggttcgaatgacttcgcggcaggcttccatcagttcgtcgacgctctgggagaccgggaaacgataaattttggctgaatcatgcagacgctgcatatgttcgcgatgacggaacaccaccgggcctttgtgcgagtcgtagcaacggatcccctcgaataccgaggtaccgtagtgcagcgcatgggacatcacatgaactttcgcttcgccccacggaaccatctcgccattgaaccaaatgtaatcagcttttttcgtcgtcatttttcttcctttgcgctcaggcgcggatttgttgtgatgtgggttgctggatctcgacgcaggcaacgtcgaccagtttgcttaattgactaaacagtaattcgacgggccgcgggctggcaacggtcaattcgatatttatgttctgtgcgtccggcgcggtttccatgttcattgcgcagatgtggaaaccccggtggcggacaacgcgcagcacgcgctctaaggtttccggattgaaacgtgcctgtaaagcgacctgatgttgcatcatgataatttctccagcatttcagagttactggcgccgggcggcaccaacggccagacattctcaagttcgtcgattgagacatgaagcaggtatggcccctggctcgaaagcatggtgtcgagtgccgcttcaacctggtctttacgggtgatgtgttggccaggaataccgaaggcgctggccagcgtgaggaaatcagggttatcagtcagagtggtttcgctataacgttcctggaaaaacagctgctgccattgtcgaaccatccctaaccgctggttgtcgagtaacacgatcttcagcggtaactgcttgcgtttaacggtgcccagctcctgtacattcatcatgaaggagccgtcaccggagatacagatcaccgtatcgttagggcgcgccacctgggcgccaacggcggccggcaggccaaagcccatggtgcctaagccgctggaggtgataaagttttccgggcgggtataggtcatatgctgagccgaccacatctggtgctggccaacgtcggtggtcaccacgctgtccgccggcttgcggtcggaaagctgcttcagcagcagcggcgcgtagattgcctcaccgggatgatcgtaacgccaggcatgctcggcacgcagtgcggcactccgctcgcgccagccatcgatagctaacggctgctgcagcgccggcagcaggcagttcagatcgcctgtcagaccgatatgcgcctgacgcagcttgttcagctccgccggatcgatgtccatgtggatcactttggcatgcggtgcgaaggtattgagcttaccggtcacgcgatcgtcaaagcgcgcgccgacggcgatcagcagatcgcactcctgtactgccaggttggccgccttagtgccgtgcattcccagcatgccgagataatagggataatcagcatccaccacgcccagccctttcagggtgcaggttgccggcatcctggtcaccgccaggaattcgcgcaaagccggtaccgcctgcgccatgccgaccccgccgccaacatacagcatcggttgctgcgattgggccagcatctgcagagcctgcgccacttccgcctgcggaaatgccatctcatcggcgacggtagagaaatggggatcgaggtcgccctgcgccatctgaatatccttagggatatcaaccagcaccggacctggacggcctgagtttgccacctggaaagcctcagcaataacccgcggcagttcgtccagagactgcacaaggaaactgtgcttagtacaggccagtgacaaaccgagaacgtctacttcctggaacgcatccgtgccgatgaagggtgcggccacctggccggtgatagctacgatgggaatagagtcaagcagggcgtccgccaggccggtgatcagattggtcgcgcccgggccggacgtcgcgatacacaccccggttttaccggttgctcgcgcataaccaatggccgccatggctgccccttgctcatgccggcacagcaggtgctccacgccgccgtcatacagtgcatcgtaaaccggcataattgcgccacccggatagccaaaaactgtgtcgactccctgtgtccgcaaagcatgtaccacccactgcgcgccattcatagttagttccccgtcataaatcgggagaaacagaattttatgctaaaagtcatcatctgctcctcgcttaggttatttcagttataaaaaaacccccggacctttcggtgcgggggtcttagttcgttaaggcttgatttctaagcctttcctcgtccaagtgcagccccgcacggtgggataataatcaccaccacgctaatcacgaccaggctaatcactcgtagaagggctgtcattttctatactttctggcttcttgttcgaaggaatacctaaagagttaccacagacatcacataaagcacaagatttttttatatcttcgttgctaatcagcctaacggtttcaataaaaataattgttttatatgaaaaaaatcaaaaatgaaaaaaattcagttttctcacccctgccgcgctcttcggcgccctctttgccaacatagctctgttttgcgatcaaacgtccattttcggctaaatgtaacgatatgccgcgaaaagtatggatacgcagttctaaattcgcactttttccattctcgctttacgtcatgccaaccataattcttctctgtccaggaggttttatgtcgctcgctatcgtctatactcgcgcggcgctcggtatcgaagcgccattgattaccgttgaggttcatctcagcaacggtcttcctggtctaactatggtcgggctgccggaaaccaccgtgaaagaggcccgcgaccgggtccgcagcgccctgatcaacagcggctacgcttttcctgcgaagaagataaccattaacctggcgccagcggatctgcccaaagaaggcggacgatacgatttgcccatcgctctcgcgcttctcgttgcctcagagcagctcaacacgacgcgactgaatcaatatgagtttgtgggcgaactcgcccttacaggtgggttacgaggcgttccaggggcgatccccagcgcaatggaggccatcaaagccggccggcgcattgtcgtctcctctgacaatgcggcggaggtcggcctgatcggcggcagcgattgtctggtcgccgaccatctgcaggaggtttgcgcatttcttgcggggcagacatcgctttcgccgcctctcgccgaggcgcctgctcgggatgaacgttacgaagatctgctcgatgttatcggccagcagcagggcaaacgagcgctggagattgtggccgccggtggtcacaacctgctcctgataggcccgcccgggaccgggaaaaccatgctagccagccgactccccggtctcctgccgccattaagcaatcaggaagcgctggagagcgcggccatacagagtctggtcaacctccacaccgcaaagacgcggtggcgtcagaggccgttccgcgccccccaccatagcgcctcgctggcagcgatggtgggcggcggctcgataccggtccccggtgagatttccctggcccataatggcgtgctgtttcttgatgaactgccggagtttgagcggcgggtactggatgcgctacgcgaacccattgagtcaggcaagatccacatatcacgctcgcgcgccaaaattgactatccggcgcgctttcagcttattgcagcgatgaatccaagcccgacaggacattatcagggtaaacataatcgtgcatcgccggagcagacattgcgctaccttggacgcctatcaggccccttcctcgaccgcttcgatctttccttagagatcccattgccaccgccaggaatactgagtcagggctcgcagggcgaagaatcgagcgcaacggtccggcagcgggtgctggcggcgcgtgaacgacaaatgctcaggcaaaataaactcaatgcccatcttgagaatcgtgaaatgaagaactgctgtcgcttaaggcgggaggatgctgtctggctggaacagacgctaacgcagctggggctttctattcgcgcctggcagcgtctgttaaaggttgcgagaaccattgccgatctggcagaggttgaagagattgaacgctgtcatttgcaggaggcgctcagctatcgggcaattgatcggatgctcaaccatctgcagaaaatgatggcgtaaaaaaaagggcttacgcccttttttcttagtcatcgctttcggtgtaatcgtcagcgccttccatctgcggtttgccgccggacagagtatggaaacgcttcggccgcttgatacgcgccatatacttaatccatacgcgttctgcttccgtcaccggctcacgttcaccacggcacaccgagacaaattgtttttcatcttcggtaacaggttcgcgcttacccagttccagttcgttaaaggcataaccatgacgttccagcagttgcgcctctttgatggtgaaatcaccgtgacgggagaacccgcgtggataatttttattgtcgaaaaaacgattagtcgtcgtaaagctttccgccatcctacacgctcctgattctttggccgagctatttatggcgcggagtattagttacgcttgacagagcgtcaaacaaaacatttaaatcatcacgacaaataattttgtggagaacggtgtggatacggaattgctcaagactttcctggaagtgagtagaactcgtcactttgggcgagcagcagaggcgctttacctgacacagtcagcagtcagctttcgtattcgtcagctggaaaatcaacttggtgtgaatctgttcacccgtcatcgtaataacatccgcctgacgaccgccggcgaaaagctcctcccctatgccgaaacgctcatgaatacctggcaggctgcgcgcaaggaggtggcacactcttcgcgacataatgaattctccattggggccagcgcctccctgtgggaatgtatgcttaacagctggctcggtaccctctacagcgcaccttacaatctccagtttgaagcccgtatcgcgcagcggcagtcgttggttaaacagcttcacgaacgccagttggatctgctgatcaccaccgaatcgccgaagatggatgaattaagcagccagctgttgggtaattttactcttgccctgtattgcgcatcgcctgcaaaaaacagaaatgaattgaattacttgcgccttgaatgggggcctgattttcagcaaaacgaagtgggactgataggaagcgatgatgttccgctgctcactacctcttcagctgaactgatctatcagcaattatcgcgcctgaacggctgctgttggctacctgttcgctgggcgaaagagaagcatgggttacatacggtcatggacagcgctacgttatcccgtccactttatgcgatctggttacaaaatagcgataagcaggcgcagatccatgagatcctgaaaaaccctattctggaataaacgctactctccatggacggagatcagcaaggtattttcgtaggggatattgccaatggagattagagataaaaaaaaatcctttgcctgagcaaaggattcttataaatggcaggggcggagagactcgaactcccaacacccggttttggagaccggtgctctaccaattgaactacgcccctaaaattttcttaccactaagcctgctatttgagcaggcttaatgttaaataagtggcggaacggacgggactcgaacccgcgaccccctgcgtgacaggcaggtattctaaccgactgaactaccgctccaccgaatttcttcgctttattaccaccggttgtcaccccggcttactgcaatttgatgcctggcagttccctactctcacatggggagaccccacactaccatcggcgctacggcgtttcacttctgagttcggcatggggtcaggtgggaccaccgcgctagtgccgccaggcaaa

SEQ ID NO: 74 - DNA, 80328 bp, Unknown
  source: /note="Description of Unknown: MKP2_coc_1 Mutant Bacteria sequence"
ctggtcgcgggggctaggagatgcgtataagaggcagggggtacagggggcggcggcgactggccgccccctgtgcgctccaggcgccataagtgacatagcgcagaagacatatcgggagcgcaatctgcccggaaatagccctggatggtagccctgctaagcgcagcgcgggcagggacatttccggttgcgccgatatttcgccgggtggcggctggcgccttacccggcctacagggcttatccggcctgggacgactgaacccacaggcctgtagaaaaatttatccgctccgctattccagccgccagctcagcaccggccagccgtatccggcaccggccgcctgcagctgcggacagggattgaccagccgcacgcgatccgcatgcaggcacagcggcagatcgttaatggaatcggtatagaacgtcacctcgccgtcatactgcggatgcgcctcgcgccactgcgccagacgcgccaccttcccctgctgatagctggggatcccggtgatttcaccgctgtagccgccgtcgaccatcgccacgtcaatacccagcgcctgatcgatctccagcgcggcggccaccgcctgcaccagcaggctaaccgaggcggagataatcagcatctgctctccctcggcccgcagacgacgaatgagctcccacgcctgcggatagacccggggcaggatcgcctcgcgtacgcagcgggccaccagcgcgtcaacgtccgacttcggtattccggccagcggcgcctggatcagggccacataatcggcgatattcatctctccccggtcataatccgccattagccgcgcctcgcgggcaagataccccttctgcgtcgccagcccttcgcaaaccataaactggctccagaccgtactgctatcgccctgtatcagggtgttatcgagatcaaaaatcgtcagcgtgttgcccatggtacttcccttactggtcaaaataagctgccgggagcatgcgtaaaaaagatgacaggaaaatgaaccggacgccgcagcgcccggctcgccatcagccggcgcggaccttcgcggtgcggaacaccagcacgatcccgccgacgatcgccatcataccgatcatcgccgccgccggcagccggttgcccagcagcagataatccagcagcgccgtgatcgctggcaccagataaaaaaggctggtgacattgacgatatttcccgcgctcagcagacggtacagcagcagctgggcgaccaccgaaatcagcagcccgagaaacagcaccggaataatcaacccggcgttaacggtaaactggaagccgctgatcggggcaatcagcaggcacagccccagactaacggcatactgcagcggcaggacatccgccggcgcctgacggctgcgcttttgccacagcgcgccaaaggtcatcagcagcagcgccgccagcgcaaacaggatccccaccgtcgccatcggcgaggccgccaggctgcgccacaccaatagcaccagccccgccagggcaagcagcagtcctgacagccgccgcccctgcaggcggcgctccaccacgcaaagcgtaaggatgggctggatccccatgatggtggcgataagtcccggcgtcacgccgttggccatcgcctcgaagtaacagaccgaatagccgccaatcagcatcagaccggtgacagctgtctgcaggcgggtgcccggcgcgggcagccagcgccgacggacgatagccagcggcgtcagcgcgaccagggcaaccagaaaacgaaagaccagcagcgccatcggcgaggcgttatccagtccccagcgggtgaagatggccgcgctgccccacagcagcacaaaaagggccgttgtcgcctgcgaggcgagcagagaatagcgaacgtgcatagcatgctccagaacgtcaaacacaaggtatcaagcgtcataccggcaggtaagcgcctgctaaagacggcgttaagcgccgaaaactacccggtctggagggggaggcggtgggcagagcgtggcgaagcgatgatgaggcgcagacgtcatccaccccgcgtcgaaagcggcgccgggcaaagtctcgctagagatggcgtaatgcgtcatggaatgcctcgtgaaatgttcctgtcagcatcctggcacagaccgttgcggagtgacaactgccctttatggctgatccatcccgaggttgtttatttttaatcgtaaataaacgtaaaggcggcctcggcttattcagccgtggtttttaatcggctataaaacaaagcagtctgcttgctacttcgaaaataacgatatgaagccaaaactgacgcatgctctctttttaattccttttttgttgttggcaggatgctcctcctcaccgaaacaggcaaagaacacaaaatctcatgcggatatgaccattgatagcggatcggacgatctgatccctgtggtggcggccctgcatgatcagatgcacacctggcagggaaccccctatgaatggggcggtactgaacaaagcggcgtcgactgctcgggtttcgtctggcgcacgctgaaggatcgctttaacctgccaatggagcggatcaccacccgcgagctgctgcacatgggcgtgcgggtcaataagcgggatttacgtcccggcgatctggtgttcttccgcacccgggccgggatgcacgttggcttttacgataccgatcataatttccttcacgcctcgagcagccagggcgtgatgcgctcttcgctggacaacccttactgggaatcagcgttctatcaggcgcgtcgtctgccgaaggagtataacgcgcagatcaccatgaacagcgacaccctgcatttggcgaagaatcgccgctaaaaaaaagccgcagccagggctgcggcgggtggttctgcggttaatcagaactggtaggtcatacccagcgcgacgatgtcgtcatcgttgatgccgagtttgttatcgcttttcagctggttgattttgtaatccacgaaggcgttcatgtttttgttgaagtagtaggtcaggcccacgtcgatgtagttaaccagatcttcactccccaccccttcgatatccttccctttcgacagcacatagccgagggacggacgcagaccgaagtcgaactgatactgcgccaccgcttcaaagttctgcgctttgttggcaaagccgccgctgatcggggtcatcttgcgggtttcagagtacatggtcgccaggtagatattgttggcgtcatatttcaggccggtcgcccaggcttccgctttcgaaccctggccgcgggccagcaggttctgatcgttggtacggtcggagctggtgtaggccgcgctgacggcgaagtcgctgccgccgaaatcatagcttaacgaggtgccgacgccgtcgccgttctgtttcttcgcttcacggccttcgtttttaccctggtactgcagggtcagatccaggccatccaccagaccgaagaagtcggtgttgcggtaggtcgccaggccgctggcgcgcttggtcataaagttatcggtctgggcagaggaatcgccgccgaattccgggaacatatcggtccaggcttccacgtcgtacagggcgccaaggttacgaccgtaatcgaaggagccgtagttcttcagcttcacgccggcgaacgccagacgggttttctgactggagtcgctctcggttttgttaccggagaattcagattcccaacggccatagccggtcaggtcgtcgttaatctgcgtttcgcctttaataccgaaacgcacgtaggtctgatcgccatccttgctgtcatagtcgctgaaatagtgcatggctttgatcttgccgtacacatccagcttgttcgcgttcttattataaacttccgctgcctgcgtcgctgttgaagccacaaagcccatcatcattaatgccagagtactctttttcattattcagtcctggtgatttatttatacgcgctattcaattgcgggcgctcgcccatcaaaaactggaggttttttaacgccgggatattaaatatttatgacaagatggaactttttataaaaaagggtatttaaatgtatctgacatatttttgtcacattccctctccagaatgcccgatcccgcgcaataaaatggcgcgcccgccgccccgggtgttggcaagcgggccgactcctgctacaacatcagctcgatatcgatattccttttgaacggcagagaatcatgagtgaaagccagacgctggtggtaaaactgggcaccagtgttttaacaggcgggtcccgtcgcctgaaccgcgcccatatcgtcgagcttgtgcgccagtgcgcacagttgcacgccatgggacaccgtattgtcatcgtgacctccggggccattgccgccgggcgcgagcaccttggttacccggaactgcccgccaccatcgcctccaagcagctgctggcggcggtgggacaaagccgtctgatccagctgtgggaacagctgttttctatctatggcattcacgttggccagatgctgctgacccgcgccgacatggaagacagagaacggttcctcaacgcccgcgacactctgcgcgcgctgctggataacagcatcgtcccggtcattaacgaaaacgacgccgtcgctaccgcggaaatcaaagtgggcgataacgacaatctctccgcgctggccgcgatcctcgccggggcggataagctgctgctgttaaccgaccagccaggcctgttcaccgccgacccgcgcagcaacccgcaggcggagctgattaaagacgtctacggcatcgacgacgcgctgcgcgccatcgccggcgatagcgtctccggactcggcaccggcggcatgggcaccaagctgcaggccgcggacgtcgcctgccgggcggggattgataccatcatcgccgccgggaaccgtccggacgtcatcggccatgcgatggcaggcctgccggtaggtacctgcttccacgcccaggagtctccgctggagaaccgtaagcgctggatcttcggcgcgccgccggcgggggaaatcaccgtcgatgcgggcgcgacccaggcgatcctcgaaagaggcagctcgctattgccaaaaggcatcaaaatcgtcagcggcaacttctcccgcggcgaagtgatccgcatccgcaatagcgaaggacgcgacatcgctcacggcgtcagccgctacaacagcgatgcgctgcgccttatcgccggccagcactcgcagcaaatcgatgccattctgggctatgaatacggcccggtggccgtccaccgcgatgatatgatcatccgttaaggagctgaaaatgctggaacaaatgggcattgccgccaaagcggcctcctggcagctggcgttactctccagccgggaaaagaatcaggtactggaaaagatcgccgattatctggaagcgcagaccgacgatattctgcgcgccaacgcggaagatttagccgaagctcgcgccaatggcctgagtgaagcgatgctcgatcgcctcgcgctgaccccggcgcgtctgagcggcatcgccagcgatgtgcgccaggtgtgcaatctggccgatccggtcggccaggtgatcgacggcgggctgctggacagcggtctgcgtattgaacgtcgccgcgtcccgctgggggtgattggcgtgatttatgaagcgcgtcctaacgtgacggtcgacgtcgcctccctgtgtctgaaaaccggcaacgcggcgatcctgcgcggcgggaaagagacctggcgcaccaacgccgccacggtgaaggtgatccagcaggcgctgcaggagtgcggtctgccggccgccgcggtacaggctatcgagagcccggatcgcgcgctggtgggcgaaatgctgaagatggataaatacatcgatatgctgatccctcgcggcggcgcgggcctgcacaagctgtgccgtgagcagtcaacgatcccggtgatcaccggtgggattggcgtgtgccatatcttcgtggatgaaaccgccgagatcgcccccgcgctgaagatcatcgtcaacgccaagacccagcggccgagcacctgcaataccgtggaaacgctgctggtgcaccgcaacatcgccgataccttcctgccggcgttgagcaagcagatggccgagagcggcgtcaccctgcacgccgccccttccgccctccccgcgctgcaaaacggcccagcgaaggtcgagccggtgaaagcggagcagtatgacgacgagtatctgtcgctggatctgaacgtcaaagtggtggctgatatggatgaggctatcgcccatatccgcgaacatggcacccagcactccgacgccatcctgacccgcaccctgcgtaacgccaaccgctttatcaatgaagtggactcttccgcggtatatgtgaacgcctccacgcgcttcaccgacggcggccagttcggcctcggcgcggaagtggcggtcagcacccagaagctgcacgcccgcggcccgatggggctggaagcgttaaccacctataagtggattggtttcggcgacgataccattcgtgcgtaaatgagaacgggcgatgcaaaaataggcagttgattccactggctattgacgcatcgcccgctaagttctaaccttttgcctcgtgattcaccctcgtgaacacctcttgcagggccgatatagctcagttggtagagcagcgcattcgtaatgcgaaggtcgtaggttcgactcctattatcggcaccattctaacgtctccccaagtctactaaagttcactgaaaccccttatactctgcgctttacagccccttttagtatttctacgtctactaaagttccctgaaatctacattcgtttgggggtacttatgggggtatatgctgttcggtctagaggaggtacccccaaatgaaactaaacgcccggcaggtggacaccgccaaacctaaagataagccttacaagctggctgatggtggtggtttgtatctcctgattaaacctaatggcggcaaatactggcggctcaagtatcgtgtagccggcaaagagaagctgttagcgctgggtgtgtatcctgaagtcacattggccgatgctcgggcaaaacgtgaagaagccaaaaggggtatcgctgggggtatcgatcctatggaagcgaaacgggaagagaagatcgcccgtgaaacgcagttaaacaacaccttcaaagatattgcccttgagtggcacagcagcaaactaaaaaaatggtctgctgggtatgcttcagacatcctggaggctttcaacaaagatgtgttcccttacattggcaaaaaaccaatagccgatatcaaaccgcttgaactgttgaatgtgctgcggcgcattgaggggcgcggcgctacagaaaaggccaaaaaagttaggcagcgctgcggggaagttttccgttacgcaatagtcaccgggcgtgctgagtataaccccgctccggatctcaccagcgccatgcaagggcatgagtccaatcattatcctttcctcacaccgaaagaattgcctgatttcttcaaggcgttgtcaggatatacaggaagcgcgttagtagttttggctgctcgtctgctgattatcaccggcttgcgtaccggcgaactccgcggggcattttgggatgaaatcaatatcagtaaggcggtttgggaaataccagcctcacgcatgaaaatgcgtcgccctcatgtggtaccgttgtccaggcaagctcttacgcttattggccagctccaagagctaacaggcaattacccgcttatgttccctggccgtaacgatccgcgaaaaacaatgagtgaagccagcataaaccaagtctttaagcgtattggctatgacggaaaagtcaccgggcacggtttccggcacaccatgagtaccatcctgcacgaacagggctacaacaccgcgtggatagaaacgcagctggcacacgtcgacaaaaactctattcgaggaacgtacaaccacgctcagtacatagacggccggcgagaaatgcttcagtggtatgccgactatatggaagcgttggataacggtgaaaatgtagtgcatggaacattcgggaaaagcgcttaactgtatgtatagacagtgctaattgacagtagtagacttctgtagactatcgttagcaggaagcttttatgcgagaaaacatcctcaacatgccccatcatcttcgccgacaacgtgtggtcactgctgagcaggctgcaatggctatggctggcgtgtacagttgttcacgcttagatgagttgaaagctaaattccctcctgagatctacaacattgcttccagttacttgaggataattttgagtgctgtaaacgcagaagaactacatcccaagagaacatggtctagctcacctggcggagatatcactggagctgatttttattccaatgatatttggccttgggctgttaaagaaatatcagctacagatagttggtttggatgtgatccagatagctttagcgaaaagtaccagcctttacgaagcgggtggggcgagtttgctggtaaagatacagcgttaaaactgatcgctggaatggctattgcgcttgaaaaatcaggtggtaaatatgttcgcggtaaaaatttgaacaaatccgaagttgctaggagtgcttcaagaagcatattggaacatggcgatggcatcgatgtgacagataaggcattgactatgctaattaatgaagctctgaacacatacgcttccaaatagctcgtgaggatttccaaaaagtcgatctacaggttctaaaacttctgaccgtacttctatttcagtggaagagctgcttccaactgatttaccgtgacttccacaactacccgcatgtttttgctgaaatatacctcgtagaccacattagacttcgagaggtatatatgtcccattcccttatccgcttacctgaagttcagcgcagaaccggctatagcaaggcttggatctatcgactcatggctgagcaacgtttcccctcatccataaagattggttctcgagcaattgctttcattgaaagcgaaattgatgaatggattagtgagcgcattgaatcgtcacgcagccaaacgaactgagattccgtgagcagagataatttgcgagagtttgcacttcggatctcgcagaatacgtttgtcgcgacagctcactaaacaattcaaaaaggttaatgccatgaagaacaattatgcccgtctggggcagggcttcgctcaccctaaaaactccttgccttgttattcaactgaagggtatgctttaaaagcaccagcaaaatctggtgtcgggcgtgagaacccggataagcaaaaggcgataccagacgcctatagcgtctttttttgtgtcgtaaagccagtacatcttcattcagcggggaagatccgcatcgaatctatggtggcgctggcggggcagccgaaaggctggccggtatccttttgcaccggtattctcacccccgtcagtgtcaccaccctttatgagcgtgagaactcaagtggtgactccagtaagcaaaaggaggctgccacatggctactaccccaacccaaaaactgcccaaattcacctggcttttcctcggtacgccgaaaggccggacctgcactcccgttgttatccgtatcgttgccgacagtgagcaagaagcccgcgagttttattcccgctgggatcttatctttgccgccaaaattcgctctgaatgttcgctttatcagtacagtagcggcgcgtttgaactggatgttgcgaaattgggaggtagccatgcttaacctccagaccctgacagctaaagcccgcgagctgcgcggcaacgtggtaaaagccacgaccacgaaaggcacgcgcaccatgacgcccgtttacgaacgggaagagcagcgcaaactgcgcgaacgcatccagcagacccagccggactgggttttactctggtgggatattgcgaccgttaccggctggcgtaccagcgacgtgtgcaatttccgttactcctgcatcaactgggaaaccggtattgcaacgatcatcgtagcgaagcagaccaaagcagcggaagccagagcgacccggaaggggatcgagattgttcgccagcagcgcaaggacgctgcccggcttgctggcgatcacattgggtacatgcactgggatagcgtgagctgcgacgaactggccgccggcatgacgggagaagaacaggcgatcgtgtttgagctggtggcaaaggctgaagttaagcacgacaccaaacagctgccgccgggcatcatcaagcggctgcgcgaacgcatggagcgcaatcttatcggtgacgacctggtattttcccgcagccagattgaaagtaaccgttgccagtctctggaaggtagcgttagccgtcagacgatctggaagaaactgcacaacgtcatggtgtggtttacccgcgtagtaaacacgcgtctgcgcctgagcgcctattccagccgcaaaattgccgcctttaatctcatgtccgccggcggcgaacagggcttgctggtcgcctctgaaatgctcggacacagtaacccggcaatcacccggacttatctccagctggggagcaaggccgcggctatccagacacgcctcgctatggaggtgaatgcatgacaaagccaactcaaaacgaatccattgccatgctgacgaccagcgcaggccaggcgcttgaatacagccgtcaggcgcttgccgttctcgatatgtggataaacaccctggcgccggatgatgaaatggaaagctttcgtgtcgcggcggttcacagcctggtcagtcaggcatcggaatatctggtgaaagtcagggaggtcagaccatgaccgctatttataatctggtgcgctgtagcgatggcaaaactgtattcagttttccggccggcggccgctatctggtggacacgtcgaacgggttgcagtcgatgcgcccccttatggacgacgagatccttttcacggtggagagtgccgcgcgctttctgaagaagattggttatcaggtaatcccgccagcggcgtgaggtaaaaaatatgacgattaaaatttccggcttagctgctggtggccgcgctcaccctgaaatcaggccgggcgataaatggaaggacagccggggcagcatcgtaattatcgaaagttaccgattcgacagagtgacatattgccgcgaggggtacagctcaccgtgtttttgcacgccagaaagactggtgcgggaatttgaatttgtttcttccgcgccggtcgccggcgaaaaagatatcgatcggattatgcgggtacagggcatcgagcgaattcgtgtcatgcgggaaatcatcagggagcgagggaacagaaaatgaagaatgcaccaaaccttaaaaagcagccggcggatctcatggaggagtcaatcatctttgccggcgccgatgcctggacgttcgccaaagcatggcaggaaatgaacccgattggcgacacggtgccgccggttgtgctggataaaaagcagctggcggagctggagaatatccgcattgttgatgatggccggctctatgcccgggtttgccgcggcgggcatctgaccgaacggcagataaccattctcgcgacaaagctggcggtggccggcgtggagcgcgcgcaattctactctgaaggttatcagcttctggaggactggacgccgcagctgccgcgcctcaaagccgatgcggaagccggcaaaagtatggtgatcggcaaaccgctgacggatgtaaacctccgcgacctggctgataacgaaaaggcgctcatactggccgcgcgttacaccggcattgcaatcaacgaaaacagcgagggcgtgtacgtctaccgcgccggcatttgggagaaaacgtctatgctcgagctgagccgcgaaatggtggctatctacaacgagaacaaaaccaacttcagcaagcgcgcgatcaacaacgttatcgacgccctgaaaatcgttatcccggtgatgggggagccgcggcggagcctgatcccctttgcaaacggtgtctacgatatggaaaccggcattttctccgaacacagccaggacaactggctaaccaatcataacggcgtgacctacacgccagcggtaccgggcgaaaacctccgcgaccacgcgccgaacttccataaatggctaagttacgcatcagatagagacgcaattaagatgcagcgcatcgctgcagcgctctttatggtgctggcgaaccggtacgactggcagctgttcctcgagataaccggtgagggcggtagcgggaaaagtgtctttacccatatcgctacgatgctggccggtgcgcataacaccgccagcgggaacatggcggcgctcgacagcgcgcgcgggcgggcgcagttcgtcgggaaaagcatgataacgcttcctgatcagcccaaatattcaggagagggcaccgggataaaagcgataaccggcggggatgccgtggagatcgacccgaaacacgagcaccagtacaccgccgttttgcgggcggtggttgtggccacgaacaacacgccgatgattttcaccgaacgtgccggcggcgtttcccggcgacgcgtaattttccagtttaaccggcgcgtcagcgaggaggataaagatcccgacctggcagaaaagatatccgctgaaattccggtggtggttcgtcggctgctggcgaactttgcgaacccggaaaaagcgcgggcgctgctgctggagcaacggaacagcgaagaagcactggaggtgaagcagaaaacggatccgctttatgccttctgcgcgcatcttgagcggctggctgattgtgcgggaatgatggtaggaaaccgcaatccgcctcactatccgcgaatttatctctatcacgcttacctggcattcctggaagccaacggtttcgacaagccgctgacgctgaataaattcgcagaggggatggaaagcgcgatgagggagtttaatcacgagtaccgtaaggaacggagagcccgtggcatggtgaccaacgttgaactttcagagagtgcggaagactggttacctcagacgcatcctgtagccggtcataaagaatgaagttcagataaatatggagaaaggtatacatggtatacatcgagagaataatttatatataaatcagtgaaataaaccatgtataccttgttttcaggtatacacagggtgtacatggtgttcattctctcattaaccatctgatcgtttattaaacagaatgatgtataccgtgtagacctgaaatcccaaaatgtaggctggtgttcataggttaatattatgttttataagcaatttatagcctttatgaacaccatgtataccttgagggcaaattctttaaaacgcatccattcatttcacgttgtgcatcccctcgatttcattaccatcatttcattacttgcaatgattgttgtgattgttgtgattgttgcgttttttatcatgtgataaccaagggggaagcatgaaaaaggaacacgtgaaacccattcttctgagcgctgctcaggttgcggcattaaaagccatccaggagcaggaacgccagaaatccgggtttggtatcgcaccatcaatccatgatgtggcgagaaaaatatttgatgttgggctatccagaatggaggtaagccagtgagttacgaaattaaaattgggcaaagaagcattgctatcactgataacgtttctgaagtggttgcgcctaatgagcagatggcgattctttttaaagggatggcgaatatttttggtgatctgcgggccgtggcaatgttagctgaggcggaagccgatgccgtagaggttatccgcaatgatccggatttaaacgaagcagcaaaaaaccgccgggccagagatgcggcaaatagagacacactcacggctttcactagaagtacggcgatgatcagcgaacaagctgaaaatattctcaattatcttaagaccaaactggccccagttgctccgttggccgagggtgatgttgtcggatttatgcgagatagcgagctacggaatgtatttcgctcgctggatggagctgcgaaagaaaagctgatggtagcaatgtatgccgggaatcagactgatttatgtgacgccctgctacgaggtaacgccatttgctcaggcgtaacagattctcagctggagcgactgacttttgcccgtatagccacagataacggagccgttatcaaatctgtttctaacctggtaaaagccattaaccgcaacctgcagcaaatcatcgctgttcgcacatggtatgcaaatctggtatttggaagcaatgacgaccctcgcgatgtggctcctcgagtctccggtctggcgaatctgtccgagtacattgatggtatggaaaaaattaattcccgacagggtaaagcagatgatgaagatgggaaacaggccgcctgatggcggctttttcttaactggagaatgctaaataacagaagtgaggaacggtaaattatgttattgagcaaatcagcctatgccaggcacatgggagtaagccgacaaacagtttacggctggatagcacgtggtgagattgtgctatcaggcgataaagtggatgttgaagcaacacaggcgaagcaaaattctgctggtgctggtgctggtgctggtgatcatcacaatgcaatgacgtgggcgcaggccgccgcgtgggtatgggggcatgacggcgggaaagagttgccggctgatattaatgctggccagcgaatagaggcagcagccgctgagctgggttttgatgttcagcacgagcccgatgaacaattgctgattctcttccggttggatgaagaaacccacagcttctatggcaaagatcacatggctggtggtctgcgtttcctgcgttccgagctggcctatgtggccgcaatgcatcccgacacccaagatgactggagcgatacaggattaaaggcactctgtctgctggcaggtgagaaactgtaaaacccccggccaaacctaactcctctaacttgacacttttcgtgaaaaacagggaaaagtgtcaacccaacctaacggatcctaacgcctacgaacagcagctacagtagaagtgtaaagggcttgcgttgagatttgttgagccttggctgttagtatctgttagtcctgccggcaaagtgtaaaccgcgccgctttagaaaacttcaggtacacgaactcgcgaaggggaggtgttaagcacttccccaatgcaaccatcctcgagcctctttcagatcgctgttctggtttgcccgaacgctggcgttcagattgagttgtcaaaagttgtcacccaccggcagcgccagtggggatttttggcagaacgcgctctaagttacagttgcttcagtcagtaatttagatatatttagaataacttttaaccattctaaagcttgttctaagcgaccaagttgattgtctctgatgatgtagagcactagaagtgtctcttagtgctcgaatcgtttatcgtgcatcatagctatgaaactctcatcataatgtcttgttaataattaacagccttatgataacgtcactttaaaataacgggatttgattaaatggcaaagcaatttatgttgatggaaccaaaaaatgagaattttaatgaattaatcggtgggcctaacaaatatatagtgcctagattccagcgagactatgcatgggatgtaggacaatgggaggatttatggggagatataaattctcttgatgatgaaggttttcattatatgggctatattgtcctacaacaaaaagaacagtatcagcatgaaattatagatgggcaacaacgcttagttacgttatcgattatagttctggctgcaatgaaagcgatcaaaactttaattgataacggggaggatgttcagggcaatactgagcgactcgatggtataactcagaattttgtaggaagtaagaacttcgttacgcttaaagtaattaataaattagaactaaatagaaataataaaagttattttcaaagaatgtcatctcatttagaggctcaaaactctcgcggtataacatcaactaataaattgatacgcaagtgttttgactttttctgtaagaaagattacggcaaaacaggtgcggagattgctcagtttattgcagatttttcttcaagtatgatttttacaaagataattgtacaagacgatcttaatgcctataaagtttttgaaactttgaatgcgagaggggtccaattgtctactccggacctactaaaaaactatttgttttcaattgtgacgaaagatgatcaaatcggagaagaagagctcaacgatttggacgagcaatggtcagaaatgattgttcaacttggagagagcaatgtttctgattacattagatatcactataattcacagagaagaatggttactaagaacaaccttttttcctcaatgagaaaaatattaacgaaaccggaagaagcgtatcagtatttgaagtcattaattgactactcacctatctatgcatcattgatcaatcccaatgatgcatggtggggggatcaagatgtgaaatacagaaatgtattgcactatcttaatggtattagattatttaatatcaagcaaccactaacaatattcctcgctgcctttggtaatttttctccagaagagtttgttaagctcgtaaaatatatatatatattatctattcggtataatattatctgccatttatcacctagtgaacaagagaatatttataatcaaatcgcgaacaaagtttataatcgagagttcttaagagctagtcatgtgaaaaatagcgaagaatttaaacgtttgtatcctgatgataatgctttctttaatgcttttgaatttcatagaatgccaagtagacaaacagcgaaaaaaatacgttttttactttctgaaattgaaggctatttaggtaatccatgtgattatgaaaaaacgacattagagcatatttgcccttatcatccagagaaagattggaacgaatcttttggtgaaggaattaatgatgtaaaagatagacttggaaacatgatcttaatggataaagataatttaaaacgctcatcctttgaagagaagaaaaaagaatatacaaaatccggatataagttggccttaaaagtaacagaatatgcagagtggaatttagaatctgtcaatgattttcaaaagtggatgtcacaacaagcagttaacgtttggaaggttgattagtctctgtaaaaacatcaaccgtgctggcggactgtctattaggcagcccgcaacattttttactgtcagagttcagacgggatctgattgggggtacttttgggggtaccttagaaaacttaatgaatataactcactgaaaatcaattggatgtttagcgatgttatgttcctattatcgcaccatttcaacttcccccaacttccgtatttatccataactatcctgatttataacgattttactgctttttagtccatcgttgtccgtaactctccagtaaagtccgatacttaaggtatttaggattatgtatatgtccttgttcggtcctggattcctatacacctgctttttaatgagatgcagattcgctgcactaagtccgaagataaaccctatactcttggggatcggcaaggcttgtcattgtttatagaacctaatggaagcaaaagctggcggttccgctatcgctttgtcggtaagcctaaaatgatctcgcctggtgtgtatcctacgatcacacctgcagacgcccgttctcgtcgtgacgatgcccgaaaactgctcgcggaaggaaacaacccgagtaaagttcgaatagagcagaagatcgctttgcaaacggaatccgaaagtgcgttcgaaaagatagccacagagtggcatcagatgaagtccgccaaatggtcggcaggatatgcatcagatatcatggaagcgttacagaacgacattttcccgtatgtggggacaagacccatttgtgaaataaaagcgctagaactgcttaatgtgctgcgtaaaattgaaaaaacgcggggcgttagagaagatgcgcaaagtacgacagcgttgttcagaagtgtttcgttatgcaattgtaacgggtagagcggagtacaatcctgcggcagatctttccagcgctctcgaagtacaccaatccaatcatttccacttcctaaaagctgattagatacccgaatttctgcgtgccttagacagttacacaggcagtcggcttgtacaagctgctacgaaattactcatgattacgggtgtgagaaacattgaattacgtgcagcattgtggtcagaatttgatctagataacgctctttgggaaatcccagcagaaaggatgaaaatgcggagggcacaccttgtgccactatcgactcaagcgttaaatttactcaatgaactcaagattatgacgggtaagtatcgttatgtatttccgggacggaatgatccgaacaagcctatgagtgaggctagtatcaaccaagtcataaagcgaattggatatgctgggcgcgttccagggcacggattcaggcatacattgtcaacaattttacacgaaaaaggatatgagagggcagagattgaaatgcaattagcacatatcgataagaacaatattcgtgggatttataatcatgctcagtacttaaatcgtatgggggaaatgatggattggtactcatcatatatttttcaatgctagccgggctatcacccggctaaaatttaaaaaggtaaatcatctacctgaacattaacttgcacattatcggatattttaacttggccagacattctgtctgcaataccctttaattgttctactgtaaatctcggttcagaccatccctcagaaaaactcacgttctctgaccgaggtcttctatcttccggtagaaaattaattttaattctagatggtaatgcagcggcttcgccaacgaatatacattcctgctgagataagctaggcaaagacgcgactaaacctgaaaggccatccggtaaaaatgttgagacatgctgttgatccgtcgcattcgttaatcttaacacaacccatgagccgcattgggaaatgacagtgctttcaatatcagctggcctttgactgattaacattagtcccaaaccatattttctgccctcacgcgcaattcgccggattgcggattgtgcagctgcgtattgggcttcaccatggttaggaacatagcggtgagcctcttcgcagactagaagaaatggatctttatttctttcagatgctgtttgatgtattttatattgaaatagtagcctggcaagtgttgcagctaatgggccagcgacttcattgggtaggccagatatatcaatgattcgtatatctttatatttttcttcaataatgatttcgccaactagctggtctaatattttctcaagattacagtcattcttcggagaccagttttccatcatgaatttaattcttggatctcgtcttaatactgataatttatctaaaattgatttaaacttctcagcaaatgttgattctgtttctttttctattttccctgattttactctggctgcttgaatgtatcttatgtgattttcaaattcatttaaacaaaacggaattggtttatcagagtcaaatgaaagtatttcttcaatagaatgcccttctgtcggcctcggttcatctagagcttgaccatctgtcggtagaggccagttatagttatctggcgcatgagttgtaattccacacgtaaccatcctggcatgagatagcgctttgtatataatattgttttgggacgttgcttctttttcagttttgccaattattaatgttctaaactcatcacttgacattagccagtatgggagttttatgttttttttactttcatcattttcaagagcactgtaagcttgataagttatccctctatctttaaaggctaacccatattcatcatgcgggtctatcattacaattcgaggagataggattttgccctcaatgcttgagtgttctaatatgctatgaagaatagtggcgacagcaccagattttcctgatcctgtcgagcctaatactgcacaatgaagtccaaataatttgtcaatatttgccctacaaggtattgaatttgcacttgaatagtgagcgaatggcactaaagggttacacgagttgtctcttgcaccttctgcagcactgaagagctctgctgattcagaatgagttaggagataaacgccctgctgaggcaatggatatatttttacaccgcggttgaatgttaatttctgatttgatggcgaccagtaaccgtgcgagaacaactctacctccatgatacgttggtctgcttctggagggattggtagagagttaggttgtaattcatccgatctcattcttaaaagagttacaaaaccaaaaatgatatttcttccgaagtttatcttaacaatactacccagttgtcctattgcataaactttaccacaataacttctagtcaactcttctacattgctggacagttctactcttatttttgtaccggtcacttctactacgtgccctatttttaactcttctattggtttgaatttcatcatagaaccccttcttttagaactttagtcatcccagaaaaagtccaccaatcatcatattcatcctttctcttaatgggtgatttacttcctacataaagaccattttgggttgcaacataaactctttccccccaatcactgcatctccaaacatcaagcacttccggtatcttgttatcaacctcctcacaaaatgcaagcaggaccgttttattattaggattggatagcgatagattaatttcttgattgatatgctcatctccaaaactataaccacaaacaatcaatacatgataggataatgagttcagcgattttctgagtaaatcaaattgtgcagaaaagggatctttctgagttgcaatgtactttgtagattgagggtagattaatactctattgtttttaataggatatgtatcccggtctcttactctccacaaagacccatcatcattttgaaaccaatctattgaaccatgcattttaattatgtgagcctttgcatcgttcataggttcaatttgtccatattgatatgacctatacgcaacagcaccaccactaaacccatcccaatatggtattctatttaatgccaaagcatcttcaagtaatgtgtcataattcgttgtgaataaccgtattggttttcttcgttcatttataccagctcttaaactataaaaaatagtattaatgaagttaaaatgctcttttatatcgactatgaaattatctttatcaccaatgattttttcaggcttttctacatagccgtatcgtattgtatcagcaatatatttaagtattttattatgaattttttcaatgcaatctaatgtgaaattttctttgcatatttcaatttctttcttcaatgtgcgagaagcaattgcagagtagtcacctaagtgactaagtatatgttctatatggaggtttggtggaagttctgattttatttttgttataagatttacggcctcggcatcctcttggatcaactccataatcctcgaggtcagggggtacattaagggaatttttgcggaataacttatccctgcaccaagcaaccagttttgttcggggcagttcagtaattcctgaaattgctctaagtcattttctatctcactgtttttcatgggcaatccttttttgtcgctcattccgattttcagtttttgacgtcggttgacgtaagggattaaggggagattttcagatgtatcatactgatggacagataaaaagcgtcaaccaggggctttgtggggtggttaacattaatcgatgtgaatttaatatgctcggaataatcactgatattctcaagcttctcgactaaaagagcttagcgtgagcagccccggccgactgcccgcttcgcttaacagactggttttcatgcactgaacttgggtcagggtcacctgtttaacggacgacgtttccgggcgctgactgtagtggataattttagtcgggagtgtctggcgatccatgcaggaaagtcgctgaaaggtgaggatgtggtcggtgtgatggaaaggttgcgggtgctaggcaagcgcctgccggtacgtattcagacagataacggcagtctgcgggatgagtgcctgaacattcactggtttctctcgctggaagatgcgcaggacaaactcgacaactggcgcagggaatataatcatgagagaacgcattcatcattaaatgacatgactccggctgaattcatccgaagtctccagaaagacgaagatctctgatttagcactgcactgaattttggccagggtcaggtaattaaaatttatacttattaagaagatctttataacgttcgacttcttttgaataccatttgagactccatgaccagccatcctctctgggtttacaatccgtgcagttatcacaatttgattgtttgaaactattaccgaaatcatagctaccagtactatcatataattgacttaataaatttccggttccttgtgcatgtcggtgttttaagcagatcaaaagatgcataccacctagagaatgcattcttaatgattgggcaaatactccaccagggcgataatgaacaaataaatactcacaatttttcattatatttgtggggtcataattagcaaatccaattttaaggaattcatgatattctccttgtgggtcatcaggatccattcctagatttttggccatactcaagaagtattctttttgctcttcagttgtaagatcataaaaatctttttgactgtcaagacggataacatgattctctatttctgttagggcttcctcaaaatcaggaaaagttgaaagaatcatcttccgatggggttgggttgctttagggttttgttttagtaaggtggcagtaaggaagtataatttttcaattttttcaatatcttttgataatacgcaatatgtcattactaataatgacattctttcatgccaatcatctagaaaatcaattgtttccttcgaaccccgtgcttcatggattcctttgaatattaaaatagacgcatagatatcaacaaaaaaatctgcaagtatgtgatattgctggtttcttgtcatcctgttacataactcaatgatcttttgtagggatatgcagcagtctctatacattatttgagtttgatcattgaaaatataacgctctaaagatttttcttcaaagtgattgacggaatgatgggtcgcatgaagctgatccaactgagccttaaattttgctttccgtgatttaccaaaagcaattaatctgtgaatccggcttttttgctctctagctaataatattaaatgttggcaaatataaaatttttctctgtaaatttctcttttaatattagtataaggagcaatttggaatgcttgtaagtaatataaaactgctataaatctatcttttgcaggaactattggtgaatgacttatttcggtagagcgtttaaaaacagcatcatatttcctttcagataaaagattatccaactgctgatgatacgctttatataatgcttcacctatatcttcaattttcttatcgagagttgaagggctaatgattggatatctgacaacagaatctttaagtcccttaatgttcaagtaatcccaacaatctatggctgcgtctaatattttatttgctgatgctatgtcttttctgaccagtgtattttcaattgggatatgaacttgaactgtatcattctgattagattttgaagctttttttcttaatatcgcattgtttgttattgggagccaaaatattttctctgacgtaatctctaccacaactaaaataacaggcactttaaattcaaagtaatatctcaaacgctctgttttgagagtaaatgataataagctattgtcatgaataaaggttgagttctcttcacctttaatctgaactttgaaaacactctctttcccaagagctttgccactaccatctttgagttcaatttctccatcaataccaaaatcattttgatcctcttgacttcggaaaatccaatggcttggtaagttgtattcaaaaatacgcccggcttcaattccaatctctcctgcgttcatcaggcccctcaatcttgtttttttcttgtggtcttatagtaccatgctcatacaataaaacagtatctcacctatagccattgctcttacctccactaagataatgcggatggtagcaatatcaatccagtgttaggctcatgcttctgttgggcacgccactgctagacacaatcagctattgtgcggcgtgttcaaaaggagctctcggcaagtaataatctctcactacgaacacaaaaaatccattgggagtatcaacaaagatgaaacaggtaatttttattaataatcaataaaatagtgcataggtattgttcctattatcatcaatcaaaacgttacagcccccctaaagcttcactgtaatgacttcccctggcgtcgtccccctaacctcaatgtccatatcgctgagccagagcatcaaaactgtcgtcactgttcagagagagaagccccatggtctcagaaatgtcgggattatccgtggctcatagccccgttaagaaagtggctcgtctttataatattttatatccagccctccctcttcaaaccgttaatccagtaatttcatctccagcgcccggctcatcgcttgagtgcgactattcactttgagcttcgcgtagatgtttttgatgtgccatttgaccgtctcggcagaaatagcgagggagcgagcaatttctttattcatctgaccttcagcgatcagttgtaatatctgaaattctcgctcgctgagttccccttgaatatcggggcttccactattaaacggtgttccatctgcaggcgcgcgcttgtcggcccagggttcatgcactcccccttcctctttaccagccgaagaggattcattcataccggcaagcaaaggttgcaaggtatcgccagcgtcaagaaagaggcctttgagatgctggtgttcagccagctgcacgactggctgaaatgttgtgcgcgcagcggcagttttgccgctgctccacaaggctaatgaccagagcgtacgcagacgcgctgcggttaacctgtccccccggttttcctgatcagagaccatgtcagccaggagaatacaggcttgcggcgcctggcctctggcgagaagaaggcgacagtggctaagggatgcatacagaacgatagcgcgttgacagggatgttcggcatccattcggaagctggcggccatttgttcaagctgtcgttgcagttgctctgcgcctgtgaaattgccgtgctgcagtcgcactctcacctgctcggctaacatcatggcctggagccgttgccagccgcgagacacggcaagacgctgcgcatgctccagcaatcgctcggcctcatacggcatatcgccatccagggcctgacgcgcgagataggtatagcaacgactcagcgcatcgggtggactgaatcggtcgatgaattcgagccggtcggctaacagatgatcgggcgagtcaccactctgacattcataggctatctccgccagcagcggcgccagcgtcgcgccactggtcgactgggtaccggtataacattcagcctggcgcaacgttttctctgcgtaccacccggcttttcccagatcgccctgacaaagatggcactgggcaatgataaacgcgcgataaaccgagacaaacagattatctaaaggactttccggagagggcatatgctgttgaacctccagcgcgtcgtgatagcgctggttaacaacatggcaatagctgagaatattgcatatcagaccatcaacccaggtgtcgccgcagggcacttcggccagcaacggctgaactatagccagactctccgggatgttttccgcaaaggcttcgcaaattgcccgcacaacgcgcaatttacaccaggtgctgcgggttaaatcatcgcgatgatgcagtaccatctgatcgaggttatcaagcaactgcctcgactcatcaaagtggaaataatgcgccagtgcccaggccaggttaatttgcaggtcaatgcgcgacggatcggtgctgggcggtaaatgatgcatccatgaaatcagggtatcgatatccccttcttccgccagtgactgagcgcttgcgccgtcctgcacggggctatgcaccggcttgcctgcgctgagcgcatggcgtaccgcctctgaccacagcttctgttcgacgaaccactgactggctaattcatgtagctgtttgcggtcaatatcgttgttctgctgcagcatggtccgaagattttcctgcaacagaggatggtagcgaaaccagtagccttgttcgtcaagggctgacaaaaaaaggttgtgtcgctcaatccatgccagcatcgctttactatcatcacgtccagtcactgcattgcatagttcggcatttaaccgactgaggaaggacgttttcaccaggaaatcgagaacctcttccggcagcggatccagtaccacctctttcagatagcgggcaatggatcgtgttcctccatgcatattacgcaacagatgctcgggatcattctgtaattctgccgacaatgaagcgatcttcatgcccgcgatccagccctctgtcacggactgtagccgctgtgcatgatggttgctgaggggtagcgcaaccgtgcggctaaaatagtgttttgtttcttcgagcgtgaattgcaggtctcgatcatagatctccaccagttggtcctgggcctgcagctggctcagcgcaagattcgggtggaaacggctgccaatgatcagatgcaaggcggcaggcgcatgcttgattaaataccccagcgcttcatagaccccacgatcgttaatcacgtggaagtcgtcgataatcaggtacacgtcatgcgggcagtagtgtagctggttaatgagcccggccagcagttgctcggagctggagagcttctgctcttccatgtcacgccagaaatcggcgtcccagtcagcatagagtggacgcaatgcttgcagcagataaggaataaactgccatacgtcatcatcatcctcatcgaggctcagccaggcaatacgttcgccctgggcgaccatctgctgatgccattgcgccaacagcgtggttttgccaaatccagcgccggcgcagacgacgcccagccggcactgctgaacgggactgagaagctgaagcagccgggggcgctccagcaattgtattgaggagcgaggcgggacgaatttggtcaggattagcggcaagcctcgcgtcagccgcaatggcccggagaccagtgagggtgattggcgaccttctaaatccaatggcttcatccgtggtgtctactcgctttgtttttttcaattgtacgccagcccccgggatgacatggggcagccaaactttattgctacacaaaatttagaaagtttgacctcaagcatgaaaacccccacctacccccccatgaaggtggcttcgcactccctttaaccgctcgtagattcattgcatgggtgtggccagggttatccgccctgtctgttggccccgcctgggtgacctttattgaggagaattaaacgatgctcagcaaacaggcgttattgcaggcttaccgcaagatgcgggagatcagaacatttgaagagcggttgcatcaggaaaataccagcggtgatattccgggcttcattcacctttacaccggtgaggaggccatcgcggtgggggtctgcgaaaatttaacgagcgcagattttattggttcaacacaccgtggacatggccactgtattgctaaaggttgcgacattcacggcatgatggccgaaatattcggtaaggacagcgggttatgtcgcggtaagggcgggtcgatgcacattgccgatctgtcgaaaggaatgctgggggcgaacgctatcgttgggggagcccctcccctggccatcggcgccgcgctaacggcaaagacgctaaaaaccggcaacgtcggtgtctcttttacgggcgatggtggttctaatcagggcctggtctttgaagccatcaatatggccgtcgtgctccagcttccagccgtctttattttcgagaataacggttacggcgaagggaccggccatgactacgccgtgggtgggcgtgatatcgcccggcgcgccgctggcttcggcctgccggcagtgaccgtcgatggcaccgatttctttgccgtttatgaggcaacctcagaggcggtcaagcgtgcgcgagaaggcggtggcccaagcgtcattgaggccaaagccttccgctggcatggtcattttgagggcgatcccgcgctatatcgtgcggaaggtgaagtgcaacgcctgcgtgaacaacatgatccgctgaagattttcaccgctaaggtcaagcaacatatcacccaggaagaactggcggcgattgacgaggaagtagaagccctggtcaacgatgccgtattgaaggcccgcgccgctgcctacccggctccggaagacctgctgacagacgtgtacgtctcatactgagggtgataaccatgacaataaaaacctatcgtgaagcggtcaaggaagccctggctcaggaaatggaacgcgatgaacgcgtggtgctcatcggtgaagacttgcgtggcggtcatggcggaaatgcgcccgaagaggcgaaaatagaagcctttggcggtgtgctgggtgtcactaaagggctgtggacgcagttcggctccgatcgggtgatcgacacgcccattaccgagtcggccatcatcggtatggcggccggcgccgcagcgacgggtttgcggccggtcgcggaattgatgttcatggatttttttggcgtgagtcacgatgcgctgtacaaccaggcggctaagttccgctacatgtttggtggcaaagccagagctccgctggtgatgcgagggatgatcggcgcggggttttctgccgcagcccagcattcacagtcaccctataatatctttgccaccacgcctggactgaaggtggtggtgccctcgacgccttatgacgtcaagggtctgttaatccagtccattcgcgacgacgacccggtggtattctgcgagcataaaatgctgtacgacctcaagggcgaggtaccggacgagatctataccatcccgctaggtgtagccaactacactcgcgaaggggaggacgtcaccatcattgcgttgtcggcaatggtacataaagcaaaccaggtggcggacaaactggccagagaggggatctcggtcgaggtggtcgacccgcgaaccatttcgccgctggatgaggaaggtattctggaatcggtggcgtccacggggcgggtcgtgattgtcgacgaatccgctgcacgcttcggttttgctcatgatgtcgcggcgctgattgcgtcccaggcattccatttcctcaaagcgcccgttctgctggtgacgccgccacacacgccggtcccgttctcccctgctctcgaaaaactctggatccctggcgttgaacgtatcgaagccgccgtccgtcaagtgctggaggattaacctatgagcgaaatcaagacgcttgaaatgccaaagtgggggctttccatggaggaaggcttgctcgctcgatgggcaatccaggagggtgacgatttcaccagagggcaggaaatctgtgagattgaaaccagtaaaatcgtcaatgtgctggaggccccctttgccggtacgttacgtcggatactcgcccgcgagggtgagacgcttcaggtaggcgccgtgctggccctggcggctgacgcgtcggtcagcgatgctgaactggacgaatttgttgcccgcctggcgacggcgaaacccgcagccccaggcccggaggctgccgcgccggacgtagcggcacaggcaggcgctaagccagcttccgttgtttccccgccatccaacagccccgagccccctgttgggcagaccgtcatccccgtcagtctgcaaggcgtgaccgatgtgactcaggttaatgccacgccccatgcgttacgactgtctgcccgctggggtgtcgacctgaaaaaagtccgcggcagcgggcgcggggatcgtatctctgtatctgatctggaaagcgcgatcgttgccgccggcggtcgcctggcctctccgacgcctcccgttcgtcgcagcaaagcgccccgctcgcatgccgatgatagccaggtatcggccaccccgctggcgcgccgtctggccggcaaactgggtatcaacttacatgactgccgaagcagcggttcacgcggtcgggtgagtcgcgatgatgtgctggccgcggcgttgttactcgacgagcaaccgcagaccagccctgtgcaggagagtgccccggcaccctttgagagcatcccgatgtccggtatgcggcgggctatcgcttctcgcctgcaaacgtccaagcaacagtctccccatttccgtttgagcgtcgatctcgatctggagcgactgttagcgttacgtcaggacattaaccgcgaagtacccggcgtcaagatttcggtgaatgacctgctggtgaaggcctgcgccctggcgctggtggccgtgcctgacgtcaatatccagtttgatgaagcggcacaaagtatccgccgctttacggatgccgacatttcggtggccgttgcgctgcctgccgggctaattacccctattgttcgctcggcgaaccggaaatcgatcagcgacatatcgaacgaaattcactcgctggtgaccagagccaaagcgggcacgctgaagccggaagagttccagggcgggacctttagcctgtcaaatctggggatgctcggcgtccggcagtttgacgccatcatcaatccaccgcaaagcgcaatcctcgccattggcgccggagaggtccgggcggtagtacgcgacgggcaaatcgtcgcgcgccagcaaatgacggtatcgctatcctgcgatcaccgggtcatcgatggcgcggcaggtgcggcttttctccgggaactcaagcgactgattgaaaccccgaccttgatgtttatccaggagacgagctatgcacgataaatacgatgtgctgatcatcggcgggggtcctgggggatacgttgccgccatccgtgccggccagctagggcttcgtaccgtattagtggaaaaacaacatctgggcggcatctgcctgaactggggatgcattccaaccaaggcgctgctgcatggcgctgaggttgcgcacactatcacccatgccagtcagctgggcatcagcgtgggcgaggtgaacgtcgatctgcagaaactggtgcagtttagccgtaccgtatcgcaacagctcaccgctggggttgcgtacctgttgaagaaaaatggcgtgcaggtcattgatggcaccgcgcggctgcgcggcaaggggcaaatcacggtcgaggatgcccgaggggaggcgcgcgattaccgggccgatcacgtgatcctggcaaccggcgcccgaccacgcgcattgccaggcatagcgccagatggcgaacatatctggacctatttcgaggcgctgcggcctaagcttttacccaagtcgctcttaatcatcggttcaggggcaattggcgtcgagttcgccagcctctataacgatctgggctgtaaagtgacgctggtcgagctagcgtcgcagattttgccagtggaagatgccgaggtgtctgcagcagtgcgtaagtcattcgaaaaacgcgatattcagatccatacccagaccctggtgacgcaagtacagctcaccgataccggggtgcgctgcacactaaacaacaccggcggcgaatattctcaggatgtcgaacgtgtgctgctggcggttggcgtacagccgaatattgaagatctggggctggaagcactgggcgtcgagttagaccgcggttttatcaagacggacgcggcttgtcgcactaacgtattcgggctttatgccatcggcgatgtagccggcccgccgtgcctggcgcacaaggccagccacgaaggcgtgatctgcgttgagacactggccggtgtcgaaggcgcccaccctctcgatcgcgactatgtgcctggttgcacttatgcccggccccaggttgccagtctgggcctgacggaatcgacggccctggccaggggacggcccgtcaggatcggtaagttctcttatcagagcaatggtaaggcgctggccagcggcgagacagagggttttgtgaagacgattttcgatgctgaaaccggcgagttgctgggcgcgcatatggttggcgcacaggtcacggaacagatccagggctttggcatcgcccgtcacctggaggccacagacgaaagtctcctgtcgatgatctttgcgcatccgacactttccgaagcgatgcatgaatcaatcctcgcggcctgcgaccaaccgttgcatcaataaaaaataagggaggcgatagctgtgcgatacggagtaagttcccgttatccctcccgcactccccggcagaagatccccaacaacggttacggcaggatctattgatctgaaacgctaagcgccatgcgtaaattctgtatgtttagtagacaaccaaacgacaggaggagcgctctatgacacagcacgaaaggttttgccaggcctgcggaatgccgatgtccgcacccgatgcgcaaggggccagcgataaatattgcgcgtattgctgcgacagcgacggtaatttgaaatcctgggaagaggccgtatccggtctggcggcttttctcgacgcctggcaaaaggtgggcgtagcggaatcacggaaacgggcaaaacgttacctgacggcgatgcctgcctgggcgcacaaagcggacgagtaatttgcccgggcggctagaggaaatcatcccggggacagaccgccatgccgacaacattgctatagcgttttcgtacgccatccggacaggaataaatgcgcgtttggggatgacgacctgaaggctggagcatgcatggatgcgttcttcatgcggatgaaataaacgcctggcgttctccccttgtccggatgcgttattgcctggtttttaaggggtcggtttctgtatttaacccagaacttctcaggtaatacaacatattgatgtgatgaatctctcatttcaacgataccaactggacaataagttatcgcgtgtgttagttatttaatcacgcaagagaacagatttaatttaaacaaaagttaaacctttctcactttgctaaaaaattgtattgataatgctttggatccctgaaccattatcaaaagggtatgtgaacagaaagccctcagagacgcgagtctctgagggctttttttttgtttttttatctcaggagtaaacaaatgtctaaagaacgtcgtctctcaagaatattcgcaaaagacggtaaatccgtgaccttagcgctggatggctactatttttccacgaaaacaaatggtattgataatacgataaatcagctccctgctctggtggaacacggcctggattgcgcgcttgtcacgtacggcatgttgaagaattatcgggaagcactgaacagcgttcccgttgtgttacgcgtcgacagcacggtcagtatctttgacaataccgttcccgatactacccccgttttttccgtcgaagatgcgcttaaagtcgctgccgagggcgtggtctgcatgaccttccccggcgccttcaatgaagaaaaaacccacattatggcgatgcaactcgcacaggcagcggatcgctggaatgtaccgctgattgtcgaatcgctcccgtatggttatcccgtcaccagcgatgactctaacaatccggccatcatcgctgcatcggcccgcgccgcggtggagctgggcgcggacgtcatcaaaacgcgttttaccggttcaccagaggaccgactgatcgttgaagctgctggcgtgccggtgcttgccttaggagggccaaaaaccggcatcgacggttacttcaaatttgttcagcactgtatgcagatgggtgcgaaaggcgttgctgtgggaagaaacattacccaggatccgcagccggcgaaagtggtagcaggtctgaatgccatcatccatgaaaacgcaacagcggaagatgcatacagcctctacatggctaaataacatcggaaattaatatgatttcaaataacaccatcatcccttccatcaggaagtataaatactttgagaaagcattatcctgccagtcagaatatgtgctgctatccgaagcgaatatcggcaatctgcagtcgctgattggcaaatgccatcaaagcggtaagaaggtcctcgttcaccttgaattactgggcggctttaaaccggatcaggcggggatcaatctgctgaaaaattattacaaggttgatggtgttatttcttccaatctctccgcgctacgctacgccaaaaaagagggattgctgaccgtatatcgggttttacttatcgattcgcgatcgcttgatcagtcgctcgatattgttaaacacagtccaccggacgcaattgaaatcttacctgctgaatatgcctgccagtgtctggagttgattagccgaaatttgaaaggctttgatgtggtattcatcgccggaggctttgttaagcgcaaataccttgtagataaaatattccatgccggatttaaagggataaccaccagcgagcccggcttatggtaaccaataaggagtccacgcgaatgaaagatgaatacgtcatgggcatcgacaatggtggaaccgtcaccaaggcagccatctatgaccgtaaaggacaggtgctcgccatcgcctcaaaatccacgcagatgctgacacctcgggaattccacacagagcgcagtatcgatgagctgtgggccgcgaatgtcgaagtgattaaaaaagcgattgagcaatcaggtatcgacgccagccagataaaaggagtggccgtcaccggtcatggtaacggtctgtatctggtcgacgaagaaggtcacccggtgcgtaacggcattatatccaccgatagccgggcaaaagagtacgttgagagatggcaacgctcgccagaattccttaccgacattttgccaaaaacgatgcagtccatctgggccggacaacctgtcgccctgctggcatggctgaagaatttcgagcccgagacgctgcaaaaagcgcgttatatttttatggtcaaggacctgatccgtttttacctgaccggagaggcttttcttgagctgaccgatatctcagggaccaacctgatcaacgtacgtgactgcaagtatgacgatgaactactggcatggtggggacttgatgaactgcgggacaaattgccccccatcaaacgctcaacagaatgctgcggaaaaatcactgacgacgtggcccgtctgaccggtttatgcgcaggtacgccggtttctggcggggtgtttgatatctcggcctcttccattgcctcggggattaacagtctcgataagatggcgatcgtcaccggcacctggagcataaacgaatacgttaccgaccacccggttattgataaagatctgtttatgacctccatttatcccattgaaggtaaatggctcatcaccgaggccagccccacctccgcgagcaacctggagtggtttattaacaactttatggagagcgatcggaaaacctccgccgaacaaggatcgtcggtctatgacctgtgtaataagctggtttcatcaacgacgccggatgaaagccacctgctgttctttccgttcgtgtttggctctaacaccattcccgacgcctcggccggctttatcggtgtcaacagcttccataaaaaagcccattttctgcgggcgatttatgagggcgttgccttcagccatctctaccacaccgagcgcttacgcaatattaacccgaagctaagccgcactattcgtattgctggcggcgtcacgaactccccggtctggctgcagatattcgccgatatcttccaggccacgctggaaatcgttgacgtcaaagagcacgggaccctgggtaccgcgatgaccgccgccgttatggtgggctggtttgcggaggtatttgctgcctcaaacgacatggtccatgtctcacgcaccgtctcccctaatccggaaaaccaccgggtctaccagaccaaataccagctttataaaaacctgttatcagaaatgcagtcgccgtggaaaagctgcagcaactacatcgcgcactaagtgaggaaaaaatggatctgaatttaacgaatcgtacggccatcgtgacaggcggcgcaaccggcctggggaaagagtttgttctttctctcgccaaagaaggcgtcaatatctgctttacctatatgcgtgaggaagagcatcccgaacggctgatcgaaacggtgaaggccagcgcgaacgtagagatcatcgcggtcaaaaccgatctctctgacgaacagagccgggaaaatctgtttgccacctgtatcgacagactgggtaaagccgacattctggtgaataacgccgggatctggctgagcggctacgtcaccgagatcagcccgcaggactgggatctggtgatgaatgtcaatctgaaagccatcttccatctcagccagctgtttgtaaatcactgcctgcagcatgaccagatgggcagcattctgaatattacctcgcaggccgcgttccacggctccacgacgggacatgcgcactacgcggcaagtaaggccggcctggtcgcctttgctatctctctggcgcgggaagtcgccaaacaaaaaatcaatgtgaacaatatcgccgtcgggatcatggatactgcgatgatccgtaagaacattgagcaaaaccctgactattacgtcagtcgtattccggtgggccgcgtggcccagccgcaagaaattgccgacatcggtgtcttcatggtttctcctaagaccagctatatgacgggagcaactctggacgttaccggcggtatgttgatgcgttaatctagggagaatcattatgaaatgtctggcaattgccgatctgtttatcaatgcagcgatgatggaatcaggactgaaagcgctcagggataacgggattgaagtagaagtacgcgagtggtcacatggctccgttgagaaacttcaggaagataatctgcgggttgaacaggaaggagcagaagccgtggccttaccggaagcgctgcttcagggaacggatgatattgacatcctgatcactcagtttgccccggtcaatactgcggtgttcgataaactaccaaagctgaaatatgtaggcgtgctccgcggtggtgtggaaaacgtgaatcttcaggtggcgaacgcccggggcgttgaggtgatgaacaccccggggcgtaacgctcgcagcgtcgccgaattcacggtcggcatgatcctggcggaaatgcgcaatattgcccgttcacacgatgccctgcgtgacaaatactggcgtaaagacagcccgaaccatcaggcaatccctgagcttggcggaaaagtcgtggggctggttggcctcggtcatattgcccaactggtcgcgggatttctcagcggctttggcacggagattatcttttacgataagtacgttgcaggccatgaacgttatgagaaagtcgattctctggacgaactggtacaacgcgccgacgttatctcgttacatgctcgcctgacgccggaaaccgaaaatctgattaacgcacaccatttcgcgctgatgaagcgcagtgccatcattgttaacacagcacgctccgggttaatcaatgaaaaagagatgattgatgcgctcagatccgggcaaatcatgggcgccgcgcttgatacctttgatgacgagccgcttcctgacgacagtgcattctatactctgaataacgtgactattacgccgcatattgccgggagtaccattgacgcattcagtaattcgcccaaactcttcgctgagatccttttaaagaaactcagttaaatattaaaagaaccattaaaggtattaacagggcccaatgggcacgggtttactcgtgcccaattcgcccgccttttaaggaatcattatggatattatcaacagcattattagtctgggggcatcagtaatgatgccagtaatattctttattatcgcgctttgctttggcgttaaaatcggtacggcatttaaagcagggatgctggtaggcattggttttgaaggggtggggctggtgattggcctgctgctgacaaacctgggcccggcatcgcaggcgatggttgagcgtatcggcctgcagttaacggtcgttgataccggttggcctaccgcatcgaccattggttggggttcgccgctgatgctgcccgtcgtggtgggctttatcgtcatcaacctggccatgcttctgttgaaattaaccaaaacggtgaatatcgatatttttaactactggattttcctgatcatggggtctgtggtctatgccggaacgggaaattactggctttcggtcggtattacattcgctatttttgtgttgacgctattggcggcagatttaacggcgccgtatttacaaaaaaactataatcttaaagggatatcattcccccatcttacctgtatagcttacgtgccgtttggcattgcctgtaattacatcattgataagatcccgcttatcaataaaatcaatttcgacccggaaagtattaataaaaaattcggcgtttttggcgagcctgttaccctggggtttgtgctgggactgctgttggccttcctggctggatatgacgtttccgcggccgtttcactggccattaaggtttcagccgccatgctgctgctgcctaaaatgattgaaattctggtgcagggattgttgattgtccgtgatgccgctgaagcaaaactgaaggctaaattcccggggcgcgatttttacatcgggatggatacggcgttactgatcggtgaaccttcggtactggcgaccggtctgctgttaatccctatggctgtggtgctgtctatcattctgcccggcaaccgcgtactgccctttgtcgatctggcttcattaatgttcctgctggcaatggtcacgccgttctgtaaacgaaatatgttccgcatgttcataaccggaaccctgatcgtgacctgcatcctgtatgtcgggacggacatttcgcaagaatacactcaggcggcggtgaactcgcatattccggtgccggaagggatggccgagatcaccaatatcgtcggcggcgccacgacgcctgtcggctggctcgccgtcaaatttggcgagttttttagcgccacaccttagtacaaggccactcaagtaaacagagggcaaactgttgccctctgtttcttcctcttattctgtgcgctgaatagctggctcagctacgcccctggtttgaacatctgaccagcgcgtccgccccctgcgcggcgaggtggctcatttcttttgtaccccctcccgttttcaacccaacctgctatgctccttctttccctgttctctggagatcccgatgctgaccatctggggccgaaaaacctcctctaacgtgcaggcgctgatgtggtgtgttggcgagcttgggctggactatctccggttcgacgtggggcatcgctatggcggtaccgacagcgaggcgttttatcagctcaatcccaatcgtacggtgccagtgctgcaggatggcgataatccgccgctgtgggaaaccggcgcgatccttcgctatttagccagtcgctacgccgacgacgccttctggccgggcgacctgctggctcgtactgaggttgatcgctgggccgagtggtcaaagcagaatatcgccctcggctttacggcgccggtgttctggcgcgtggtgcgcacgcctgccgccgagcgggatccgcaggccatcgccgcggcggtgacggccctggagcaaaagctggcgattgccgaggcacgtctcgccggcagtcgctatctggtgggcgatacgttcaccctggccgacatccagtttggtcatgtgctgtaccgctactttgccatcgatatcacccgtcgtcccctcccccatcttgcggcgtattatgcacggctaaccgcacggcccgcctttcgccagcacgtcatggtcagctacgacgaactgaaggtctgaaggtggtcggtagcgcctcctgacgctaccgacatgccggttaacgcgccatcagaacaaacacgccccagccgagatattcccgggtccaggtgacatggtgcagcggcgcggtggtcaactgctggcgaacctccggtgcgaagtcatcgtgcggattggcctccagccagcggcgcattgtcagccatttcgccgcttcataacgatcccagccctcctggtcggccagcaccatctccaccacgtcatagcccagttcgccaaagtgggcgaccagcgccggtagcgttaggaagtcatcgggtgactgcgcgccgcaggcaatcgcctcttctgccgtggccggacgtttgcgccaccatggctcgccgataagcaacatgccgcctggggtaaggctctgcttcagcagctcgattgtgcctgccaccccgccgccgatccacgtggcccccacgcaggtggcaacatcgcacggctggctggcgacatatccgctggcatcctggtgcacaaaggttacccggtcgcttaccccgagctcctctgcccgggcggccgcctgctgactgaacagcaggctcatgtctacgccggtgccgactatctgatgatcgcgcgcccagctacagagcatctcgccggagccgctgccgaggtcaagaatggtggtgcccggcgccattcgcagcgcccgtcccagcgtggcgtacttttccggggtaaaagggttatggatacggtgctcgctttcactgatggtaaaaatgcgagggatatcgatcatgaggttttctccttgagagccaaacgcccgggcagcgaccctgcccgggtcgctatttcagcggttgtccgcttgcgcgcgaacgttattcaaaccggtcgtgttgatccggtacggctggccgttcaccgacttaatcagctttttggttttgagctttttgaagaccgcaagggtgcagtcgctcagcaacagcccttcgcgggtgtagcattcaacggcggtaatgcggccggaggtatcgcggacgtgcgcaatacggccacctttggcgagaacgtgtaaggtccgttgttcctgacgggataaattcatactgaaacctgttcattatcatgtgcgaaaacatgcctacacccgcaggtgtgtgcgtaaggtttaagcgcagcgataatcagtccggcctgggcaggtcgggaaactgattatctgataatgacattctccagcatcgaagcctcagtgagcattgaaaggtatttaccggctgaatattaacaccgtcatctggtaaggatattgtgcagattaaaaactgtgaccggtattacgatttccctcggccttatccccattttgcgctatccgccacccgctctgttccgcaactttcaccaccaccttatcccccctcccgcattgttaaataattgttgtcagatcacaaaatggaaacaaaaaggccatttcgtacgcattttataaaaatgtagatatttttaatttatggctacgaaatgaacatcaccctgaccttacagcgaggaacgatcctgatgaacgccctgaccgcagtaaaaccgacacccgcgccggtagcccagcaataccctggcttttctttcaccccttccgcccagtcgccgcgcctgctggagctcaccttttccgccgaaacgaccacgcagttcctgcagcaggtcgcgcagtggccggtgcaggcgctggagtacaaatctttcttacgcttccaggtcggcaagatcctcgacgatctgtgtggcaatcagctgcagccgttgctgatcaaaacattgctcgatcgcgcggaaggcgcgctgcttatcaacggcgaagggatcgatcacgtcagccaggccgaggagatggtcaagctggccaccgccgtcgcccacctgattggtcgttccaacttcgacgccatgagcggtcagtattacgcccgcttcgtggtgaaaaatgtcgataactcagacagctacctgcgccaaccgcaccgggtgatggagctgcacaacgacggcacctacgtcgaagagcaaaccgactacgtattaatgatgaagatcgacgagcagaacatgcagggcggcaattccctgctgctgcatctcgacgactgggagcatctcgacgaatttttccgcgacccgctggctcgccgcccaatgcgttgggccgcgccgccgagcaaaaacgtcagcaaggatgttttccacccggtgttcgacgtcgattcgctgggccgcccggtaatgcgctatatcgaccagttcgtccagccgaaagatttcgaggaaggcacctggctgagccgcctctccgacgcgctggagaccagcaaaaacatcctttccataccggtgccggtgggcaaatttctgctcattaacaccctgttctggctgcacggccgcgaccgctttacgccgcacccggacctgcgccgcgagctgatgcgccagcgcggctactttgcgtattccacgaatcattaccagactcatcaataagggttttcaggcgaaggaattgagcggatgtatgatttcgtgattatcggcggcggcatcatcggcatgtcgaccgccatgcagttaattgagatttacccggacgcccgcattgcgctgctggaaaaagaggccggcccggcctgccatcagactggccacaacagcggcgtgatccacgccggggtgtattacacgcccggcagcctcaaggcgcagttttgcctcgccggcaaccgcgccaccaaggccttttgcgagcagaacggcatccgctatgacgtctgcggcaaaatgctggtcgccacctcaccgctggagatggagcggatgcgcgccctgtgggatcgcaccgccgccaacggcctgcagcgcgagtggctaagcgccggggagctacgcgagcgcgaaccgaacattaccgggctcggcgggatcttcgtcccttccagcggcatcgtcagctaccgcgaagtggcggcggcaatggcgaagaacttcgaagcgaaaggcggaacgatcgtctacaacgccgaagtcagcgccctgaaagaacatgccagcggcgtggtgatccgcacccgccagggcggagaatatgaggcctcgacgctgatcgcctgttcgggcttgatggccgatcggctggtaaaaatgctcggcgtcgaccccgggtttatcatttgtccgttccgcggcgagtatttccagctggcgccgcagcacaaccagatcgtcaaccatttgatctatccgatccccgatccggcgatgccgttcctcggcgtccacctgacccgcatgatcgacggcagcgtcaccgtcggccccaacgccgtgctggctctgaagcgcgaaggctaccgcaagcgcgatatctcgctggccgataccctggagatcctcacctcgcccggcatccgccgggtactgcaaaacaacctgcgctccggactgggcgaaatgaagaattcgctgtgcagaagcggctatctgcggctggtgcaaaaatactgcccgagcctgacgctgagcgatttacgcccgtggccggccggcgtgcgggcgcaggcggtgtcgccgcagggcaaactgatcgacgattttctctttgtcaccaccgcgcgttccattcacacctgtaacgcgccatcgccagcggccacctccgctatcccgatcggcgcgcatatcgtcagcaaggtgcagaccctgctggccagccagagcaatcccggacgcacgctgcgtgcggcacgtagcgtggagacactacacgccgcttttacccgttaaccaccctgaagacaggaagcgtttatgcaactcaacgatatgacactgtttcgccagcaggcgatgatcgatggccagtggcgcgatgcgcccaacggcgacgtgattgcggtcaccaacccggccaacggcgagcagctcggcagtgtgccgaaaatgggcgccgatgaaacccgcgaagcgattgaagccgccaatcgcgccctacccgcctggcgcgccctgaccgccaaagagcgggcgaacattctgcgccgctggttcgatcttatgatggagaatcaggacgatctcgctcgcctgatgaccctcgagcagggaaaaccgctggcggaagccaaaggcgaaatcagctacgccgcctcctttattgagtggttcgccgaagaaggtaagcgcatctacggcgacaccattccgggccaccaggccgacaagcgcctgctggtgattaagcagcccatcggcgttaccgccgccatcacgccgtggaacttcccggcggcgatgatcacccgcaaagcgggcccggcgctggccgccggctgcaccatggtcctgaaaccggccagccagacgccgttttccgcgctggcgctggccgaactggcgaatcgcgccgggatccccgccggagtattcaacgtggtcaccggctccgccggcgcggtcggcggcgaactgaccagcaacccgctggtgcgcaagctctcctttaccggctctaccgagattggccgccagctgatggagcagtgcgcgaaagacatcaaaaaagtctccctggagctgggcggcaacgcgccgtttatcgtctttgacgatgccgacctcgataaagccgtcgagggggcgctggcgtcgaagttccgcaacgccggacagacctgcgtctgcgccaaccgcctgtacgtccaggacggggtgtatgaccgtttcgccgagaagctgcagcaggcggtggaaaaactgcgcattggcgacggcctgcaggacggcgtcaccaccggcccgctgatcgacgagaaagccgtggccaaagttgaagaacacattgccgatgccatcgccaaaggcgcgaaggtggtcaccggcggcaaaccgcacgccctgggtggcaacttcttccagccgaccatcctggtcaacgttcccgacagcgccaaagtggcgaaagaggagaccttcggcccgctggccccgctgttccgctttaaagatgaagccgacgtcattgctcaggccaacgataccgagttcggtctcgccgcctatttctacgcccgcgatctgagccgcgtcttccgcgtcggcgaagcgctggagtacggcataatcggcatcaataccggcattatctccaccgaagtcgcgccgttcggaggcgttaaggcctccggcctcggccgcgaagggtcgaagtacggcatcgaagattacttagaaatcaaatatatgtgcattggcctttaacaggagcgacggatgaacagcaataaagcaatgatggcgcgtcgcagcgacgcggtcccgcgcggcgtcggccagatccaccctatcttcgccgaacgcgcggagaactgccgggtgtgggacgtggaaggccgggaatatctcgattttgccggcggtatcgcggtgctcaataccggccacctgcatccgcaggttgtcgccgccgtcgaagaccagctgaaaaagctgtcgcatacctgcttccaggtgctggcctatgagccttatctggcgctgtgcgaaaagatgaaccagaaggtgccaggtgatttcgccaagaaaaccctgctggtcaccaccgggtcggaagcggtggagaacgcggtgaagatcgcccgcgcggcaaccgggcgcagcggcgctatcgccttcaccggcgcctatcacggccgcacccactacaccctgtcgctgaccggtaaagtgaatccttactccgccggtatgggcttaatgccgggccacgtctatcgcgccctctacccgtgcgcgctgcacggcgtcagcgatgacgaggcgatcgccagcatccatcgcatcttcaaaaacgatgccgcgccggaagatatcgccgccatcattatcgagccggtgcagggtgaaggcggattctatgccgcctccccggcctttatgcagcgcctgcgcgccctgtgcgacgagcacggcattatgctcatcgccgatgaggttcagagcggcgcgggccgcaccggtaccctgttcgccatggagcagatgggcgtcgcggcggatatcaccaccttcgccaaatccatcgccggcggtttcccgctggcgggcgtcaccggccgcgcggaggtgatggacgccatcgcccccggcggactgggcggcacctacgccggcaaccccatcgcctgcgccgccgccctggcggtattgcagattttcgagcaggaaaacctgctggaaaaagccaaccagctcggcgataccctgcgccagggcctgctggcgatcgctgaagatcatccggagatcggcgacgtgcgcggtctgggggcgatgatcgccattgagctgtttgaagagggcgaccgcagcaggccgaacgccaggctgacggcggatatcgtcgcccgcgcccgcgacaaaggcctgatcctgctctcctgcgggccgtactacaacgtgctgcgcatcctggtgccgctgaccatcgaagaggcgcagatcgagcaggggctcaagatcatcgccgactgctttaacgaggcgaaacaggcatagagaaacaggcatagaacagaacacatgcggaagcgaagtacgttcgtaagggaatgaagacgagacctgcaaaacaacaataatacgcgtgccccggcgcgggaacgtcggggcgctctcccaggtgacacacttcgagagggtaaatgatggggcaactgtcgcaatcacaggatttaggggcggggctgaagtcgcgccacgtcacgatgttatctatcgccggggtgatcggcgcgagtttatttgtcggctccagcgtcgccattgccgaggcaggcccggcggtgctgctggcctatctgtttgccgggctgctggtggtgatgattatgcgtatgctggccgaaatggcggtcgccacgccggatactggctccttttccacctacgccgataaagccatcggccgctgggcggggtataccatcggctggctgtactggtggttctgggtcctggttattccgctggaagccaatatcgcggcgattattctgcattcgtgggtgccgggcgtcccggtgtggttgttctccctggtcatcactctcgccctcaccggcagtaacctgctgagcgtcaagaactacggcgaattcgagttctggctggcgctgtgcaaagtgatcgctattctggcgtttatcgtactgggcgcggtcgccattaccggcttttatccctatgccgaagtgagcggcatttcgcggctgtgggaccacggcggctttatgcctaacggcttcggcgcggtgctgagcgcgatgctgatcaccatgttctcgtttatgggcgcggagatcgtcaccatcgccgccgccgaatcggataccccggataaacatatcgtgcgcgccaccaactcggtgatctggcgtatctctattttttatttgtgctcgatctttatcgtcgtcgccctcatcccatggaatatgccggggctgaagagcatcggctcctaccgctcggtgctcgagctgctgcatattccctatgccaagctgattatggacggcgtgatcctcctgtcggtcaccagctgtctgaactcggcactgtataccgcctcgcggatgctctactccctgagccgtcgcggcgatgcgccggccattatgggccggaccaaccgcagcaaaacgccatacgtggcggtgctgctctccaccggcgcggcgttcctcaccgtagtggtgaactactatgcccccgccaaggtgtttaaatttctcatcgacagctctggcgccatcgccctgctggtctatctggtgatcgccgtttcacaactgcggatgcgcaaaatccttcaggcgcaaggcggcgagatccgtctgagaatgtggctctatccgtacctgacctggctggtgatcgcctttatcaccttcgtgctggtggtgatgctgttccgtccggcacagcagctggaggtgatctctaccggcctgttagctctgggaattatttgtacggtaccgattatgtcacgctggaaaaagctggtattgtggcaaaaactgccgctgcaaaatacgcgttaaccctgttcccggcgcccgccgggaagagtattcaggagtaagaacatgaccgccattccccaggcgacggccattgacgggtaccgttggttaaaaaacgacatcatccgcggggtttaccaccccgatgagaagctgcggatgagcctgctgacgtcgcgctatggcctgggggtcggtccgctgcgcgaggcgctttcgcaactggtggccgagcggctggtaacggtggtcaatcagaaaggctatcgggtggcgcccatgtcggaacaggagcttctcgatatcttcgacgcgcgcgccaacatggaggccatgctggtgcgtctcgccattgagcgcggcggcgacgagtgggaagccgagctgctggcccgcgcccatctgctcaacaagctggagtcgtgcgaagcgagtgagcacctactcgatgaatgggaccagcgccatcaggcgtttcacaccgccatcgtcgccggctgcggttcgcagtatctgctgcagatgcgcgaacggctgttcgatctggcggcgcgctaccgcttcatctggctgcgcaccaccgtgctgtcggtggagatgctggaagataagcatgtccagcatcagaccctggtggacgctattctggcgcgcgacgccgaacaggccagcgcgctgatgcgtgagcacttactgactccgatcccgattattcaacaggcgatggctggcaagctgtcgccgcaggcagggtgagtcagatggaggggtggaaattacgggtatggcggcacgcatctccacgccgcacgggcgtggagaaatcgtatccgtagatcaatcaggcccgcaggcgaaccggctcgctgaaatcgtcggccggttccagcttcagattaaaggtggtcagcagcgctgctgcgcgctcgtgaaactcgcgcagcgttttttccagcctgtcgctcacttccgggtcgtcaatgtcgaccgcctgccatgatccttccttattgaacaggccaaactggtagctataggtgaaacgtgactcttgtgcttccatttccatccaccagccccagaattcacgcttctccggtgcgggcttaacattgacgcaaactgccaggcaatcgaaaaagaaacggttatcatggcactgctcttcgcgaatgtaaggccccagcgccgtgaatttcttgatcaacttacttttcaggtgtccactcggtaacgtcattgcgatctcctttagtgatgcaactgttttaccaaaccaatagaatttagcaataaattaaccaaatctatgattgatccagcgggcgatctgtcgcaatgcgtgatcaaaattgcgatacaccgggttaaacgggatctccagcagtttgccatcggcagatgacgaggtgattaaccgcgactcctcttcggggctgaacggatcgtccttccagaagccggagagcatcggcgtcgggcaacggcgccccagcagtccctgggtttttaacgaatagcggttgagctccacgcgtagcgcttcatcggacgcgtcatgcatgcccagccgcgaagccagcacgtcaagatacatctccggcacgcgcccctgatgcaggggatccaccagcagaccatgaacgaccgggcccagacaggctacagccttcagccgctgcggctccagatagcccagacgcaccgcgatattggcgccaaagcggaagccgaaagcggcgacccgggtatggtcaatccacggcacattttccagatggcgcagcgcgtgctgatgcagcaggctggtgtcctgatttagcgtccattttgacgagaagccgatggagggcatatcaatggtcagcatggcaatgccgagcggtgagaagtagttctcatacaggttgtaataatcggtctgcagcgagtccagccccccgcacatcagcaccgtcggaaacggcccctcgcctttcggcatatgcaaaaagccggttatcggcgagccgccagggatggtgaactccagctcgcgcagcgagcccggcagccgctgggcggcttcttcatacgcccggttggctaaagcctgcgcctgttccgccagctcatcgcctttaatatgcggataagcggcaatgctatacaggttcgaggcatgcagccagtggcggccgctcagcaaagaatcggcttcctgcccggccttttgctgccactgcatggcttctttcgcccactcgaagatccagttgccgccgcgataaccgatgacggtatcgaacagctcaggatcggttcgttcggcctcgctcatcacaatgcgcgcttgcacatcgaggatctcctgcggagttacgccgcgccagatccacatcaaacggttgatcagacggtaccagtgatcgacgtgattgccgctcagcgccgactgcatcgcctggggttttccggcagaaaaccgacgcaccagcgtagaagtttcgggatgtttgaagcgaggtttaaacagcgtttcgctgaggttagcctgtgacatgtgcagtctccgtcgtagtgccactccggatattgtaacctgctaaaggataaaaaaaaccacgcccggcaagccgggcgtggtaaatagcactgtcctgaagaattaacgacctgcgataggcggtacaaacaccacgcccatatcccacggctgttcaatccaggtatcctgcggaatatccacaacgtaatcgtccaccagcgggcggcctgccggcttggcgaaaatggtgacaaagtgcgctttgggatacatttcgcggatcgccacggcggtaccgccggtatccaccagatcgtcgatgacgataaagccttcgccatcgccttccgcacgtttcagcactttcagctcgcgctggttatcatggtcgtagctggagatgcatacggtatcaacatgacgaatgcccagttcacgcgccagtaaggctcccggtaccagtccgccgcggctaacggcaataatgcctttccattgctcaaccggcagcagacggctggccagtttgcgggcgtgaatctgcaacatgtcccaggtgacgacgtatttttcgctcatgtgaagtgtcccagcctgtgtaatacggcttaaataatgttcgagggggaaaatggttgcgcgagattatagagatctgacgcactaaaaaccagtgttaagcggtttgcgcaacgctttttgcgttgtttacactacctgcggcggtggaaagtggtattctcaaccccatcgcgcaagcccgggcttgttgtgtattttaacgctaaccctcgtcctgcaaccgctgtatgcaggagtctgtaaggagacttaccgtgtctgaactgtctcaactatccccgcagccgctttgggatatttttgccaagatttgctccatcccgcacccgtcctatcacgaagaacagctcgccgagcacattatgggttgggcaaaagaaaaaggcttacatgcggaacgcgaccaggttggcaacattctgattcgtaaaggcgcgactgccggtatggaaaaccgtaagccggtagcgctgcaggcgcacctcgatatggtgccgcagaaaaataacgacaccgtccacgacttcgttaaagatccgatccagccgtacattgacggcgaatgggtgaaagcgcgcggcaccacgctgggcgcggacaacggtatcggaatggcgtccgcactggcggtactggccgacgatagcgtcgctcacggcccgctggaagtgctgctgaccatgaccgaagaagccggcatggacggcgcgttcggtctgcaggccaactggctacaggccgatatcctgatcaacaccgactccgaagaagaaggcgaaatctacatgggttgcgccggcgggatcgatttcacctctaacctggcgctgacccgcgaagcgattcccgccgggttccagagctttaaagtcaccttaaaagggctgaaaggcggccactccggcggtgatattcaccttggtctgggtaacgccaacaagctgctgtcgcgcttcctcgccggccacgccgatgagctggatctgcgtctggtcgatttcaacggcggcacgttgcgcaacgccatcccgcgtgaagcttacgctactgtcgccgtcgccgcggataaagccgatgcgctgaaagcgctggtgaatacttaccaggcgctgctgaaaaacgagctggaggccaaagagaagaacctggtggtgctcgcggaagcggtcgataacgacaaagcggcgctgactcaggcttcccgcgacactttcatccgtctgctgaacgccacgccgaacggggttatccgcaactctgacgtggcgaaaggcgtcgtggaaacttcgctgaacgtcggcgtcgtcaccatgaccgatgacaacgtacagatccactgcctgatccgctcgctgatcgacagcggcaaagactacgtggtcagcatgctggattctctgggtaagctggcgggggcgaaaaccgaagccaaaggcgcctaccctggttggcaaccggacgccaattcgccggtgatgcacctggtgcgcgagacttaccagcgtctgttcaataagacgccgaacatccagatcattcacgccggtctggaatgcggtctgttcaaaaaaccgtatccggagatggacatggtctccatcgggccaaccattaccggtccgcactccccggatgagcaggtccatatcgagagcgtcggtcagtactggacgctgctgaccgagctgctgaaagccattccggctaaataagccccacaaccggcggcggcccgccgccggttttaccccgcatcaccttagcgccacgcgtttttccatccggtaattaataaaccactccccgcgcgccgccacccgctgcttagccaccaccttaaaaccatgagccgtaaaacagggctttgcggtaatgctggcgtccaccgtcaggatttgcgctggatactgagcgcagagcgcctcgataagcgcgccgccgataccctggcgggcacgatccggcgagacgaacagcaaatcgatatgcgtcccaatggcggtgataaagccaaccggctggctgttgaccacggccaccaggccgattgagtcggccagcttttgtcgccagcgcgtctcatccacctgcgcccaggccgcgatctgccccggggtatagtcccgactggcggtttcccgcaccgcgcgcagaaagatctggcagagcagtggcaaatcgctgtcgcggtaagcacgaatatgcatggctaaatccctaataaaagctgcctttccagctgcggatcgagcaacgtcacgtggagcccaaccaggcgcacgccccgtccgccgcggcgctcatcccaggctttgtgcgcggtggcgatcagatcctctttgttcagccgcggccagacgtgctcctgggtggtcagctggaaatcattgaatttcagtttaatgccctggcgggcgatcagcagatcaggtttgaccttcgccagtcgcctctccagctcgggatagaggttttcgataatcgcttcgcactccggccattcatggatatcttccgctaaggtgcgctccacgcccaccgatttacgctgccgatcgttatgaatttcccgctcatcaatcccgtggctgcgctcccacagaatacgcccgaatttaccgaagcgcttaagcagcatggccagatcgctgttctgcacatcgccacaggttcgcaggcccatattttccagcttcgctgccgataccttcccgacgccgggtattttcgccagcggcagcgcccgcacaaactctgccacctgatggggggcgataacgaactggccgttgggtttattcatatctgaagcgattttagcgagaaacttcaccggcgccacccccgccgaggcggtgaggcgcaactcccgttcgatggtctggcggatctcctgggctatcagggtggctgacccgtgacaatgctcgctgtcgctgacgtcaagataggcttcatccagcgacagcggctcaatgcgcgaggtatagcgggagaaaatttcgcggatatggttcgaggcttctttgtaggcatcgaagcggccgggaagcaacgtgagatgcgggcacagcttgagcgccgtcgccgtcggcatggcgctgcgcacaccaaacttacgcgcaggatagttcgcggtactaatcacgccacgttgtacccgactgccgcctatcgcgaggggaatatcgcgcaacgctgggttgtcgcgcatctccaccgccgcaaagaaacagtccatatcgacatggataattttacgcatcgtcagactcaacactgtatacccatacagcatagcaaaaacagatgcgaattttatgctttttttatttcatcggctaaaaaagcggttaaaacataaaactgcaataaattatgtttattttcattgagttaaaagataaatcaggaagatataatcatgaagaaaatacttaccgcgctttgcctgctggccaccgccagcgcctgggccgctccacagctgatagcccaccgcggcggcaccggcgatgcgccggaaaataccctgccggccattaagctggcgctggagaataacgccgaagccatctgggtcacggtgcagttaagccgcgacggcgtaccggtgctctaccggtcaagcgatctttccgcattgaccaatagcgagggcaaagtttccagtttgaccgccgccgagctggcgaaagtcgacgccggctggaaatggggggatgacagccacccgtggcgcggtaagcaggccaccattccgaccttgcaaagcgttttacagcaatggccgcacacttttttctatatcgatatcaaatctccggatgccgatccgaccgtgatgggccagcgcctgcttgaagtgttaaaaaccaccgatagcctcgatcgcgtgcgggtctattccaccgaagaccgctatatcgccgccctgccgccagccatccctcgctttgtcactcgcagtgaaacccgcaccaggcttgccaatatttcgctcagccatcagtgccagccagcgagtcaacgcgatggtgagcagtggtatggactggagctgaagcgcaaagtcgaggtggtggagaaattcacccttggcgaagggatctccccggcgacgctcacctgggataaagaggcaatggattgcttccgctcgcaggataaagcgcacattatcttcttcggcatcaacagtgcggaagactaccgcacggcgatagaactgggcgccgacggggtgatggtggattctccggcgcaggcgaaaagctggcagtaagggagtcaacggctaaaaaagccgcgaaagcggcctcacattgctggcatgttgttgccgggtggcggttggcgccttacccggcctacaaaaccgaagcagcagccccggcatgcgcagcgccgccgggcacggagccgctttatgccgggtggcggctggcgccttacccggcctacaaaaccgaagcagctgacccggcaagcgcagcgccgccgggcacggagccgctttatgccgggtggcggctggcgccttacccggcctacaaaactgaagcagcaggtccggcatgcgcagcgccgccgggcattacaaaatacgccgctgctgacgctgcgcctcgcgggcgaggcgctttttacgcgcgtcgcacggttccggacaatcgcagactttctccagccccagcgcggagatcccaccgcagctgccctggatgctcttgcgcttcaccaggtagcccagcgacatgccgaggatcaccagcgcaaaaatcacaaaggtcgcgataaataccgtcagcatcgtcagcctccaaagtcgtcgaggagaatattctcgtcctcgacgcccagatctttgagcatcttaattaccgcggcgttcattaccggcggcccacacatatagaactcgcagtcttccggcgccgggtgatcgcgtagatagttctcgtacagaacgttatggataaagccggtatgcccggtccagttatcttccggcagcggatcggagagcgcgacgtggaaggtaaagtttggattgtcgcgcgccagctgttcaaactcctcatcgtagaacatttcgcgcagcgaacgggcgccgtaccagaagctgattttgcgcgtgctgtgcaggcgcttgagctggtcgaaaatatgcgaacgcatcggcgccatcccggcgccgccgccgataaacaccatctcggcgtcggtttctttagcaaagaactcgccaaacggcccggaaatcgtcaccttatcgcccggcttcagcgaccagatataggatgacatgatccccggcggcgcatccgggaccttcggcggcggcgtcgcgatgcgcacgttgagcataatgatgcccttctcttccggatagttagccattgagtaggcgcgcagggtcggctctttcacctcagagacatagcgaaacaggttgaacttatcccagtctgaacggtattcatcgggaacatcaaaatctgcataggccactttatgcggcgggcattcaatctgaatatagcccccggcgcgaaacggcaccacctccccctccgggatccgcagcttgagctctttaatgaaagtggctttgttatcgttagagataacttcacactcccattttttgacgccgaaaatctcttccggcagttcaatcttcatgttctgcttcaccgccacctgacaggccagacggcaaccggctttggcatcccgcttggtaatatgcgaaagctcggtcggcaggatatccccgccgccctctttaacagttacccgacactggccgcaggagccgccgccgccgcaggcggaggagacgaagatcccgttgctggacagcgtgttcagcagtttgtcacccgccggggtgcggatctgtttatccgcttcgttattgatctcaataaccacgtcgcccgcgttcaccagctttgagcgcgctgccaggataagccccgacagcaccagcacaatcagcgtgaacatcacgacgccaagaataatttccatacttattcgcccttatagctgcacgccggagaaggacataaagcccagcgccattagtccggtggtgataaaggtgatccctaacccgcgcaaaccggcgggcacgttggcgtacttcattttttcgcggatccccgccatcgccacgatcgccagcatccagccaataccggagccgaagccgtagacgatggactccgggaagttgtaatcgcgctgcaccatgaacgacacgccgccgaaaatcgcacagttaaccgcaatcagcggcaggaagatgcccagcgcgttgtacagtgccggaaaatacttatcgaggatcatctcgaggatctgcaccagcgcggcgatcactccgataaaggtgatgaagttaagaaagctgagatccaccccctcaaccagcgcgccgtcgcgcagcaccaggttatagaccaggttattgattggcacggcaagccccagcactaccgtcaccgcgacgccgaggccgaaggcggtggagacctttttcgacaccgcaagaaaggtgcacatcccgaggaagaaggccagcgccatgttctcaacgaacaccgcgcggacaaacaggctgatgtaatgagccatcaccgattactccttttcctgctgctcaggcttccagctacgcagggcccagatcagcaaaccgataatgaagaacgcgctcggcgccagcaggaacaggccgttcggctgataccagccgccgttctgcaccgtctccagcaccgtgataccgaacagcttgccgctaccgataagctcgcgcaggaagccgacgataatcaggatcgcgccatagccgagaccgttgccaataccatccataaagctcgccagcggcggcgacttcatggcgtaggcttcggcgcggcccatcacgatgcagttggtgatgataagcccgacgaataccgacagctgtttggaggtctcataggcgaaagcccgcagcagctgatccaccacgatcaccagcgaggcgatgatcgccatctgcacgatgatgcgcacgctattgggaatatggtggcggatcatcgagataaacatgctggagaacgccgtcaccagggtcaccgcaatggtcatcacgaaggcggtttccagtttggtggttaccgccagtgcggagcagacgcccagcacctgcagggcgatggggttattggcgatgagcggccccaccagcacgcgcttcacctctttcatatcgctctgttcagccattattcagctctccctcacgaacctttttcaggaacggaccaaagcccagttcgcccatccagaaatcaaagctatgctgtacgccattggacgtcagcgtggcgccggataaaccgtcaaccgcgtggagatcgcctgcgcgcgcgccgcctttcaccaccttcagcgccggcatgccgttgtcatccagcacctgcttgccgacaaactgctggcgccagttcgggttttccacctcgccgcccagccccggcgtttcgccctgatcgtagtaagtaatgccttttaccgtgcggccatcgacgtccagcgccacgaaggcatacatcatcgaccacaggccgttgccataaatgggcagcaccaactgctcaatcttctgctgcgcgtcgcgcaccaggtaaatttccgccagattactgcgtcgctttataccagccggatcctgactggcatccagggccatactctgctgcggatccttcagcgcctgagcctgattaaatttacccgggtctttctccagcagttcgccggtggccagattcaccagtcgcggggtaatgcgcgccgcgaaggtgtccgctaccgcatccgcatccatatcggggtgcatcagccctgacactgccaggatattgcgctgcttatccaatgcccgctgcgcctgctggcgggatttcagccccacggccgagcccgccaccacgatggagcagaccagacaaagcaccagcaccaccagcagcgttttgccgatgctatcgttacttttcttctcagccacgcgacttcctccgcttaatattggcctgcaccaccagataatcgaacagcggtgcgaagaggttggcgaagaggatcgccagcatcatcccttccggataagccgggttcaccacgcggatcagcacgcacatcacgccgatcagcacgccgtaactccatttccctttatcggtaaacgaggcggataccgggtccgtcgccataaacatcatcccgaaggcgaaaccgccgagcaccagatgccagtaccatggcatagcgaacatcgggttggtgtcggagccgataacgttaaacagggtggcggtggcgatcatgccgatcattaccccggcgacgatgcgccaggacgcgacgcggccaaagaggatgatcgccccgccgatgaagatcatcagcgttgacacttcgccaattgagccgggaatattgccgaggaaggcgtccatccagctcaccggcacgccagtcgccacgttcaccagcgcttcaccgccgccgctggcccactgggagagcggcgtggcgccggagaaaccgtccgccgcggtccatacgaggtcgccggaaatctgcgccggataggcgaagaacaggaacgcgcgccccgccagcgccgggttgaggaagttgcgcccggtgccgccgaaaatctctttggcgatcaccacgccgaaggagatccccagcgccgcctgccacagcggcagcgtgggcggcacaatcaacgcgaagagaatagaggtaacgaaaaaaccttcgttaatctcatgcttgcgcacaatcgcgaacagcacttcccagaagccaccgacgataaaaacggtgatatagatcggcaggaagaagaccgcgcccagggtcatcatgctcagccagccggcgtcggcactgaagctcacccctaaccactgggcgacgctgtagtgccagttgttggcgatcgcctgctgcagctgttcggcgccgtatagcttgtgcagcgccggaatggtctgcagcccaacgttgtacatgccccagaacatcgccgggaatacggcaaaccacacgaggatcatcatccgcttcaggtcgatggcgtcgcgcacgtgcgccgcgccgcgggttacctggcccggcgtgtagaagatggtcgccgccgcctcatacagcgggtaatatttttccagcttgccgccatgcgtgaaatgcggctcaagtttctcaatcaggtgctttaagcccatctcttatccttcctgctcaatccgggttaacacgctgcgcagcgccgggccatattcatactttccagggcaaacataggtgcacagcgccagatcttcttcatccagctccagacagcccagcgcctgagcgctgtcggtgtctccggccagcagatcgcgcagcagtatggtcggcaggatatccagaggcatcacccgctcgtagttgccgatcggcaccatcgcccgctcgccgccgttggtatcggtggaaaaatgaaagcgcttgcgcttgaagaaatggcccagcgtggtgcgggtaatcgagaatttctctttgcccggcatcacccagccgaagagctctttttcccgcccttctttgaccacgctcacctgcagatggaagcgccccaggaaggcgtgagggccatgggcgcgggtgccgctaagcaccgagccggaaatgaccctgttttccccctcctgcaactcacctgccagcagatcctccaggctggcgccgagcgtcgttttgaccagccgcggagatgttacctgcgggccgccgagcgcaattatccgttcgcagtagagctccccgtcgaggaaaagcttaccaatggcgatcgcgtcctgataattgaggtgccagacctgcttattcaggctcaccggctccagaaagtgaatatgcgttcccggcagccccgccgggtgcggcccgctgaactgattgaaacagacctggccgagaggatgaccgcccagcttgccgccgctgggctggcagacgtgcactttcccgtcggtcaagcgcgtgagcacggtaagaccggcgtcgaaggcggcacgttcggccagaataatcggctgcggctccgccgccagcggattggtgtccatggcgttaacaaagatagcggcgggcgtgctccccgggagcggcgttttgctgaacggtcgggtacgcagcgccgtccattggcccgacgccagcagctgctgctgtacggtgtcgcgcggcagttcggccagcgcgtccgcggcgtaacgggtaaacgccaccgcgtcattgccctcgatatcaatcaccaccgactgcaacacgcgccgttcgccgcggtggatcgcgctgacgatcccgctcgccggggcggtaaagcagacgccagggatctttttatcttcgaacaggatctgaccttttttgacccgatcgccttctttaaccgccatcgcggggcgcatgccaacgtactcttcgccgagtagcgcgacgcgcttcaccgctggcgcgggagaaatctgctgtaatggcatgccagctatgggcaaatccagccctttcgtgattttaatcatatcgttagcaggtatccgtaacctcaaccccgacgcaggtcagggccagcttattgacagaatggcagagaagaaagggcgaaacggcgccagtagcgctcaggacggaagagaagcatcctttcttactctgatgatgaaccggcgcaagtgtaacatttcgtgagcggcggctgtagcgcaaggggcgataagtgcttctaaaatgcgagctattgcgcaaagttctcactgtgttttcgtcgctggcagggtataaagtgaggctgatttgtaaacgccgccacgtcgcccttgcgaaaaaatgccgtgatgctaatgtgagcgctctaaatccagaaaactctgatttcgggtctctcttgccgtcctggcaatgtggctattttgttttatcaaggaacaagcagtatgcgcaaaatcgcattatttattgcgatgcttctgttgccgtgcgtgtcatttgccgggctgctcagcagcaacagcccgacgacgccggttagcaaagaatataagcagcaattaatgggttcaccggtttacattgagatcttcaaagaagagcgcatgctcgacctttacgtcaaaatgggtgaaacctaccagctcctcgacagctaccggatctgcaactactccggtggcctcggtccgaaacagcgccagggcgatttcaagagtccggaagggttctataacgtcacccgcagccagctcaaacccgacagccgcttctataaagcgattaacatcggcttcccgaacgcctacgatcgcgcccatggttatgaagggaaatacctgatgatccacggcgactgcgtctcagtcggctgctacgccatgaccgacagcggtatcgatgagatcttccagttcgtgaccggcgccttagtcttcggccagccaagcgtgcaggtgagtatctatccgttccgcatgaccaacgctaacatggaacgccacaaatactcctactacgcggatttctggaaacagctcaagccaggctatgactatttccagcagacccacaaaccgccggtcgtatcagtgaccgacggccgctatgtggtgagcaagccgctcagccacgaagttgtccagccgcagctggcctcaaactacacgctccccgagacaaaataacgcccactcgcctggcatgatcttatgccaggtttcattggccgtcagcggctgcgtggcgataaccgtgaccacatcgttgggtgtggtctcgcgttgaaagtcgatctccacatcctggtccagcagttttgccacgccgaacggcgctcgccgggtgatccagtgcagattggtcgagcagaacgccattacgtagcgcccgtccgacagcagcatgttgaacacccctttctcacgtagttcacccgcgagggtggcgatatacttgaaaacgcccagcatattgcccggcgtgcgcggatagcgctcggttaaacggtgcagcagccagcaaaacgctttttcactgtcggtttcacctaccggatgaaaattaccggttttcagcgacttatagccttttagctgcccattgtgcgcataggtccagttgcgcccccacagttcgcgggtgaagggatgggtgttctccagggccaccctcccgcggttggcctgacgaatatgggcgacgacggaacaggacttaatggggtaatcctgaaccagtttcgcgatcggcgactgaaagctcggctggggatccttgaatgtgcgacagcctttaccttcatagaaggtgatgccccagccgtctttatgcggccccgtcccgccgccgcgctgcaccagcccggtaaagctaaaacagatatcggttggcacattggcgctcatcccgagcagttcgcacatagatcacctcaccctcacaaatcacgacggcgccggagcgaggccaccgtcaacagtacacactcacctgcctgttagcctttcgccatctctttttcgatcagcataatcagaatgtggatcactttgatatggatctcctggatgcggtcggcgtagccaaagtgcggcacgcgaatttccacatcagcgctaccggccattttaccgccgtctttaccggtcagggtgatcactttcatcccctgcgcccgcgcggcctcaatggccttaatcacgttgccggagttgccagacgtggagataccgagcagcacatcgcctgcgcggccaacggattcaacgtagcgggagaacacatactcatagccaaaatcattgctcacgcaggagaggtggctgacgtcggagatcgcgatggccgggtaacccgggcggttttcgcgataacgtccggtcagctcttccgcaaaatgcatcgcatcgcaatgggaaccgccgttaccgcaggacagcactttcccacccgccttaaagctatccgccagcaggacagcggcacgctggatagcatggatattggcttcgtcctgcagaaagttagccagcgtttccgcggcttcgttcagttcgttacgaataagatcctggtacatgaggataatccttcagtatgagtggaataaccccggcagtgtaccggatagccgtcgaagcgagaagcagcaggcagcgttatccctcgctcttttgattttatgtgccgcttttgcatacaacaatgtgagcaaggttgtaattattttgtaaacacattgctaaataaaaacgcatgcactacaaccaatacatcacaagtggtcagacctcctacaagctcagggagcatttctctatgatgattttgagtattgttgcaaccgtcgttttactcggcgcgctcttctatcaccgggtcagcctgctgctcagcagcgtgattttgctcgcctggaccgcggcgctcggcgcggccggagtgtggaatatctggctgctactgccgctggcgatcatactgttgccgtttaactttgcgcctatgcgtaaatccatgatttccgcaccggcgtttcgcacattccgcaaggtgatgccgccgatgtcgcgcacggaaaaagaagccatcgacgccggcaccacctggtgggaaggcgatctgtttcgcggcaatcctgactggcaaaagttacataactatccgcagccgcggctgaccgccgaagagcaagctttcctcgacggcccagttgaagaagcctgccggatggctaacgacttcgccatcacccacgaaatggccgatttgccgccggagctgtgggcctatctgaaagagcaccgcttcttcgcgatgatcattaagaaagagtatggcggacttgagttctccgcttacgctcaggcacgagtactgcagaaactctctggcgtctccggcatcctggcgatcaccgtcggcgtcccgaactcgctgggtccgggcgaactgctgcagcattacggtaccgaagaacagaagaatcattatctgccgcgtctggcacgcggcctggaaatcccttgcttcgctctcaccagcccggaagcgggctctgacgccggcgccatcccggataccggcgtggtgtgcatgggcgactggcagggtcaacaggtgctggggatgcgcctgacctggaacaaacgttatatcacgctggcgcctatcgccaccgtgctggggctggctttcaaactctctgacccggatcgtttgctgggcggagaagaagagctgggtatcacctgcgcgctgatccccacctccaccccgggcgtggaaatcggccgtcgccacttcccgctgaacgtgccgttccagaacggtccaacccgcggcaaagatatcttcgtgcctatcgattacatcatcggcggcccaagcatggccggtcagggctggcgcatgttggttgaatgtctatcggtcggccgcggtattactctgccgtccaacgccaccggtggtctgaaatccgttgccatggcgactggcgcttacgcccatattcgccgccagttcaaaatctccatcggcaaaatggaagggattgaagaggcgctggcgcgtatcgccggtaacgcctatgtgatggacgctgcggcgtcgctgatcacctacggcatcatgctcggcgagaaacctgcagtgctgtccgctatcgtgaaatatcactgcacccaccgcggccagcgctccattatcgacgcgatggatattaccggcgggaaaggcattatgctgggcgaaggcaacttcctcgcccgggcctatcagggcgcgcctatcgccatcaccgtggaaggcgcaaacattttgacccgcagcatgatgatcttcggtcagggggcgattcgctgccatccgtacgtactggaggagatggccgccgcgcagaataatgacctgaacgcctatgacaagctgctgttcaaacacatcggccatgtcggcagtaataaagtgcggagtttctggctgggcctgaccggcgggcgcaccagcagcgcgccgacccgtgacgccacccgtcgctactatcagcaaatgaaccgtctgagcgccaacctggcactgctgtcagacgtctcaatggcggtgctcggcggcagcctcaagcgacgcgaacgtatctccgcccgtctgggggatgtgttaagccagctgtacctggcctcggcggtgctgaaacgctatgacgatgaaggacgcaatgaagccgatctgccgctggttcactggggggtacaggacgcgctgcaccaggccgagcaagccattgacgatctgttggacaatttcccgaaccgtctggtggcaggcgtaatgcgcctggtcatcttcccgaccggccgtcatcatcatgcgccgtcggataggctggaccaccaggtcgccaaaattctgcaggtgcccagcgccacgcgctcccgcatcggccgcggtcagtatctgacgccgagcgagcataacccggtaggcctgctggaagaggccctgctggaagtgatggcggccgatcctatccaccagcggatctgcaaagagttgggtaaaaatctgccgttcacccgtctggatgagctggcccacaacgcgctggccaaaggattaatcagtcaggatgaggccgccattcttacccgtgcagagcatagccgtctgcgcagcattaacgtcgacgactttgcgccagaggagctggcgacaaagccggtaaagctgccggaaaaagttcgtaaagttgaagctgcataataaaaccactaccacatcacacgccgggcggggaactttccccgccttttttcgccctctcctcccctttcgtttccatcagtagcatttttttaacaaaatattccgcggaccgccgcgcggctgatatggtgttacagttaacctaaccccctcatgagaatggagttgaccattgtgcctggcctgaaaatttcgctgttgcaacaaccgctggtctggatggacggccctgccaacctgcgccattttgatcgccaactggaaggaatcaccgggcgcgatgtgattgttttaccagagatgtttaccagcggctttgccatggaagcggcaaaacagtctttacccgaggccgacgtggtggagtggatgcatgcccgggctgcgcaatcccaggcgctgattgccggcagcgctgcgctgcaaactgaacacggcgctgttaaccgcttcctgctggtcgagcctgacggtacggtgcaccattatgataaacggcacctgttccgtatggccgatgaacatcatcactatgaggccggaaaccagcgcgtggtctttgaatggcgtggatggcggatcctgccgctggtctgttacgacctgcgctttccggtatggtcgcgtaatcagaacgactatgatttggcgctgtatgtcgccaactggccggcgccacgctcgctgcactggcagtcgctgctgatcgcccgcgcgattgaaaaccaggcctatgtcgccggctgtaaccgggttggcactgacggcaacggccatcattaccgcggcgatagtcggattatcaatccccagggggagattatcgccaccgccgatccgcatcaggccactcgtcttgatgccgagctgtcgctgagcgcccttcaggaatatcgtgaaaaattccccgcctggcgcgatgccgatcctttcacgatcggctaatcacccttcgggagccgctgcgctccctttttattccaccacgatccgcacagcacagtagaccaataacgcagccagcatccagttcagttgccgcccgtacagcaaaaacaggcgttgaaacagatgccccgccagcgcccggcacagatttcccagtgcgccaatcgccgccagcagcagactcacgctgataagccaaacaggctcgcgagtaacgggcagaacaaaggtagaaagcgcggtgatgccatacagaataattttaacgttgacgaactgtagccccagactcgcccaaaagcctaccggttctacactcggcatccctgtcgccggtttgcttttggcaatctgccaggccagccacaggatgtacgccgcgccaatccatcccaataccagggtaaagcgtgagtcgagttcaaccagcgaaaaggttaaagccgcgcaaatcaacatagtgataataaacccgacgctcatcccggccagcacccgcaggctgcggcgtagaccatgggaggtgacgctgctcagcgccaggatattgttgggcccgggtgtcagggcggtgatcaaagtgtaagttaaaaaggcgctaatcagggtaggtgtcacgggttttctcctcttgtctggcagacactacccgaagctgataatttaaaaaaatgaatattttttcattctcgcttcgataacatcgatacaaagaggaaatatggatctgcgacgcttcatcaccttcaaaactgttgtcgaagaaggttcctttctgcgcgcggcgcagaaactatgctgcactcagtccaccgtgacttttcatatccagcagctggagcaggagcttgccatcccgctgtttgagaaaatcggccggcggatgtgtctcaccgccgccggtaagaagctcctgccgcatgtctacgacctgactaaagtgatggcctcgattcgtcaggcggcacgccaggacgatgagcccggcggcgaacttcgcgtcgccactggcgaaacgctgctggcgtataaaatgccgcgggtgctgcagcgttttaagcaacgcgctccgaaagtgcgcctgtcgctgcagtcgctcaactgctacagcatccgcgatgcgctgcttgccgacgaggtcgatttgggtgtgttttaccgggtgggtaacgatgacgcgctcacgataatggagcttggccagcagtcgctgacgctggtcgcatcggtcgagcaggcgccggtagacttcatgcgcccgcggcagcatatcccgctgagctttatcatcaacgaaccccagtgcgtgttccggcagatttttgaaagcaccctgcgccagcgcgaaattactctggagaacaccattgagctgtggagtattgagagtatcaagcagtgcgtggcgggaaatctgggagtgagttttctgccacgctttgcggtggaggacgagctcaagcgcgggacgctggttgagctgccattcagcgagacgccgttgacgatccatgcgctctgcgcccaccatgccgggaaggctatcagtccggcgatgcgggtatttatgcagtgcatgcaggaggaacaagaggcgcgctgaaattcggcgacgaaaacgacgaaagcctgaatcattgctgactcaggctttctgaatagtggcggaacggacgggactcgaacccgcgaccccctgcgtgacaggcaggtattctaaccgactgaactaccgctccgcgttgttgttccgttgggaacgaggcgaatattacggattcccctctaccccgtcaacgctttttctaccattttgaatcgtttgctgcaaaaatcacccaaccgcctatttttaattcattttagtggctatcaggcacgccacaggcagcttccgcctttcttttgtaccaagtcgaggcgggattcatggttcgccagttcttcatctgaggcataaaccacgcgtaactgactgccggcgcggacgacgcgctgaattcccatctctcccgcctgctgctggctttcgccttccatagagaacgccatcgaagtctggccgccggtcatcatcaaatagacatcggcaaggatctgggcatcgagcaacgccccgtgcagcgtacgcttgctgttgtctatttcgtaacgcgaacatagcgcatcgaggctgttgcgcttgcctggaaacattttccgcgccagcgccaaactgtcggtgattttacaaaaggtctcggtttttccgatgccgcggtttagcttactgaattcataatccataaagccgatatcgaacgaggcgttatggatcaccagctccgcgccgcggatgtaatccataaactcatcagccacgtcggcaaaggtaggtttatccagcaggaactcatcggcgatcccgtgtacgccgaatgcttcaggatccaccagccgatcgggcttcagatagacgtgaaaattgttaccggtcaggcggcggttgatcacctccacggcgccgatctcaatgatcttgtgtccctcgtagtgtgccccgatctggttcataccggtggtttcggtatcgagaacaatctggcgcgtaattgcagtgctcatagcggtcatttatgtcagacttatcgtttacaaatcgatttcaattacaggaagtctaccagagatgctcaaacaggtagaaattttcaccgacggctcttgcctgggtaatccaggacctggcggctacggcgccatcatgcgctaccgccagcacgaaaaaaccttcagcgctggctaccgtctgaccaccaataaccgcatggaactgatggcggcaattgttgccctggaagcgttaaaagagcattgcgaagtggtgctcagcactgacagccagtatgttcgtcaggggatcacccagtggatccacaactggaaaaagcgcggctggaaaacggcagagaaaaagccggtgaaaaatgtcgacctctggcagcggctggacgccgcgcttggccagcataaaattaaatgggaatgggtaaagggccacgccggccatcctgaaaatgaacgctgcgacgagctggcgcgcgcggcggcctcccaccccacactggacgatgtcggctacctgcctgagagttaattctgccctttgcgccactgccgggtggcgcccaccgccggccgcagctgagttttcgctttgccggatttcatcggattgagcgtcagcggaatggtccgtttgcgggcgacaatcaattgcaaacagcccagcgccggcagatgggtgctcaacaatttgccgccatggcgcgaccagggcaaaacctggtaacgtccatagtgcagcacttcaaagttgagcagcgccagccagtccagctggcgcatcagcgtaaacatacggctattataaggcgttcctttgcgcaggaccggcaccagcttacgcaaccccatcaggctgaccggattaaacccggtcaggatcatccagccatcatcgatcagtacacgatcggcttcccgcagcagacgatgcggatcgctacaccacggcagggtgtgcgccagcaggcaggcgtcaacggacttttcggcaaagggtaaatgcagcgggtcagcccggacctgcattggatttcccgccagcgagacattcacctggtgcgagatggcgcaagcttcggtattgatttccgcgctcagattgccaatcttaagcagatgaaagccatataatttagccagccacggtttcatctgctgctccagcgtttcgcgatagtattcgccccacggcatactggaccaatgctcaggcgctgtcactgtgtgaggtatccttgccggcttcattgccaccttccgctacgctttagaggtaatttatgaatcttatcagtattcccgcgtttcaggacaactacatctgggttctcagtgagaataacggcccctgcatcatcgtagatccaggcgaagccgcgccggttctggcggccatcgaggaaaaccagtggcagcccgaggctattttattgacccatcatcatcaggatcacgtcggcggcgtaaaacaattacgtgaaaaattcccttctatagtggtttacgggccggcggaaacccaggataaaggcgtcactcaggtggtaggcgatggcgatcggctgtcaattctcgggcacgatttttccattttctctacgccaggtcacacattaggacatatctgttactacagcgaaccttatctgttctgtggcgatacgatgttttccggcggctgcggaaggctgttcgaaggtacagcagagcagatgtatcaatcatttatgaaaattaatgcccttcctgaagaaaccctcatatgttgcgcacatgaatatacgttagcgaatatgaagtttgcattgagtatcctgccagatgatagggacataaacgattactatcataaagttaatgagttacgtgcaaaaaaacaaaaaacactacccgtaactctgaaaaatgagcggcgtataaatttatttttacgcgtaaatgatattgatttaattgacaaaattaacaaagaaacaaatttgcaacactctgtggcgcgatttgcatggttaaggtcaaagaaagatgacttctgatatttaattcttgtcatcggccaacttcgccgttatccttggtcgtcttttaagcaactattgacacacacatgaaggcacgagcgatattactcgcctctgtcctgctggtggggtgccaggcgtctaagcacgatggcaccgtcgaacagcgagcacagagcctttctgcggctggtcaaggggaagcaggcaagttcacaagtcaagcgcgctggttagatgatggaaccttctacgcgcaagaccaggatctgtggacttccataggcgacgagctaaagatgggaataccggataatccccggattcgcgaacagaaacagaagtacttaagaaataagagctatctccacgatgtaactttacgggcagagccgtatatgtactggatagccgggcaggttaagaaacgtaacatgccaatggaactggtattactacccatagtggagagcgcttttgacccacacgcgacgtctggcgccaatgccgcaggcatttggcagatcattccgagcacagggcgcaattatggtttaaaacagacccgcagttacgatgcgcgtcgtgatgtcgtcgcgtctactaccgcggcgctggacatgatgcaacgtctgaacaaaatgttcgacggcgactggttgttaacggtcgcagcctataacagcggcgaaggccgggtcatgaaggcagtaaaagcgaaccgttcgcgtggcaaacccaccgatttctggtcgctgtctctgccgcatgaaacgaaaatctacgtcccgaaaatgctggcattgagcgacattctcaaaaacagcaaacgttacggcgtaaagctgcctacggctgatgaaagccgtgcgctggcgcgcgttcgcctcgacagtccggttgatatttctcagctcgcggacatggccggtatgccggtcagcaagctgaagacgttcaatgcgggcgtaaaagggtcaacgctgggcgcgagcgggccaaagtacgtcatggtgccgcagaagcacgccgcacagctgcgtgaatcgctggcctctggcgacattgccgccgtgcagccgacgcagctcgcggacaatacgccgctaaccagccgtagctataaggtgcgttccggcgacaccatttccgggattgcttcccgtcttggtgtgacgacccgcgatctgcagcagtggaataacctgcgcggctctggattaaaggttgggcagaatctggttattggcgcaggcagcagcgcccagcgtctggcgaacaacagcgatagcatcacctatcgcgttcgtaaaggcgattcgctgtcgagcatcgccaaacgtcacggcgttaatattcgcgacgtgatgcgctggaacagcgataccgacaacctgcgcccaggcgatcagctaacgttgtttgtgaaaaacagcgatcgaccagagtcctgatacctctggttcgacaaaaaggcaccgacttccccggtgccttttttgttgcctaaattaaaccgctttatgcgcttcgaacagaatggtatcgctggtaaacgatccgtcctcctgtaactcgaagtacgctttgacctccgccgaagcgctctgctgatataagcgaatcgcctccaccagcggctcaggagtacgcatccgcgccacccatgaactgaactccagcggcaggcgatcggtcaacaactggttaaccaccagccccgcttcagtcgccagcgtcaaccactcgccgctggaataattacgcacatgcgaggtgtcgcgcagggcttccaccgtctgcagccagacatcacgtaccggatgacccggcgacatcacgtccatcacgataatcaccccgcccggcttgagaacacgtttcacctcacgcagcgcctggccaacgtcatgccagtggtgagcagagtagcggctaatcaccacatcaaagctggcatcagcgaacggcagcgtttcggcgtacccctgctgggtcacgatattgctaaaacctttctcctttgccgcggcggcaacgacctccagcatctggctcgataaatcataggcggtcacctcggcaacctgtcccgccgcggtaaagctggcgtgccctgccccgcagcccatatccagcactttcgcctgaggaaaatcagccagccgttccgccagccgctgcagatcgcgaccagaggcgtgtacggcgctggtcagataggcgctggcctgggagccgaactgcttttcgacgttgtcatggtgagagcgtgttgtcatgttgtcttgtccttacggttttttttgagtaataaaaggcagcaccatgcatgcgcaggcctgccccatggcaggcctgaccaaccttaaattaatcaggcttgccgggactgaattcgactagtagcgggttgtggtcggaggcgcgggtcaccagcacggaagcatcgtgcacgcttaacccacggtagaacacaaaatcgaggggacgaccaaacgcgcggcggcgctgatcgtctgagaaacgaacttcgcgtaacgacatctcacgcgcaaagcggtacagcgcattcatccgcggccggctccaggcattgaagtcgccggccatgatcaccggcccgctgtgatgggcgatctgatcgccaattggcagcagctgtttgctgtagacgtcgacgccaaggctaaagttgacggcatggatattgactaccatcaacaaccgcgcatccggcagcggataaacggtcactaacgccgatttcggcaatcgcaaaataggctcgcgctcgcgcagcggacagcaatagatggggtgcgcggaggccagcgtcattacgccggaaggatgctgcggcaataccagcgccggcacctgatcggcggccagatagtttgaagtcgcgaaccggaccagttctggggtggtttgcgcctcctgcaacaggaccaaatgcgcatctttgccgaaatttttaaggaccgattgccactctgcgcgctgctgcttgaagatattccataccagcacgcggatcttctcatcgctgcttaatggcgtaccggcgggataaaccggacttacgcccgcaaacgcccccggaggcaatattctctccgcaggttgtccggcgacatagcgcatggcgtaggtgttctttcgcaatttgggcattaatcctcgataacagaaaccagcccgacgacgactggttattctgttatagggattttcccatacactttcaatgcaaattgcgagaaacccttagccttcgggagaaagcgctgccgaacggcgtggcaatttatctaaacgtccgctcaggaccaccaacagcaaagcgaccagcacaatcatcgcgccaatccacggcgtctgcgccagaccgtaccgttcgaccgtctgtccgccgacgatcgaccccagcgcgataccgatattgaaggcggcaatattcaggccggaagcgatgtcgacagcccccggggtatactgctctgctttttgcaccacatagacctgcagacccggcacgttgccgaaggcgaaaacgcccatcaccagcactgtcgccagcgcggcatagtgaacgctggcggtcagctggaagaccagcagcagtagcaccagcgcggcgaagataaacttcagcgcggagacggcgccatgcttatcggccagtttgccgccccacacgttacctatagccaccgagacaccatagcccagcaggatccagctcaccgctgacgggctgaagccggccagctcctgcatcatcggcgcaaggaaggtaaaagcggtaaacacgccgccatagcccagcgcggtaatggcgtagatcatcagcaggcgcggatgggttaatactctcagctgatcgcgcaggctggcgctggcgcggcccggaatattattcggcaccagaagcagactgctgattagcgcaatcaccccgagaatcgataccgcgaggaaggtttcccgccagccgaaatgctggccaataaaggtgccaaagggaacgccggtcaccagcgcgaccgtcaggccgccgaacataatggcgatggccgaggccgctttctcttttgccaccaggctggtagcaattgtcgagccaatagagaagaacacgccgtgtgccaggccggtcagcagtcgcgccaggatcagcgtttcatagcccggggcctgccaggccagcacattacccgccgtaaacaggaccatcaacgccagcagcagctgtttacgcggcatacgccccgttaacgccgtcagcaccggagcgccgatagctacgcccagcgcgtagatagagaccagcagtcctgcagaaggcaaagagatagagagttgctgggcgatggtcgggaccaggccgacaatcacaaattcagtggtgccaattgcgaaggcaccgatagttaaggcaaatagcgccagtggcataatttactccgtagcatcaggattaagatgacacgtagtatgaagggttgtataaataacaaaaactatcaaagtatcaatagaattttgctataggtgcaataatgagagccacatcagaggagatcgccatctttgtggcggtggtggaaagcgggagtttcagccgggcggccgagcagctcggacaggccaactccgccgtcagccgggcggtcaaaaagctggaatcaaagctaggcgtaagcctgctcaatcggaccacccgccagctcagcctgacagaagaaggcgagcgctattttcgccggatgcaggtggtcttgcaggaaatggcggcggcagagaacgatctgctggagacgcgcacgacgccgcggggcctgctgcgggtagatgccgcgacgccggtgatgctgcattttctcatgccgctggtgaagccatttcgcgaacgctacccggaaatgacgctgtcgctcgtctcgtctgagacgtttatcaatctgattgaacggaaagtggatgtggccattcgggccgggaccttaacggattccagcctgcgcgcccgaccgctgtttaccagctatcgtaagatcgtcgcctcgcccgactatgtcgcgcgctacggtatgccgcagcatccatccgatctgaaacagcatcactgcctcggcttcaccgagccggtatcgctgaatacctggccggtctcctgttgcgatggccagctgttagagatcgaagcggcggtgtcatccaatagcggcgaaacgctcaagcagctgtgcctgaccggcaacggtattgcctgcctgtcggattacatggtggataaagagattgccagcggagagtttgtcgagctactggccgataagcgcttaccggtggaaatgcctttcagtgccgtctattacagcgaccgggcggtcagcactcgcatcagggcatttattgattttctgagcgaccacgtaaaacagctcccgaaggagctgtcgtaataccttctcgggcggcagggcgaacggcataccggtagcgagtgattaatcccactgcggcgccagaccttccgggctcaccagccgatcgttgcaatccagcgcagcgatcgcctgtcgatcttcatcatccaactgcagatccagcgccttcaggttgctggccaggttatcacgcttcgtcgaggacgggatcaccgcgtacccctcgcccatcgcccatgccaggataacctgcgccggagtcgcattatgtttcgccgcgatacgggcaatcacttcatctttcagcgccttaccataagccagcgtcatgtaagaggtgatgtggatgccgtgctcacgtgcccagtcgacgactttacggttttgcagatacggcgagagttcaatctggttggtcgcaatgttttcagcgccaacggcggcaatcgcgcgctccatcagtggaatagtgaagttggagataccaatctgacgggtcagacccagcttcttcgcttccatcagggctgccataaactcttcaacggcaaccgcatcgttcggtgacggccagtggatgagcgtcaggtcaacatagtccgtgcgcagcttctgcagactttcttgcaggctggcgatgagtttgtctttgctcaggttctcgatccagattttggtagtgatgaacagctcatcacgcggcacgccgctttcggcgatagcctgacccaccgcggcttcgttgtcatagatttgcgcggtgtcgatagcacgatagcccagctccagcgcggtttttacggatgcgataacaacatcatctttcagacggaaggtgccaagaccaaatgcagggattgccatgattttcctcgttatttcttcatttcggttaacggatgaaattatggctgatggtgtggaggggaaaaagagcgattaatgcagaggatttttgctgaattagcaataatagagaacagatcaaacaaaaaagccctgagcaaatgctcagggctcttaataagtggcggaacggacgggactcgaacccgcgaccccctgcgtgacaggcaggtattctaaccgactgaactaccgctccaccgaatttcttcgctttattaccaccggttgtcaccccggctt

SEQ ID NO: 75 - DNA, 76927 bp, Unknown
  source: /note="Description of Unknown: MKP2_coc_1 Mutant Bacteria sequence"
acaattcccgccagcgtatggctgagcgcgcacttaacttacagtaaaggagtctccctatgggcacagcaattatggccgctggcactgatgcatcagcgtacgcaaataattatcttccgccggtcactggcccgctcgcctgggccaatctggaaagcgatctgctgccggcaggtcggcgccttaaaaacttcggtagcctcggaggtacctttgcgctgtccggtattgctcagctggtagcaaaaggtgttgcagcggcagcgggtacggaaagccgtctgacgctgggtacctttacgccggatgcttacaccttcatcgtgctggtcgacgtgggcccggatgcagggatactgcgtcaccgcaatattcgtatcagcacgaatgccagcaaaaagcttcagcgcgtcatggatgccggtacaagcgtttcggatatcactgcgcctgcaacgggcgcgttcgccgtattcctgtgtggtgacagcaccgggcatgcgtttggtattgtgacggcttcaggtattcagaaatccacctccacggcggtgaacagcgggacgactgccacctggatgggagggaccaatcaggcaggcctggcagcagcatgggcaggctatggttcggctttctatgaccgaaagctcagtgacagtgaaatggaacgggtggcagaacgccttattaaacgggcgcgttatctgggagtaacggtgaatggctgatttgtcgatttcggttatttcagaccaggcatctgagagcaatcaggcggggtggtggcatccccttgacagctttcagggagtggaatgttacgggctgtgtaaagagtacggtaccgccggttatcatcaggtcgaaatcgttcgccgtgatgccgatggtaccctcacgcggggaatgtgtaagaacgtcgacgggacggtcgcggaatttaacaatgacgtgggccataatcagccatctgtggttgtggacggtgcgggatatatccacgtgtttacgtcgatgcacgttaacctgctgcggtactttcgcagcgcgcgccctggcgacgtgtcgcaaatggtggatgcgaccctggactttccggatgtggactgggtctggacgtacccgatcaccggcagaggtccagatggtgatgtatattgtctgatgcgggtcgccagccggagcaccaccggggaaaataaacgcgggggtatcctttaccgctttgacgtcggcacgctgcgatggacccgttatgcgcatgtggctgaaacagccaaccgcgctatttacccggatgatatagccattaacgaggacggcgtccatcttctgtttcagtggtcggcctacccgtcttctgccgtccgccatgtcggggaatatggcgtcattggtaccgatggactgatgagaacgataaataacacgcccctgccaatgccggtaacgcagggacagctggcgtataagccattgcagccgggtgaaaacccggcgataagtgacgggctgaaaatggggattcagtctgcgaaatttgcgtttgatggcgaggggttgtcgcatatcacttaccgtttcagaaccgtggatgatccttccgggacctggttcagtaagttcggggtatacgttgcgacatgggctgggtctgcgtggagcgaacagcagatcgcgtatgtcccgccggagaggggaaacacttccgcagcactggcggcaaccgttcaggggggcaagcagagggtgtatttttcggtggaatacacgtcttccgggaatactgtcgctgtcattgtcctggcggaaaatgcaggttctggatgggtctactcggtactcggcaacagcgctcccacacttctgcgcctgggtgctgcaccaggaaacggcggtgacgtgctttacgtctcggcaccgtttgaggctaaggtgtatcgctattttgtgccggaagattattccccggctcagcaattcacgagttttgatgtactgctgtcgactctggtgtaattaaaatcatcccccggcagtctccgggggtatggttaactaaaccttcccgacacagccgccatctcctccgcaatgacctgcagcgctgttttgctgaccagagtcagatcgtcaattcgcgcacggtaaaagcgacctgcaaagggtgtggtatccgccaggtttgaaccaatgccattcaggttgatagtcgccgtcggataggcaattttccccgtccagacgccctcataagcaaggaccccatccagataaaccagccccttttgctgcgtgccatcagccgactcctgatagcggacgctcaggcagtgcagattgccgtcggccagactgccgatgtaatccttaatgctgtagttaatgccacgcacgcacaccgtcagcgccgtgatcaccccagccgtgatggtaggatagacctgaatcagccggttagcggtagtggcgtaactggttgccccaatccccacccagacattactgaaaccatcagcgccagcattcgccggatcgattttcagccagaacgtatgcatgtagtctttcatggccgctgtcggaataaaccccgcaggcaggcgcaggtactggcgcgacgttttatcgaaaaccagcccaccggaagtgctgtcaaagttcagagctaccgaacccacgctggccgggtcatccagaaagcacagatttttgagctgggcaccgggagccaggttcttcgcccctcctgcccagttatgtttcacatcgatcattcccagcgtaccggcattgatggacgggaaataatataattttgacccggtgtcgttcacccagtcggtgctctgttcgaccttacccattatttaacccatcctttatgtttgagaaactggcaaacgaaatttgcgttgacttctgccccgacgtacagcgcgccactcatcagcgtctgtgacggatgcagcgtgtcgtatttcagggaagcaggtgtggtgtcgtcggcgatattctgcacatcggttgcattcgccgggttgtagtggtttttgaagttctgcagcagatcaacgccatcaatttcacagtagtactccggaaaggccgcttttagccctgcgtttatggcatggatacgctgatagccagcagaaccgcgagtttcatcaccgcgggtaaactgagggcagatacacggcagcgcaccaagcggcttcaggtaactgacgatacttttgacgttattcaccacttcgctgacgctggttgtgttgttacgcccgcaggtcaggatcagaatggcctcatcgtgctcaggatacagtacgccagcagggcgattcttcttccacgtcatgagcgccctggcggaaatggagcgagatctgatagtggagaggacacgcgctggactggcggtagcaagagagcaggggcgtatcggcggatgtagccgggtaatgacccctgatgttgtcgattgggcaagccgaatgctggagagcagtgttaaccgataataggtctccaaggtgatcgacggatgtgtgaggactatttataaatatttcccggtcaccagtaaaaatcattgtgttgtgtcggtgtagttgatcgatagacgataactgtattgatctgtattcgagatgaaactactgtgtgtgcaaccagtattgactagggggctaccatgctcctttattcaaattgatgagattattacgaaaagaaataccatcctgagccaaaacatcgtgcacgtgcaagggagtgatttttaatttggtgttgaagtagcatatgacataaatttttatcttataatcgtttattttggtgagttatgcgtaagttttgcttacgcataattattatcagcgtatttattttctgattatctaactagcaatgaaatataatttagattaatatgttattttgcttcttaatagataaaataattctgcgtagttcacaccagattcaagccccctaaaggatgctaatctccttactgcatccaatgatatcagtgagttctctacatttgacatttgagactcatgcttaccaagtattgatatctttctctcaagatgtttacttatatctacataaatagatccagatgattgactccatgatcctgaatccccccagccagcaggtggatactcatatgctattacagacttgggtgaatcagcattttttgtggtcctggtggctgcgattgagcattcataaacccatttatgctcctgatggaatgaaggtacagggatgaaaataatatctggttttatattttcaataagtaagtcaatcgcatttacacatctacttttactggatgaacacaaatcaaaatcctcattatcattaattttatttatgatatgaagagtcgccccggcttcgagcatggcgtttgtaagttctttttttctcgtttcactgctaacatagataccatttctcacatgccactcacctttaattgttactacagcaatgtgaacttctatatcattttctaccgctcttgacattgctcctccgcagcctagctcagcatcatctgcgtgcgggcttataattaaccatttttttgatgtgaagaaatcaatcatttaattaaccccgctcattttaaataccactgccggtgtttttaataaaataaatagatcgaaatataaacatccttttttataataaagaatatccattgcaactcttcgcttgtattttacctcatccctgccagaaacttgccatatcccagttatacccggcgtggactttttataatactcaattttttttccgtacttatctgcttcatattgagatataggccttgggccaacaagtgacatgtttccaaataaaacattaaatagttgaggtaattcatctatgctcgtttttcttatccattttccaaatttagttacacgtgggtcattcttcatgtggcccttagtatgtaattctttcaatatattattttgtatctctattggcaaggttgatatgtctttcattgatgtaaatttataacaattaaacatgcatccatttagcccgattcttttactcctataaataggagggtgtccacttaatgaaataattattgcaacaccaattaagacaggtgaaaccattagtatcagaagtagtgatgcacacaaatcgaaaatccttttgcttttcatgaatcccccgtgcaattatataatgattcaatatgttacaaataaacacatttatacaatagttctataaggcaaatagatcaatggtcgagtaaatggattcatgatttaatcatttaatgcgttgataattatggggaaaattaggttttggtaatcccggctgatgtgggaagggggtattgagcgaagttgcagaatgctggagaacggcgctacccggcagcaggtggctgatgtgacaggcgtggacgtgaaaacaatctacaagtacctcccggcgacttgaagacaaagatttcactacttttcctgatatgttacgtttggcttgatcaattcattcagctttgaaaacagtttggtttgtttgtgatgagtaagaaaataataagttttagagattttctaactattaaccataaccttatgcacatgtccgatacatgggctgatttgtgggcgttgattttttacacacgtttaagtgcgggaaggctgctgtcactccgttacgatgacattgatggttgttcgataatgatacgggaaccgggacatctgaaggcgctacgtgttgaatcaacccctccagtggaggggatcattgctcgtagaagagaacgctatccagaagatgtttttttatttcagagccattctaaccgtgtgaagtaccaacgccggccggtcactataattgctttcaacgccgctttacgtcgcgccgctagatcattaccagacgttaacgtaagcagtagtagcgcgagaaacataccggactaaccgcctgtccagtcgcgtgtggccgatgtgacaggcgtgggggtgaagactatttacaaatatttgccagtacaatacggcgataaaaaatccccttgagcaggcacactcaaggggaaaatactacataacatcattgctgtgtgcgtcttcgcacacccctatcttctaagaaggcgcccaaagcttccagatatttctggtctgagcagttaaaacattggatcggcggcctatgtgataagagggggtgaagacgatttataaatattttccagccggttaagtttgctcacctgcgaaccgtatgcaagagatcgcaggtgaacaatttgctatgaaggcattgccatagctgaaaaattttaacctcgcattgttcgcaaaaccatcaaacagctaaggcctgaaaacactttcagactaaccttactcgttacatcaatgtgttacgtcaatggcgtaaattgatagccagagcctatattgatatgtcgccctgttaaaactactgtatataaaaacagtgttaatctgagcgagtcaattatgcagttttacacgcccgttgagttacgtgagatcatgctgatcccgttgtacagtgaccttgtgcaatgtggttttccaagccctgcacaggattacgttgagcaacgcatcgatctgaacgagttgctcgttaaccaccccagtgcgacgtattttgtcaaagccgccggcgacagcatgaaggatgccggcataggagaaggtgatcttcttgttgtggatagctcaaggacagcagttcatggcgatatcgttatcgctgcagtggatggggaattcaccgttaagaagctgcagctgcatccgcgggttcagcttaacccaatgaaccctgcatattcgccgatagtcgtgggtagcgaggatactctcgatgtgttcggggtcgtaacttacatcatcaaatcggctggctgagatgtttgcactttgcgatgtgaactcattttacgcatcgtgtgagacggtgtttcgtcctgacctgaaagggcggccagtagtcgtcctttccaataacgacggttgtgtgattgctcgttccgctgaggcgaagcccttcgtcataatgggggagccgtacttcaaacaaaaggacatgtttcgccggcacggcattatcgcgtttagtagcaactatgagctctatgccgatatgtccaaccgagtgatgacaacgctggaggaactctctccacgctgcgaaatttacagtattgatgaggcattttgcgacctgacaggagttcggaattgtcgcgaccttaccgactttggcagggaaattcgcgagacggttctgcgcaggacgcacctcacggtcggtgtcggcatagcccagactaaaaccctagcaaagctggccaatcacgcggcgaaacagtggcagcgacagaccggaggagtggtggatctgtctaatcttgaaaggcagaggaagttgatggctttgctgccggtggatgaggtctggggcgtcgggcgccgtattagtaaaaagctggaggccatggggattaaaacggtactgcaactggcggataccgatatccgttttatccggaagcattttaatgtggttctggagcgaactgtgcgggagctgcgcggagagccatgtctcggtcttgaggagttcgcgccggtaaagcaggagattgtctgtagtcgcagctttgggcagcggatttccacctacgaagagatgcgcctggcgatatgcagctacgcctcacgtgcagcggagaaactccgtggtgagcatcagtactgccgctttatctcagcattcgttaaaaccagcccctttgcgctgaatgaaccgtattacgggaacagtgcatcggtaaagctgctaacgccgacccaggacagccgggacatcatcaccgcggcgacaaaatgtctcgatgtaatctggcgagacgggcatcgttaccagaaagcaggagtaatgctgggagatttctacagccagggcgtagcgcagctcaacctgtttgatgccaacgcgccacggaagaacagtgaaaagcttatggaagttctcgaccatctcaacgcgaaggacggaaggggaacgctgtattttgcagggcaggggatccagactgcctggcagatgaagcgtgaaatgctttctccgagatatacaacgcgtattcaagatgtgctagttgtaaaatgataggagttagtatgtaataacaccttgataatatcttatggctaacttaagtgaggtgtcatgtatatggcaaagatagggcgaaatgattcatgctggtgtgggtcaggaaagaaatataaaaaatgtcacttgggaagagaaaaggaaaaaaatatagatcgaggcgatgctaattcagttcttaaactatttacaaatgtaagtaagtgtagtgttcctgatgatttaaaacacgaatgtgagcgcaagatcgttaaggctcatacattatcaaaatcaaatagtctaaaggaaatcgcaaagaatggtcatgtattaggaacaagtaaaggttttgatgcatttgaaaggcataatggtgtgcttagttttgataaaataggaattaacaaagcatcaactttcacaggattctgttcttatcatgataaaatgcttttttcctgcattgaggatgaagagtttatagcaaataacaagcaatgcactatgcttgcttacaggcctttgatgagagaattctatgttaaagaggcaaatctaaaagttttagaggcaagcaggatattcgatagaggatgggacttccaggctcagttggcatgggcaagacaagtgaatgagaatattgaaggtacaatattaagtttaaaggatttgagttatattaaggatgaaattgagtcgtcaatcaaagataatacatttagtgcattaaagaatttaattataaaacttgaggaacccccaaaagtaatggcatgtggcatttatgccccaattgttgatattctaggtaacgaaattcaagaaataacaaaagaagacgcgagacctgaatatataatcacaaatgttttagctttagatggtaatggttacgtgattttttcatggttaccagaagataataacgtaattcaaaagtttattgcatctattaagaaatgctccagacatctcttaggtgacaaacttacaaatcatatcctttcatttatggagaatgtttttgcatcagaggagtggtgggactctcagggggataaacagggatatataaatgagttattgatgcagggagtaagaatgcatgtttatgatttaggacttatttctcatgattataataactacaatgctataacagtaaatgaaataattgaaatttaattaaagaatgtttaatttatattttttaatagttcagcgtattgatttttcacattaccaactgcgcttgaaacagggtgccaagtaaaatggtcggttggcacggcgccgtcgacggctatctcctcagcctctttccctcctatatcctgtctcatccattccctggctgcttctggtgacaacaccagcggccggcggtcgtgaatatctacgagcccttgatctgctgcggcggtcactatcaaaaacccttcggcttcgtcgccgcgctcaaaaggcacgctaccgatcgccgccatgaagattggctggccgtcggcgcgatgaataaagtaaggctgcttcttgtctccttcgcgcttccattcaaaccagccatcggcaaaacatatcgcacgaccgtgctgccacagaggtttaaactcactgctgttggctgcggtctcaaccctggcattaatcaacggtggtttatcccaccacccgggtgcgtaaccccagtgaaccggatcgaggtgcagctgttcgtctcgttcgctcaggagcaaaactttagtccccggcgccacgttataacgcccaatcggctcagggtcgtatgcgatgtcgcgctcggcttcatccgctaggtatgccagatattcttcatgggtttgggattgagcaaatcgtccgcacatggttacctccagtcttcagactgaaagtatagaaggtgtggaggaaacgtaggaggggaactccgacagccatctaactgatgactgtcggagatgacgtcaaaaacaatgtgtacaaaattgtgtattaaaatcaggaaaattgcacaatttaaaagtttaactcattgtttttaattgacaaaaataattattttgtaggtgctatcgtagggcataccattccttatgtttcagtgggttagccatggcaccgagaatatcggaaatcacgttgacaataatcaccagcgcgccaatcaccatcactccggcggagatcgccgcgtagtcctgctggcgaatagcgttgatcagccagcggcctagtccaggccagctgaacaccatctcagtgatcatcgccagggtgagcatggtggaaaactgcaggccgagacgcgggatcaccggcggcagggcgttgtgcagcacatggcgcagtagaattttgcgtcgcgacacgccgcgggtggcggccgcttttacatagttagtgtcatacacctcgctggtgctaatgcgcatcaggcggatcacttcagtggtgggggcgaccgccagggtcaataccggcagcaccatatgccgggcggcgctgacgatcatctcatggcgccacggcgagtccgaaagccaggcgtcgatcagcgcgaaaccggtgacatttttcacctcatacagcagatcgaagcgaccggagaccggaagccagccgagggtcagggaaaagaagagggtcaggagcagcgccagccagaagaccgggatcgagaaaccgaccagcgcaacggcgctgatcagggtagcgggccatttattgcgcattacgccggcgatcatccccaccggaatgcctatcagcagggcaaagccgaaggcgaggatgcacagctccatggtcgccgggaaaacctcgcgcaactgctcagaaatcagctggccgttaatgctggagacgccgaaatcccagtgcagcaccccttcaaaccagaacagccacgcattccacagagaagcgccctgcagtggggcatgaggggtgaaatagctcaggctgaaaccgacaaaggtcagaaaaaagagggtgatcagcagcagcagcaggcggcgcagggtaaaaataatcatggctttttcacctcttcggtattttcccgcgatacgccagcgaacgaagcgttaccgaaagggctgagcaccaggcctttcatatcatagcggtaggcctgcagccgcagcgacgaggccagcggcaggaccggcagttcgcgggcgaggatccgctgcgcctctttgtaagcgtccatccgcgaggagagctgctgcgagagcagcgctttttgcagcacgtcgtcaaactcccggttacaccagtgggcaaagttggtttgcgaggcgatggccgcgcagctcagcagcggtcggaagaaactgtccggatcgttactgtccgtcgcccagccggagagcgtcaggtcgtggctcatatccatcaggcgcgcctcctggaaacgtccctctaccggcacaataatcaccttaacgccaatctgcgccatatccgcctggataagctccgccgttttcagcgggctgggattccacgcctgcgagctggtgggcacccacagcttgagggtcaggttttccagccccagggctttcaggcgggcgcgggcctcctgcggattatattcggtaattttagcgtcattatcgtaggcccacgaggcccgcggcagcatggacgccgccgtctccgcggtgccatagtagatagactgcatcaggcgctggttgttaatcgccagcgccagggcatggcgcacctcagggttatccagcggcggcttggcggtgttgaaggccagccaggcgatgttcattcccgggcgcagcgtcaggcgcaggcgcgggtcgtcacgcaggatcgtcaactggctggcggctggccaggccagcacgtcgcattctccggtcagcagtttcgacaggcggccggtgccgccggagccaaggtcgaccaccacctggggcatcaacggtttgccgcgccagtagccgggggggcgctgcaggcgaacatattgtccggagcggtaatcggatagctggaacgggccggtgccaaccggctggcgatccagttgctcctggcggtcgtcctgcgttaagcgggcggcatattcggcagaggtaattgacgcatagtgggtggccagatgccagaggaacgaggcgtccggccgcttgaggcgaaactccacggtctgattatccagcttgcggacgctctccacgctgtcagcaaactgcagactgtcgaagtaggggaagctgctgccgttgacgttgtgccacggatggtcgcggttaaaaatacggccaaaggtaaaaatgacgtcatcggcattaaagtcccgcgtcggggtaaaccacgccgtgcgttgaaacgggacgtggcggcgcaggtgaaagcggtaggtggcgccgttatcgagaacttcccagctctccgccagctcggggaccagccggtaggtatagggatcgacgtcaagcagacgatcgtagagctgagcggccagcgtatcgacaatcaggccgctgctgactttctgcgggttaaaggtattaacctggccgctgacgcaatagacgaaaccgctatcgcggatatcggcgcggtcggggagcgcaggggcggcaaaagctggcccacacagcagggaaacggctgccaggagagatgacaatttcaggcgcatattttctgtttgattatagagctgaactctatcttattaagattaatagacattcaccaccgccttcaacaagcctgagggataatgcggttaccgggtgcgtatagtattcagtcaattgattaaaatagtcgcggaaccgagtctgtatagtgaaacatggtaactttttatcgccgatatcgccagtcagctctgtttggccgcggttgaccaaacggcgacgacgtgcggacgctagagaatagattcagtatagcggggagaaagccgatgacccgacgggcgactagccatacccgtcgggtgtgatacagggggagcgtgtttcgattattgtgacagtgtcactttatgatagtccatattctgcaggtcctccagcagcccggggccaaccggctgccactgcaagcgctcgcgggtccatgccgagctggcgcgcaggtcaagggcggtaaacggcgcaaaccagccgaaccaggcgtcgacctgcgagtcatccaggtgggtcagcggcaggtttaatccgtgggcaattaccgcggcaatatcgcgtaacgcgatcccctcttcggccaccgcatgatagcgctcgcctgccgcgccctgaagcagcgcgctgacatacagacgtgcgacgtcatcgacatgggcggctgaccagcggttgcttccctcgccgcgcagggctaccgccccgttggcgaccgcgcgttcgatgtagcaggtcagcagtccctgacgcacggtgtcatgcacctgcggtaagcggaccaccctgacatccactcccgcctccagcaactgctggccggcgagctctgaggcggtgcgcgggctggggtgccctgagttgaagaacgactcccgggccggggcgccgctcccgtcgtcgcccatcagcgtgccggaggtgatcaccagcggccgcgtgctgcctcgcagcgcctggcccagggccaggatcgcctggcggtctttctcgcagttagcggcaaagcggctgaagtcgtggtcgaaggcggtatggatcaccgcgtcggcgttcccgacgccagccagcagcgactccggggcatccagcgtgccgcgatgcacctcggcgccggccgccttcagggcctgtgcggtgctttcgctgcgcgcgaggccgataacctgatggcccgacgcctgcagcgccggaagaatacgtgagccgataaatccgctcgcgccggtaagaaatatacgcatcatggatctcctgaatgggtttcaggcgtatcctacctgcgatgtcatactataaaagtagagacattatcggggtataaattctaacaggcagaacccacaggcagatgatgaacacttctgacaaccatgctttaggcgattttctccgcgcccgccgccagcgtctcgatccggcaacgtttggcttcccggcgggacgccggcgcaccccggggctgcgccgcgaagaggtcgcgcagctcgccagcatcagcccgacctggtatacctggcttgaacaggggcgcggcggggcgccttcccgcgaggtgctggagcggatcgcccgcggtctgcggctgaccaccccggagcgcgagcatctgtttattctcgcctttggccatccgccgcagacgcgtctgacggtgacggatgatatgacgccgcggctgcagcgggtgcttgacgctttcaccattccggcgattatccgcaccgccagctgggacgtcatcgcctggaacgcgccggcggccagggtgctgaccgactacagccaactgccgctggcggagcgcaacgtgctgcgccgcctgtttacccggccggaggcccgctgcactctggaggactggcagagggtggggcagcttatcgtcaacgccttccgcgccgacgtcacgcggatgggcgccacgaaagaaactgaccagttgatcgccgagctcagccagcagagcgtcgagttcgcccgtttctggcaaagccatgacgtcgccggtcatggagaaggctataagcgcattaaccacccgcagatgggtccgctcgacctggaatttacctcctttgccgtggagggccgtcccgatctttccctgctggtctttaatccggcaacgactgagagccagcggaaaattcacggtttacttcagggggcgggatccgcgccggaggagagctgaggggtaaattcatacagcaccagcgcattgctctgcagcgagtcgatccgcagccaatagccatcgagcctggcttcatccacgctgagcgccggacgggcctgatgcatcagccactgataatcctcggcgtcagggccgctgcggctgcgaaaggcgtccaccagcgggaacaacgcgccgtggtgctgatcgaacaggtgctgtttgatgcgccagctgccatccaggccctgcagccgcacgctgtagggctggctgaagcgctggataaaggccgcttcgctggagagccagggattgtagaccaccgtattgcgcagcagcagctggtagtgaccctggtggtggagcagcagcaggtttttatcgtgaaccaggatctcgccgcgcagccgccgccagagccagagtacccagtaaaccgggcgcggaaggccgtgcagatagtgcagcgccaggctggaggtatcgagcttgccgttggcgcgagcttcgccctggaggcctgaatttaaccagaagcccgccagccagacctggtccgccacccccagcagattatccatcagcagcgcgccgcgaaaaaagcggccgttggtatcccgcgtatcgccggtcagcgtattccaggagagcagccacagcggcaggttgagctgacgctggcgcagggcgctgtggatctgccgcaacttgtgcagcggataatgttcactggaggccaggcggctgctgtcaacctgggccagatccagctgttcgttggcatctgcctggcaggcgagaaaatccgcctctgccagcagcggcgagtggaacagcggatcgttcccgggatcgctgggagcaaagcggtgccagatccccagctgcggctgcggcagcaggcgatgaaggaccccgcgctgctgccgccaggcggcctggcgcgcagcttcgctggcctgcggcgaccagtgccagacaaagcgccagctgttgagcgtggctggcggaaaatggttggcggcgagctgcaggaagcgctgcagcaggtcactgcgggtggtgacgccggtgtgcaggatcacctgccagcccatcgccgccagccagctaaaaatctgctgcaggttgtaccagcaggcgtagccggccatctgcggatcgtcccagccggtaccgaacagccgactgctgagaaagggatcgttgatatcgatggcatacaccggcagggcgtggtgcagctgttcgagttcccggcgcacatcttcgcgcagcagatcgtccagttcgcgcacggtcaccaccatccgggtatggcgcagcgctgcggggcgcgctggacgatcgcgcagattgatctcccgggtctgcggtgggttgatcggcagggggggactttcccggtcgcgtggttccggctcattgagtcgcgcatacagccggtcgaccgccaccggctgccagcgatcggcctgcggcgggcgcggtcgggcaagctccagaggatgctgttcacgatactggcgcggcgtcacgccgtgctggcgcttaaacaaatcgctcatcattcgcgtactggcgaatccctgttcgcgggcgatttgctggacggttttgcgggtggttaatagctggtcggcggcgtggcgcaggcgcagcgcggtgaggtactggacaaaactaaccccgacctctttgcgaaataagcgtgacagccaggcctcggagacaaattccgcggccgccacctcctgcaacgagaggcgacgctgatagttagcgtcgatccgcgccaccacgctggctattctccggctccatttttcggtatcgcgccggggcgtggaggcgatgggctggctaaagcgcgtggccagcagcagcgctatctcactcagccagcggttggcctccagtcggtaatggcctggatgattgaccaggccgctcaccagcagctggcgcatcaggcggcgcaggccgtcatcggcatcccgggtgcgcggcgttatctggtaatcgacggcaaaaaaggcattatcgaggcgggccagccagctggcggagagggtgaggatcatcacggcgttggccccggcgctgcgcaggctccagcgacggttgcggttaacgatcgccagcccgtcggcggcgagcggctgcgacgcaccttccgccaccgccagatttacgcttccctccagcacccacagcagcgtcagcagatcgctttccggctgggtcagctgacgcacatcgcgtacggtgacgctaaagtcgcctgaatggtgctccacatggctctcctctgtagacaaaaaacaaccggttgttttttgtcataaccgatatgtatgaaaaacactcattgatttttcgtcaatataaaacaaaaaagcgcgcctgcaagctgaggcacccgcataaactcgaaggtgtcgtgcaaacacaacacaggaataacaaaaatgacacatccgttgctagaagcattgcaggttaacgaggcgcaatttatcgctctgcgtcgtcggttccaccagcagccggagatcggctttgaagagcaccagaccagcagcgaggtcgcccgactgcttggcgagtggggatacgaggttcaccgcggcctggcgggcaccggagtggtgggcacgctgcgcgtcggcgaggggaaaaaacgccttggcctgcgggcggatatggatgccctgccgatgcaggagcggagcggtaagccgtgggcaagccaggttgaagggcgctttcacggctgcggccatgacgggcacaccaccacgctgctctacgcagctgaatatctggcgcgcacccgccagtttaccggcacgctgcagctgattttccagcccgcggaagagttgctgtacggcgggcgggtaatggtcgaggacggtctgtttgatcagttcccctgcgacgccatcttcggcctgcacaatatgccgggtcagccgttgggcaagatcggcctgcgcgacggggcgatgatggcctcctccgatacgctgcatattgaagtgaagggcgttggcggccacggcgcggtgccggagcatacggtggatgccacgctggtggcctgccatattaccctcgcgctacagtccattgtctcgcgcaatatcaccccgtttgaaccggcggtggtgacagtcggcagcatccaggccggtcatgcgcccaatatcattaacgatcacgtgctgatgaagctcacggtgcgcaccctcaatgagcaggtgcgcgagaccgtgctgcagcggatccatgatatcgccgtggcccaggcggagagcttcaatgccaccgccacgctgacccacgtcaacggcagtccggtgttgcgtaacgatccggcgacgaacgccatggtgcgggaggtggcgacagcgctgtttggcgcagagcaggtgggcgaggtgaagccgtttatgggcagtgaagattttgccttcatgctggagcagcacccgcatggcagctatttcaccatcggcgccggcgatgagccggatcgctgcatggtgcataacccggggtatgacttcaacgacgcgctgttgctgaccggcgcggcgctgtggtgtggcctgacggaacgctatctgcgctaatcacgagaaacgggagggccatgcgatgagcactgtcacaataagcgacaccccgtttgtcggcaacgatcgcctgctggtggggattgtgttaagcgttttaaccttctggctgttcgcccagtcggtgattaacgtggtgccggcgatgaaaagcagccttgatatctctcttgaaaccttaactctggccgtcagtctcagcgcgctgttcagcggctgcttcgtggtcgccagcggcggcctggcggacaagtttggccggatgcggatgaccaccctcgggctggggctgagtatcgtcggcagcgccatgctggtggtcgctcagggaccggggctgttcctggccggccgggtgctgcaggggctgtcggcagcctgcattatgccggcgacgctggcgctgattaagacctggtatgaggggcgtgcgcggcagcgggcggtcagcttctgggtcatcggctcgtggggcggcagcggtctctgttccttcgtcggcggggctatcgccaccggtctgggctggcgctggatcttcgtcttctcgatcgccgttgccctgctggcgctgtttttgctgcgcggcacgccggagagccgcagcgccagcgccagccagcataagctggacgtcggcggtctgctgagcctgattgttgcgctggtgctggtgaatctgtttatcagcaagggccacggctggggctggagcagcccgctgtcgttgaccatgctggccggggcgctggcggcggggacggtatttatccgcaacggcatgcgcaaaggcgaggcggcgctgattgattttgcgctgttccgcaatcgggcctacggtgcggcagtgctgtcgaactttctgctcaatggggcgattggcaccatgatgatcgccagcatctggctgcagcaagggcaccacctgacgccgctggagagcgggatgatgaccctcggctatctggtgaccgtcctggcgatgatccgggtcggcgagaagctgctgcagcgctatggcgcccggctgccgatgatggccggtccggtgttgaccgctatcgccatcgcgctgatatcctgcacctttctcgaaaaggcgctgtatatcggggtggtgttcgccagcaacgtgctgtttggcctcggactgggctgctacgccacgccatcgacggataccgcggtggccaatgccccggagaacaaaatcggcgtcgcctcggggatctataagatgggcagctcgctgggcggggcgatgggtatcgccgtgacagcgtcacttttcgcgctgtttttaccgctgggcatggcccatgccgcccagtatgccctgtggtttaacgccgtcttatgtctgggggcgatggcggtgagcgcgctgctgctgccgcgcgcctctcacagctgatgctttttcagcagcgcgcggagctggtgataggttaatcccagcagctccgccgcctgcttctgatgatacttcgcctgctccagactccgctgcagcaggcgtttttcctgctggaactggaaatcgcgcagatccagcggtagcgcgggcagctcatcgccgggcgcggcttccggcggagagccgggggactgacgaaaagggttaataataatcgcgtccagctcatgttcgctgtcgccgtggcgatacaccgagcgctcaaccacgttcttcagttcgcgaatattccccggccagcggtagccgagcagcgtcgcggtcgctcgttcgctaaagccgggaaacagcggcagaccgagttcgcggcacatctggatggcaaactggttggcgagcaacatgatgtcgctctgccggtcgcgcagcggggggagctgtaccacgtcgaaggccaggcggtcgagcaggtcggcgcgaaaatgaccttcctcgaccatctgcggcaggtcagcgttggtggcgcacaccagccggacgttaacctgcagcggctggctgccgcccacgcgctccagctcgccatattcaatcactcttaacagcttctcctgcaccagcattggggctgtcgccagctcatcgagaaacagcgtcccgcagtcggcgcgctcgaagcgcccgggatggcgcttgctggccccggtgaaagccccggcttcgtggccgaacagctccgagtcgagcagattatcgttcagcgccgcgcagttcagcgagataaacggcccctgccagcggctggagaggtagtggagacggttagcaataagctctttcccggtgccgcgctcgccgatgaccagcaccggtttatccagcggggccagccgggaaacctgttccagcacctcgagaaagctgttggcctcgcccagcagattatccttgtactgcgccatgatgaatttcgccattaagtagtgtaattaaccaggtgactgtagcaatgcccagcacgtttcgcaaccaccctgtttaaaatcaataagataaaaagttggcacgccatttgtattagctaagccacaggtgaatgcctgaaaccagaactatgaggattgaaataatgggtattttttctcgttttgccgacatcgtgaacgccaacatcaactccctgctggagaaagcggaggacccgcaaaagctggtgcgtctgatgatccaggagatggaagacacgctggttgaggtgcgttcgacatcggcccgcgcgctggcggaaaagaaacagctgtcccgtcgtattgagcaggcggtcgcccagcaggcggaatggcaggaaaaagccgagctggccctgcgcaaagagaaagaggatctggcccgggcggcgctgatcgaaaaacaaaagctgaccgaccttatcgctcagttggatcatgaagtgcagctggtggatgaaaccctggcgcggatgaaaaaagagattggcgagctggagaacaaactcagcgaaacccgcgcccgtcagcaggcgctggcgctgcgccatcaggcggcgagttcgtcccgcgatgtgcgtcgccagctggacagcggtaaactggatgaggcgatggcgcgctttgaatcctttgagcgtcgcatcgatcagatggaagcggaagcggagagccaccgctttggcaagcagcagacgctggatcagcagtttgccgaactgaaagcggacgatgaaatcagcgaggagctggcggcgttgaaagccaaaatgaatcagtccaaccagtaagtatgattgcgcggcgcggcgttgcgccgcggctcaccccctgtaaggagtacacatgagcatgctttttctcgccattccgctgacgctgtttgtgctgtttgttctgccggtctggctgtggctgcactacaacaatcgcggcgccaacggcagtctgacgcaaaatgagcagcaacggctgctgcagttgaccgatgacgcgaagcggatgcgcgaacgcattcaggcgctggaagcgatcctggacgccgaacatccgaactggagggacaaataatggccgggctggatctgaataaaaaactgtggcgtatcccgcagcgcgggatggtaaagggcgtctgcgcgggcattgctcagcatcttgatgtcccggtgaagctggtgcgcctgattaccgtgctggcgatgattttcggcctctttttctttgtcctggtggcctacatcattttgacttttgctctggatccgataccggacagcgagctgtacggtcataaagcgccgagcaatggcgatctgctggccgccgtggatgccgaactggcctccggtgaacagcgtctgcgtgaaatggagcggtatgtgacctccgacacctttacgctgcgcagccgctttcgccagctgtaaaccctgtttctaacgaatgaggcaacgcatgaatagcaaatggcaacgcgccgggcagcaggtgaaacccggtctgaaaatcgtcggtaagctggcgctgctgaccgcgctgcgttatggcccggcgggcgttgccggctgggcggttaaatcggtcgcgcgtcggccgctgaaaatgctgctggcggtggcgctggagccgctgctcagcaggctggccaaccgcgtcacgcgcgggatgaaataatgccgccgtggggaaggcgcaaaaggattaacgttgtcctgcttatccccggcagatagcttatgatgacgagacataccttcagggcataacggactggcgatgaagcgactgaaaactgaattgaatgcgctggtcaaccgcggggttgaccggcatttacgtctggcggtgaccggcctgagccggagcggtaaaacggcgtttatcaccgcgctggtcaaccagctgttgaatatccacaccggcgcccgcctgccgctgctgagcgccgcacgcgaagagcggctgctcggcgtcaagcgcgtgccgcagcgggactttggcattccccgattcacctacgacgaagggctggcccagctgtacggccagccccccatgtggccaaccccgacgcgcggggtaagcgagatccgtctcgcgctgcgctaccgttcgaattactccctgctgcgccattttaaagatacctccacgctgtatctggagattgtcgactatccgggcgagtggctgctcgacctgccgatgctggcgcaggattatctgagctggtcgcgacagatgaccgggctcctgcagggacagcgtgcggagtggtcggcccgctggcggcagctgtgcgccgggctggatccgctggcccctgccgacgaggctcggctggcggatatcgctgccgcctggacggactatctccacgcctgtaagcgcgaagggctgcactttatccaacccgggcgctttgtcctgcccggagaaatggcgggcgcgccggcgctgcagtttttcccgtggcccgacgtcgacgccgtcggcgaagccaagctggcgcaggccgataaacacagcaacgccggcatgctgcgcgaacgttacaaatactattgcgaaagggtggtgaaggggttctacaaagagcacttcctgcgcttcgaccggcagattgtgctggtggactgtctgcagccgctcaacagcgggccgcaggcgtttaacgatatgcgtctggcattgacccagctgatgcaaagtttccattacgggcagcgcaccttgtttcgccggttgttctcgcccgtcatcgacaagctgctgtttgccgccaccaaagccgatcacgtcacgatcgatcagcacagcaatatggtgtcgctcctgcagcaactgattcaggacgcgtggcagaacgccgcctttgaagggatcagtatggattgtctggggctggcgtccattcaggcgacccagagcgggctgattgaggtgaatggcgagaaaattcccgccctgcgcggcaatcgcctgagcgacggccagccgttgaccatctatcccggtgaggtgccggcgcgcctgccgggtcaggccttctggcagcagcagggatttcagtttgaaaactttcgtccgcaggtcatggatgtcgatcggcctttgccgcacattcgtctcgacgcggcgctggaatttttgattggagataaactgcgatgagcgaaccgttaaaaccgcggattgattttgatgggccgctgcaagcggagaaaattccgccgctgaaaggcgctcgcgccttcgacaccctggaggcggacaacttcgcgccagcgcggctggtgaccggcgaagaggaagagggggcggcggaagcggtggtggagtcggtcctgcgacccaaacgcagcctgtggcggcggatggtcagcgccggactggcgatcttcggcgtcagcgtcgtggcgcaaggcgtgcaatggacggctaacgcctggcagacccaggactggattgcgctgggcggctgcgtcgccggggcgctgatcgtcggagccggcgtcggatctgtagccaccgagtggcgccgtctgtggcgactgcgccagcgcgcccacgaacgcgatgaagcgcgcgatatgctgcacagtcacgcggtcggtaaagcgaaagccttttgtgagaagctggcgcagcaggccgggctggatcagtcgcatccggcgctgcagcgctggtatgccgcgatccacgaaacgcaaagcgatcgcgaagtggtgagcctttatgcgcagctggtgcagccggtgctcgatgcccaggcgcggcgggaaatcagccgttcggcggcggagtcgacgctgatgattgccgtcagcccgctggcgctggtggatatggcgtttatcgcctggcggaacctgcggctgatcaaccgaattgccacgttgtacggcattgagctcgggtattacagccgtctgcgactgtttcgcctggtgttgctcaatatcgctttcgctggcgccagcgaactggtgcgcgaggtggggatggactggatgtcgcaggatctggcggcccggctgtcggcgcgcgccgcgcagggcattggcgccggtctgctgaccgcccgtctcgggatcaaggcgatggagctgtgccgcccgctgccgtggatcgccgatgataaaccgcgactcggcgattttcgtcgcgagctgattgggcagttgaaagagaccctgcagaaaagcaaaacccgcccggagaagtaacctccgctcagagacatcgccgggcggcggcttcgccttgcccggccttcgacgtcaagctctggcacgcgcaccctggcaatattcgattaggcgcattccgccgccagccactcgctgaaggcgcgaaagcgcgggcgggaacggttctcctgcggacaaatcaggtcatagccaaagggcgagggcgcttcattttcagacaaggccaccagcctgccggcgtcgagcagcggctggatcagcgttttacgccccatcaccacgccgagtccattaagcgccatctcgatggccagcgagtggttattcaccgcgtaataccggccgtcaaaaggtaacgcctgtccgctgtgctggcaccacaggcgccattccgcaaattgatcctgtacgtcggtggattcgcacgcatggatccagacgagcgccgccgggtcgccgccgctcagcggacgatactgctggcgataacgcggggagcagaccgggagcaaactttccgccatcagccgctgttgataaagatcgggatagcgcgtggcgccgtagtaaattgccagatccacccgctcctcgttaaaatccatcaccccggcgcgcacgcgaaactgcagattcagtcccggccattgcgtctgaaagcgcggcagacgcggcattagccacagatgggccagcgtcggcgcaataccaatatgcagcgtgccgcgcagatcctgatcgcgaatatcctcaatttcatcgttaatcgcccgcagcgaatggcttaacgtcgccagcagccgcttaccttcctctgtcagcgccagtttacgcgtcatgcggataaacaggcgaaacccgatgtgcatctccagcctgcggatccgatggctgaccgctccctgggttaggttcatttcatgcgcggcaagggtaaagctcaggtgatgggcggtcacctcaaaggtctgcagcagcgcaaggatgctttgttgctcaagcacagattgtctcccttatgcattaattgagttcatgcataggccgatttaattcgtttgttaggccagttttgccggttttaaatagttatatcgtaactaaaccgaggtataccatgtcaggactcaaaattgtggtgattggcggtggctccagctacaccccggaactgattgaaggtttgctcaaccgctatcacgaaatgccggtcgcttcgctatggctggtggacattgaagagggcaaagagaaagtcgagattatcgccggactggcgcggcgaatgatcgccaaagccgggctgactattgaagtggtggccacccttgaccgggaaagcgcgctgcgcgatgccgatttcgtctgctcgcagtttcgcgccggctgccttgacgcccggatcagcgatgaacgtatctccctcaagtatggcttgatcggccaggagaccaatggccttggcggcttcgccaacgcctgtcgcaccattcccatcgccctggagatcgctgccgatatggagcgactgtgtcccgacgcctggctgctgaactttaccaacccgtcggggatggtgaccgaagcgatcctgcgccacagccgcatcaaagccgtcggcctgtgtaacgtgccggtgattatgcaaaaagggataaccactctgctgcaatgcgctgacgaaaaagaggtggtgatgcaggtcgccggcctgaaccactttatcttcgtgcgccagatcctgcacaaaggtaaagaatggctgccggaggtgatagccgagatcaacgccggtcgggatccgctggtgccgcgcaacatttcgccgttccgttggccgtcgcatctgctgcagggcttaggcatgatcccctgcgcctatctgcgttattactacatgaaagacgatctgctgcgccaggagctggcggaggcgggcggcgaaggaacccgcggggaagtggttaagcagctggaaaaaatcttgtttgaccagtaccgcgacccgcacctggcggtcaaaccgaaggcgctggaagggcgcggcggccagtactattccgaggcggcctgcgagctgatgaatgccatctacaacgacaagcggattatcatgcacgtcaacacgcgtaataacggcgccatcaatggcctgccggatgactgcgcggtagaggtcagctcgctgattaccgcttctggtccgctacctctcaatgtggcgccgttcccggaagataccctgcgtttgctgcagctgatgaaatcatttgaacggctgactatcgaggccgcgctcaccggcaaccgccataccgcatggcgtgctctgatgctgaatccgctgatcgtcagcggcgagaagctcgaactggcgttggatgaggtgatcgctgagaaccgtcagtggctgcctgctttccacgcctgacccaagactcaccggccgcctggccggtgatttaaccactgaccgtctgactttacgccacagcgcccatttttccgccacactgtcaataattgttgacagttagcttcccgaaaacccattcctggcctattattctcccgtcattggcacttttagggtgaacactcccatgcgtcttgaagtcttttgtgaagaccgtctcggtctgactcgtgaattgctcgatttgctggtgctgcgtggtattgacctgcgcggtatcgatattgaccctattggccgaatttacctcaatttcgccgaactggaattcgccacgttcagcagcctgatggctgagatccgccgtatcgccggcgtgacggacgtgcgcaccgtgccgtggatgccgtctgaacgtgaacacctggcgctcagcgcgctgctggtagcgatgccggagccggtgctgtcgctggataccaaaggtcgggtggaactggcgaaccccgccagctgcctgctgtttggccaaagccaggcgaagctgcgtaaccacccggtggcccagctgatcgccgattttaacgttcagcgctggctggagagcagcccgcaggagacgcatgcggagcatgtggtggtgaatgggcagaactacctgctggaagtgactccggtctatctggaaggcgagcataacgagcgagtgctgaccggcgccgtggcaatgttgcgctcaaccgtgcgcatgggacgccagctgcagaccatgaccagccaggataccagcgccttcagtcagatcctcgcggtggggccgaaaatgcgccacgtggtggagcaagcgcgcaagctggcgatgctcagcgcgccgctgctgattgtcggcgacaccggcaccggtaaagatctgctggcccatgcctgccatctggccagtccgcgggcgggcaaaccctatctggcgctcaactgtggctccattcccgaggacgcggtcgagagcgagctgtttggcgacgcgctgcagggcaagaagggcttctttgagcaggccaacggcggctcggtgctgctggatgaaattggcgagatgtcgccgcgcatgcagaccaagctgctgcgctttctcaacgacggcaccttccgccgcgttggcgaggatcatgaagtgcacgtcgatgtgcgggtgatctgcgcgacgcagaaaaacctgatcgagctggtgcagaaagggcttttccgcgaagatctctactatcgcctcaacgtcctgacgctgtatctgccgccgctgcgcgattgcccgcaggacatcatgccgctgacggagctgttcgtggcccgctttgccgacgagcaggggatcccgcggccgaagctctctgccgatctcagtacggtgcttacccgctacagctggcccggcaacgtccgccagctgaagaatgccgtctatcgcgcactgacccagctggaaggatttgagctgcgtccacaggacattctgctgccggaccatgacgtcgcctcgctgccggtgggcgaggaggccatggaagggtcgctggacgacatcacccgccgctttgagcgctcggtgctgacccagctctatcgcagctaccccagcacacgtaagctggcgaagcggctgggggtgtcgcataccgccatcgccaataaactgcgtgaatatggtctgagtcagaaaaagggcgacgaataatcccgccaggccggcgacccacgtcgccggcatcccggcctgcaaagcgggccaaacctgtatatactggttttttaatcctttttccggggtggtgcatcttggcgtcgcgtcgcgcgatcgggcactggctgatattgctgctgctctctgttctcttttcctcgctgctgttacgaatacacctgccggcagcgctgctgctggggccgctgatcgccggtctcattttgagcctgcgcggggtgaagttgagcatccctcgcccctgttatctggcggcgcaggccatcgtcggctgcatgatcgcccgggcgattaatccctctgtttttggcgtgctgttcaacaactgggcgctggtgctggcgatcctgttgaccaccctggcgataagcggccttaccggctggctgctggtccgctacagcgcgctgccgggcgccactggcgcctggggaagctctcccggcggcgcgtcggcaatggtggtgatggcccaggagtacggggccgatgtgcggctggtggcgctgatgcagtatctgcgggtgctgtttgtcgtcggcgcggcggcgctggtggtgcgctatgccctgggcaatgaagcacaggagatgactcaggatattgtctggtttccatcgttgaccctgaatttccctttcacgctgctgctgacggcggtggcctgttggctgggcatgcggctgcgcatcccctccggggccatgctgctgccgatgctgcttggcgccctggcccagggcggcggctggctgatgctggagctgccggagtggctgctggcgatggcctatgcggtgctgggctggacggtggggctccagtttaataaagccatttttctgctggccctcaagacgctgccgcagattatcgcctccatcatcggactgatcctgatgtgcgccctgatggcccttgccctgacccacattctgcagatggactttatgaccgcctatctggccaccagccccggcgggctggacacggtggcgattatcgccgccggcacccgggcggacatgtcgtttattatggcgctacagacgctgcggctgtttaccattttgctgaccggcccggcgatggcgcgggctatctcccgctatgcgccgcggcaataaaaagccctcgcagagcgagggctgggcagatcgaatgtccgcgagcgcgatgcgcccgggcaatctgttatcaggctttcagggcggccagcgcggcgtcgtagtccggctcttcggtgatttcgttcaccagctggctgtagacgacctgatcgttttcatcgattacgaccaccgcacgggcagccaggccagccagcggaccggtggcgatggcgacgccgtagtcagcgaggaaggacgcgccgcgcagcgtggacagggtgaccacgttgctcaggccttccgcgccgcagaagcgggactgggcgaacggcaggtcagcggaaatgcacagcactacggtgttgtccagttcagcggccagctggttgaatttacgcactgatgcggcacacacgccggtatcaatgctcgggaaaatattcagtactttacgtttgccggcgtactggctcagcgcgacgtcagagagatctttggcgaccagcgtaaacggctgcgctttagcgcctgcctgcggaatggtgccctgaacagaaacggggttgccctggaaatgcacggtttgtgacatggttatcttcctgtttacatatagttaacgtcgcgagtagtgtatgacatccgccagctacacggcaaaccctatttaacatttaccagagaggacaagggaatgcgtaacgtgcgagtgtatgaggaagcctggccgcttcataccccttttgtgatcgcccgcggtagccgcagcgaggcgaaagtggtggtagtggaactggaagaggacggcgtgaaaggggtaggcgaatgcacaccctatccccgctatggcgagagcatcgcctcggtcatggcccaggtgatggcgatcggcgagcaactggaggcggggcttacccgcgaacagctgcagcggctgctgccggcaggcgccgcgcgcaatgccattgactgcgcgctatgggatctacaggcccggcgcgaaggcaaaaccttggcccagctgttgggcgtggcgttgcctgaccgggtgattaccgcccagacggtggtcattggcacgccggatcagatggcggccagcgccgcggcgctgtggcaggcaggggcccagctgttgaaggtgaagctcgacgatcgactgatcagtgagcggctaatcgctatccgccaggcggcgccggaggctacgctgattgttgacgccaatgagtcctggcacagcgaggggctggcggcgcgctgtcagctgctggcggacctcggtgtggcgatgcttgagcagccgctccccgccgacgacgactcggcgctggaaaacttcgttcatccgctgccgatttgcgccgacgagagctgccacacccgggagagcctgccgcggctgcgcgggcgctatgagatggtcaatatcaaactggataaaacgggcggcctgaccgaagcgctggctctggccggggaggcggaacggcagggatttgaacggatgctgggctgtatgctctgcacctcgcgcgggatcgccgccgcgctccctctggcgccgctggcgcgcttcgctgacctcgacggcccgacatggctggcggtggacgttgagccggcgctgcggttcagcaccggcgtgcttcatctttaagcctgccagtgcagcagatcggtcatcgccggcaggtaacgctccgttgcctcgtctgcggagaccggcggaaactcggcggtgatgcaggggagtccgatatcggcgcaccagctgccaaaggagcccggcgtgtcgtagcccacgctgcccaccagcggcagggagaaggcgtcggccagccagcgacccagcgggctgtggcccggatcttcgatgcaggccagcggatcgtgaaaggagaccacccacgccggatgaatctgatggatcaactgacacagggcctcggtctcccgttccgaacccggctgctcgccggtcaacagcaccacgtcgcgctccgccgccgcgctattccagcggtaaaccgtttccccttgcttccagttggctgctggaaagttacggttgaggtcaacgccgcgggcattggcgcgcagcccgagctgacagccgtcaggattgaccgtcagcaccacgtggtggcggcgcagctcgggtttcagggtgcgcagggcgcaggagagggtcacaatcgacgaattctcatcaccgtgggtaccggcaataatcagcccgctacggctgtcggcctgcggcgcaggaaaccacagcagcggcgcgcccagttccgagctgccatactgccgggttcccggcggaaagtcgccgcgctgcgggcgaggacgtgaaatagacatagggcttcctgtgtgtcgttattatttagtgttggcgaaaagcgtatcgggatcaaacccattccctgaggcgtgaaatccgacggcacatcaattttctatcatatgtcgtttgcaatttcaggtgatgaaacaaataattatcgctctgttggcggtatttttttcattttaaaggggatcttatgaagtatcctgtcgctttgacatgcggcgcgctgtggttagccagcgtatcttctctggcctgggcggctgacgtaccgccgggcacggtactggcggaaaaacagctgttagtgcgccatatcaaagatgaacccgcctcgttagatcccgccaaagcggtgggcctgccggaaatccaggtgatccgcgatctgtttgaaggtttagtcaatcaggatgcgaaaggcaacctggttccaggcgtagcgacccgctggcagagcaacgataaccgcgtctggacctttaccctgcgtgataacgcccgctggtccgacggcacgccggttactgccgaagatttcgtctatagctggcagcgtctggtggatccgaaaaccacttcgccgttcgcctggttcgcggcgctggcggggatcgctaacgcgcagaacattattgacggcaaagccgcgccggagaccctgggagtcaccgccgtcgacgcccacaccctgcgggtgcagctggataaaccactgccgtggttcagcaacctgaccgccagctttgccttctatccggtgcaaaaggcgaatgtcgacagcggggcgaactggacgcggcccggcagcctggtgggcaacggcgcctatgttctgaaagaccgtgtggtcaatgagaagctggtggtggtgccgaacacgcactactgggataacgccaaaacggtgatccagcaggttacctttgtgccgattaaccaggagtccgccgccaccaagcgctatcttgcaggggatatcgatatcaccgagtctttcccgaaaaatatgtaccagaaactgctgaaggatattccggggcaggtgtataccccgccgcagctgggtacctactattacgctttcaatacccaaaaggggccgacggcggatgagcgggtacgcctggcgctgagcatgaccatcgatcgccgggtgatggcggagaaagtactggggaccggggaaaaaccggcctggcgcttctcgccggacgtgacggcgggcttcaccccccagccgtcacagtttgagagcatgagtcaggctgagcttaatgcccaggcgaaagccctgctggctgccgcgggctatggcccgaatcgtccgctgaagctgacgctgctgtataacacctctgagaaccaccagaagattgccatcgcggtggcgtcgatgtggaagaaaaacctcggcgtggaagtgaagctgcagaaccaggagtggaaaacctatatcgacagccgtaacaccggcaatttcgacgtgatccgcgcctcgtgggtgggggactacaacgagccgtccaccttcctgtcgctgctgacctccacccacagcggaaatatctcgcgctttaacgatccggcgtacgacaaaatcctcgcccaggcggcggtagagaattcggccaaagcgcgtaacgacgattacaacgcggcggaaaagatcattatggtcaaagcgccgatcgcgccgatctaccagtacactaacggccgattgattaagccgtggctgaaaggctacccgatcaccaacccggaagatgtggcctacagccgtaccatgtatatcgtgaagcactaatcggtcgtggttgcctgaagatgtcaggcaaccatcgctgatccccgagctggcgcgtcttgccgcgccagtttttcctgctctccttctcgcgccacagtagaaagtctcacttttctggcagtatggccgactgatgccaggttctaccatctggtcgcgaagcatcagaagatctcatccgccgggtttttatcatgatgctcaacgtattcggcaatcatgccatccggatgccgaaccagcatgttccagccggtgggcacggccttcaccgggttgataatcgttgccccggtggaaggcagatgtttctcccaggcggtaatgtcgtttaccaggaaagtggcctcggtggcgcgaaacggagccaggctttgctcggttccgccaattaaaagcacggaacccacctgcgccagtttgagatcgtattcgggatagtcaaaacgtaaccttgccttttgcgaaatgagatgttcataaaacgaaacggtttcttcaaagcgggcaatcagcacgcatcgacggatcaggatattgaggactttcattatatctccttcgccattttctcagagatagcgtagcagcactgaggtggaatgtaaggctcaagtagcagaagagcgtgacgtatagttgtggcctgcgtataagaagatatcggcaatgaccttgtgcgctggataagaaaagttgcagttaaaaaatatttattttgtaatgatgctgtggtgtgattgctgagcatacgattagcgggatgattaagaggggctagatggaaagtttaatttcttcgatatggaattttgatgggctgataaatagcgcgttaatttttgttacttttggtttattaggagtgtttatctggaaacgggcaggatccgcatattctttattgaaccggctatgggagttctgcctgggagggaaaacgtttcacgacggtaaaataaatgcatatttcaatgagagaaatgatgttgaacgctttaatgttttatttaatgttggcgcaaagaataaagaagagattaaatcactgattaactggacgaaaaagaaaaatatagatattcgtcatgtcacagccgcgaaaggatggtttgaaatatcaacgcttaaggcaataaaaccattatttatcgctaatgttggtgtatttgtctcttgtgtgttaactatgctgctattatcaaattttatgttgctggcattgaagccatccgcactagtacgattaggcgacgacaagtcatgggtttggattaatgatcatattgctgagagttcgatctggaccaataattaccttcccctgaactggactgagtggaagctcgataaaaaacagtgtgaaagtgaagatttcgataaaacggttttctcagaaaaagcggggataagtgtgcgctcggttgacaggatttgtgagaacttttcaagtggttcgttgagtgatactataaataatattattaaaaatcaaaaactggcatgggttttggctatttaccccttcatctttacgattatttgcttttttagcttgttacgcagaggtgctgcttctaaactttataatgaagtacataactcacaaaattaatatttatataaattcatttccgtctggcattactgtttgcatcgatcggaattaaatgacaggtccgagtacagaagctgtcaccggccactaccggttgcctgctgcctgcaggcaacctcagctacattcgcaatgtatcaatgaccgctctcagcgcgggcgacacattgcggtgcgggtaatagagaaatgaaccttccagacgctggctataacgctggagcacccggataagtgtgccctgggctagatcgtcggtaatcagctcttccgggacataggccagccccagaccgagcctcgccgctttggcctccatatagctatcggcgaaagcccactgtccctgaggtgggtgggtgatttttttgccatccacattaagttcccaggcgtaaaggctgccgtcgccgaactgataagcgatgcaggggtggacgactaaatcggcgggcgtttgtggaaagccgtagcgtcgaaaatgttccggggtacccaccaccgccatctccatatcgggcgaaatgcgtaccgcaatcatgccgcttccgacttccgggcccagacgtacgcccgtatcaaatcgctgcgcaataatatcgacaaaccggctttcgctgatcagttccagtctgatatcgggatagcgttgtttaaatactgccagcttcggcagcaggactttatcaatggcatgctggctggcattgatgcgtaccgtaccggagggcgtctgacgatagtgggccagcgtggcgagccccatatctaaggcgtcgaaaccggattcgacgttgtgatagagctgctcacctgcctgagtgagcgacaaccggcgggtggtacgcaccagaagctgaacgcccaggcgttcttcaagttcacgaaccgcacggcttaccccggactgcgccaggccaagtcgttgcgctgcggcggtaaaactgccttcccgtaccacctgcataaacagataaaggtcattatagttttcccgtttcgccattctcccgcctcgtcacccagatgccatttagaacaatatggtattaattttagcatttttcagcctctaatcagaaccattactgctggctacactaagcgcacgacaacaaagcacagcagcgttgtctactgaagacttgcattgatcacgtttatttaggggaattttgatgacggttttcaccaaaaaactgacagccgcgatacccgccatgctgctttgcgcctcattaactggagtcacaacgatgagctctgctgagacaactaacccgaatgcgcctgtttcactgattgaacaatgggataaaacgtttgctgagagcttgaaagtggatcaccgtaaggtgaccttccagaaccgctacgggataaccttagttggcgatctctacctgccgaaggatcgcggtgaacgcaaactggcagctattgccgtgagcggtcccttcggcgcggtaaaagagcagtccagcggcctgtatgcccagacgctggccgaacaggggtttgtcaccctggcgtttgacccatcctatacgggcgaaagcggtggctacccacgcaacgtagcctcaccggatatcaataccgaggatttcagtgccgcggtggactttctgggcctgcaaaaagaggtggatcgcaaccgtatcggtttgctcggcatttgcggctggggcggtatggccctgaacgacgcggcgatggacacccgcgtcaaagcggtggcgaccagcgtcatgtatgacatgagccgcgcgatggggcatggggtaggcgatggcaaagaccgctacacgacagccgaccgccgagcggtactgcagtacttgaacgcgcagcgctggaaggatgcggcaaacggcacttccgcccccggtgggcatgacatatatgttgatgataaaggcaacgtcagcgctgccgatcgtattttgccggaaagcttgcccgccaaccccaatccggtcctgaaagagttcttcgattattaccgtatgcgacgaggtttccatgcgcgttcggttaattcaaccggggcatggaatgcgacgatgccgctgtcgtttatgaatatgccgctgctgagttacgccagtgaagtgactattccgacgcttatcgtgaccggcgaaaaagcccattcacgctattttgccgaagatgcctttaaggccatcggcagtaaagagaaagcgctggtgattgtcccaggcgcaaaccacgtcgatctctatgacaacgtcgcgggcaaaattccctttgcgacgttcgcgcaattttttaaaaccaacctgaaatagatctcctgtgccggagacatccccaaagccgccacgcgcctgcgggcggctttgtcttgtcggagagaaataatgtctgcattaggtcacacccgggcacactggagcggcgtcctggcgatgacgctctgcgtatttgtgctcattgcctcagaatttatgccggtcagtctgttgacacccatcgcgggtgatttacacattaccgagggattagccggtcagggcattgcgctttctggcgcgctggcggtactgaccagcctgacgatatcccgtcttaccggatcgctggaccgtaaatggctgctgctggggctcacggcgttgatggcagcctctggggtgattattgccctggcgtccagtttcccggtttatatgctgggcagagcgctcattgggatcgtcatcggcggcttctggtcgatgtcggcggcaacggccattcggttggtgccgcaacgccaggtcccccgcgcactggccatctttaacggcggcaacgcgctggccaccgttgtggcagcgccgctgggcagctacctgggggccaccgtcggctggcgcggcgcctttttatgtcttgtcccgctggcggtgctggccttcgtctggcaatgcattagcctgccgtcgatgaaaagtccgcgcgcaccacagcggcagggatcggtgctgcgtctgttccgtctttctacgctatccctgggattgctggcctgcggactgttctttatgggacagtttaccttatttacctatgtgcgaccgtttctggagacggtgacccaggtcagtccttctggtctgtccctgatattgctgacaatgggtatcgccggttttatcggcacgctgcttattacgaccgttctgaatgcccgattttatccgacgctggtggctatcccgttgttaatggccgcaattgccggaacgcttctgctggccggacaccacacgggatcggtcgccgtactgttaagcctgtggggcctgctggcgacggcggcgcccaccggctggtggacatggattgcgcggacgctgcccgaggatgcggagacgggcggcgggctgatggtcgccgtgatccagctatcgatagccctcgggtcaacggtaggcggcctggtgtttgatagtctgggatggcacagcacttttgcactgagcggtctgttactgctgggcgcggcaggggtgacttttctgctctctgtcaaaatcagatcatctcagcgcactgcgattaatgaattgaatgcataagtcaaatcaggaatgacaggctaatcgtgaccgcgttcctgtcttaccatggtgttttaacaagaggggagcttcaccgtggaatattcagtattaagtaacgctcgcaaaatgccgatgctgggtttcggcgttttcaaggtgaccgataaagcggagtgtaagcaggcggtgttgaacgccattcgcaccggttatcgcctcatcgataccgctgccgtctacgataatgaagatgcggtgggtgaggccgtgcgcgaagccatcgccgaaggtctgtgtacccgcgaggcgctgtttattacctccaaactgtgggtccaggacatggccaacaccgggatggcgaaagccgggattgccgcgtcattaaaaaaatcgggcctggaatactttgatctttatttgctacatcaggcgatgggcgattatttcagcgcctggcgtgcgctggaagaggcctatgaggccggtaccctgaaagcgatcggcgtctccaatttttacccccatgtgttagctaacttctgcgaaactgtcagaattaaaccaatggtgaaccaggttgaactgcatccttatttcgcgcagcccgcggcgctggaagccatgaagcattatcacgttcagcctgaagcgtgggcgccgttaggcggtggcagacataatccgtatcaagatgcattgcttcgggggatcgccgatgcgcaccagaaaaccattgcgcaggttgttctgcgctggaacgtgcagcgtggcgtcacggtgatccctaaatccacccgccaggagcgcattgaagaaaattttgctatctgggatttcgtattaacagataacgaaatggcgcaaatcagcgccctggatttaggctatgttggcgaagcggtaaaacacttcaaccctgagttcgttcgcggatgtctgggggtgaaaatccacgactgaccgcggcaccgattggctccatcttcatctccccgcctgcgccgcagcgacgggctcggtatgctggttagcacccacgtgtttgccgcgacggttgtcaatgcggtagacgatcgtcacgggctgcgggccggcgggggtgacggtcaactccctgaccatttggccagcgtcgggcggcagggtcagcgaggtttctccctgagcgagcatctggccattttgcctgacctgccaggtcaggcggcaatcctcgcaggctgcccaggtatcgttaatcgcccacaggcgcaccgtcgccgggcttccctgacgccagctggcgggcaccggctcgatggacggcaggatcggctgataggcgcgctgcagggcatagtaaccggccttcggctggcgcagataatccaccaccccccagttgatggagggccatgtctcaacaaacataaagtggaacagggcggtcaccggctgataacgctgacggcgatagctctccgccgccagcgccaccagccgggcctgatatgcttgggtgttttcaatcatctcctgaatattgttgcctcgtggaataccggcaaatttaaaggtctggaaaggctgaaaattatggtacttccatcgcacccagccggggtcgtcggcagcggtggttttcggccacagcagacgggccgggataatggtcttcagggtggagagccggggcagcgcctgggcgccaaactcggtaataatcccggttttcgccggggcgagcaggtcgcgcagggtgccgaaataccagcctgcccagtagtgctcttcgacagcggaaaagcgatgcacgatgcgggaggtgtcttccgccagcgcatcgcccacccgctgcgtcagggtctggtttaaggttttacgccagtcggggaagcgtttctccatccacggcgagttccacggcggctcgttgtgaccgccccagacaataatcgccggtgaattgccgaactggtccatcatcgcccgggtctggcgcacggcgttatcggcgaaggcggcgctgtcatcataaccccactgcagcgggacatcctgccaaatcatgagtcccatctcatcggccacctcatacagcgcgcggcccgccacgtggccgtgtacacggatggcgttggcgttcatcgccgtgacaagcctgaaatcccgacggtactttttccgcgtcatggtgcttagccatggggagccaatatagttgctgcccttaatgaacagccgtctgtcgttgatgcgccagccctgattatccgccagcgcttccaccttacgtaatccggtgcgggtgacggcggtatccatgatcccccgcttatccacgagggtggcgcgcacgcggtacaggttcggtttacctgtgcccaccggccaccagagctttgccgagggcatgggcagcgagacgcgcagagtgcctgcggtattctccagggtgaccgcaaaggcctgctgaaaaggcgggccggaaaaattgtccggggtggccgtcaggcgcagcgtgacggggccgggcgtcacggcccgatagcggatttcggcacgcagcatgggcttctccagcccctgttgccagtccgggcgcaggatcacctcgtcgatagtgacgccgcggctcagatggagcttcaccggcgcccagatccccccggagttggcatcctgcccctgaaccgaccaggcgccgcccggacgggtatcgtgctgattgaggatccctttcatcagcgtcttgtgcagcggccagatcttttgcgggtcttcataggggctgtcgacccgcacggcgagctgattatggcggcgaacggccccggtgatgtccaccgggaagcgctgaaaatagccttcgtgccgggtcagcgtcttgccgttgagcgccacctcggcaaagtaatcgacgccgtcaaacaccagcgtagccatggcgtccggcgtcaggccatgcagggtaaattgatggcgataccacagggcgccctgatgatcgtatccggcgctgtaccagtttgccggtacccgcagcgtgcgccagtcgccgtccgaagcctgcgcgccggcgaaggcgctgtcgttggcgtcatgcacccgccattgtccggccagtgaccaggtcaccggcgcagaaccggcgtgcgccagcggcaggcaaatgaccagcagcagaagacgtctagcgatcatggggaacctcctgcgttctgcggcgcagccacaggtggcagcccgcgatcgcctcggtcagcgcgtcgcgcaggtcgcccggcacgctttggtctggcgaggccgcctggctctccagccgctggagcacactggcaaggcgttgaaaaccaagggtggcggcctcgccgcgcagtttgtgggcggcgcggcgccatgtctcccggtcattggcgtcaatggcgtggttgagggcggcggccgcagcattaagtcctgcagcgaagagtcccagcaactcctcgacaagctcaggatcgtcggcgcactgtttcagcaggcgggcttcgtccggcaggccttcctcttcctccggcgcgctatcttccgccgcgccgacgcgggcgatggcttcccgtagcgcctcctggctcaccggcttagcgatatagccgtcaaaacccatcgccagacagcgttctctatcgccctgcatagcgtgggcggtcatggcaatcgcgggctgatgttgcctgcccagcgcgtgggtctcttcccgcagcaggcggatggcggtttcaccgtccatctccggcatttgcagatcgatcagcagaagatcccagcaggctgcgcgccagcgctccagcgcttcccgaccattgttcactacctcgcagcgatgacccaactgctccagcagtcgtctggcgaccttctggtttaccaggttgtcctcggcgagcaggatatttagcccggtctggtccctgaccggttgcgcaacgggggcaggcgttgtcgtcgccaccggcgtgggcaccagaatgccggcgataacctgatgcagttcgcgctgtgccaccggtttatgcagatagtgggcaatgccgatgcgcttaagcatattggcgtcaaaatggcggctcatggagctgagcataacaatctggttttgcctggcttcaggcaaagcggagagctccagcgccagggatacgccgtccatatccggcatctgcgcgtccagcaggatcagcggccatggcgggccttcggcggcccggcgtagcgcctcgccagcgttgttcacgcaggttggcatcagtcccatctggcgaagcatggcgtcaagcaggcgcaggttggtgctgttgtcgtcaaccaccagcacccgctggtggttgaagcgtcccggcggggcgctaccggagacggcggcgtgcaggccttccagcggcagggtgaaggcaaattcgctgcctgccccaggctggctctccaccgtcagctcaccgcccatcaggctgaccaggcgggccgaaatggttaaccccagtccggtgccgccgtagcgacgggtggtggagctatcggcctggctgaaggcctcgaagatcgccttttgcttctccggggcaatgccgatgccggtatcgcgaatgcgaaagcgccagcggttgtcgtcctcggccggcgctatcgccagcaggacctccccctgatgagtgaacttcagggcattacccagcaggttggtcaggatttgccgcagccgggggccatcgacgatcagcacctcaggcaccgcaggggagatatccaccagcagctcaatgcccttttcgctggcggcaggcatatgcgggcggatcagcgactgaacaaaagggcggatctccagcggctctacgtccacctgcatcttgcccgactcaatgcgtgaaaaatcaagaatgtcattgataatgtgcagcagcgactgggctgagctcatcaccagcgaaaggtactctcgctgctccgcggtcagcggcgtgtcgaggcagagctgcgtcatgccgagaatgccgttcatcggggtgcggatttcgtggctcatattggcgaggaaggcgcttttcgcttcgttcgcctcgcgggcctccttcgccgcctcaatggccagcagctctgcggctttacgccgggtaatatcctgcaaggtgccgatcacccgctctgcctgctgctgcatgttaagggtgacgatctgccccgagagcagcatccagcgccagccctgcgtcgggtgctggacgcgaagctcacattcaaaaaccggcatgtgctcgttttgcgaggcgatcatcgcctgctgcagagtggcgcgatcgtcctcgtggaccaggttgagcataaagcgcagcggaaagcgccactgcgcccgcgactggccgaccatcgccagcagggtgtcattcacctgcaggctgtcgtgggagacctgccagtcccagataccgatctggatcgactccgcggtgaataaaaagtcatcatgcagttgatgacgcgaacgccgggcctcgtcaagctcggtgatgtcggtatgcaggctgacaatcccgccatccgccagccgctgatgctgaacgtaaatccggcggttgcccgactggcggacctcgcagtggttcgtctggcggcagttgcggataatcgcctcgcgcagcgtctgttgccggcctgggtcgatgttgtatccggcatcgataaacttctccgccaggctctcaagagaggcgccgacggcgagccagggcgcgatcgttggataaaacagcgccaccttatcattccaggcctgcagtcgttcgcgctcatcgtagatcatcaccgccgagggcaggaggttaaggtcgttacggttagcggcatgcatgattactggccaacagtttgatagtggagctccgcttggcggcgcagatactcgagcccaggggcgatggccattgcccatgcggtgaggatctcctcatcgcacagcggatcgcaggcgcggacggttttgagcatcgcttcccgccagagggcaaaaaaccgcggcggtagacgcaggccttcctcgctctgcgctcgcgccaaccgttccagaaaatcgggtacaaagaggtcgccgttgaccgccagcatggcgaaaaagctcttaaagatcatctgctggccttcctcgccggagcgttgggagaagtgctgctcggtttccggtgacatatggataaaggtgctgtagaaggcctggaagaagcgctgtttgtcgtgctctggtacgacgcgattcaggctggcttcaaagagatcgcgataaaacttcatggtgcgctccttatgacccgttcgcccggcaggcagcgtcggggcgggttaaattcgtccgtcgcgcggtgggcaaagtagctgttgtcatccgcgaggccgtttttgaacaacggcccggcgttgtgtttgtaaaacagcgcctccagcaccatggcgttggtggagagggtgagggtggcgttgacgtcgccggtggcctcgacccgtccttcaaaccagccgcgctgcgggtcgttaagatgggtagtgaccgccatcagcgcatcggtatactcggtttcccaaagcgtccacaggacaaagaccgctttggtggtcacctgcgccagccgggggtagtacttcccgtcgtccccgagcgtattccaggcgtagccattcccccagacggtgtcttccacgtgccagggcgcctgggtaagcgaaaaatcggcccgggcggtaagcaccttatcctgcgtccagcgcgttttctggctgagccatatcccttccgcccgctcgcgcatggctttttgcgccatctccggcacgccgggcggctgccagccgaactccagtccaggcagcatggcgggcagagtagagagcactacgggttgccaggtggttcgcgggtcgcggtcgtcaacggcgaggcggcgctgataaataatcacatggcgcgccgggggggagagggccttgccggccggaaatccccacaggcgaaacgcgctggcggcgtattcactgtctcccagccggagctcctcgcggatcgtccgctgaccgttctgcagtgaggcggaccacagctccccgtctttatcgataaccggacagaagttccagcgcaggacaattttatcaatgtattcaccatactgcggcgcgcgttcggcggtgagccgcagggcgagcatcagtcgggccatatcttttgctgaccagccgctggccgccggtttgccgctgaagtcgacaggggtcgccgtctgagtggagtatagcctgcccggcgaaccgccgtcggtcagcgtcaggcgattgagggtgccgagcaggggcgtcaggcgggcgtcgaattccgcttcctttaccaaccccagctctctggcggcgagcagggcgataagggtgtcgcccatctgccatagcgttgcgcggggctgtttgtcgctgccgttgaccaggccggtttgcggctgggtattgttctcgacgtaccgccaggcgatctgcgcccacgagcgctcctgcggcgtcaggctgctgatgcgggcagtggtgtgccagccgcctttggtcagccagcgccaccccgcgccttcgcgataaaacagcgccagggcgataagaaaaaggacgacggcgatggccagccagcgggctatggttttaagcattgcgcggtcaccggcggaagtttaacgggctcgtcagccttgcaggcggcacactggcaggcctggcaggcgggtttggtgcgctgcgtggtcccggtctgctcgcaccatgttttgacggcgggggtgttgctcaggaacgggcgattgcgcgggcctttattgggttcaaagagatccaccagcttcttgtcccacagcgacggggcgaaatcgcggtttttcgggttgtcgctggaaaactgcagcagttttccctcctttttaaatagcagtgcttccagcatgatgccgttgttgttggcggtaaactcattgattggcccgtcgccgttctcatacaacccctcgtaatagccttttcccgcttcgttcgcgttttcaatggcgtccagcagacgatcggtatagggcgagttccacagcacccacatccccatcgccgctttgagcgacacggcggcgctattcggtacgaactggcctttgtcggttatggtgttccagttaaacccgtcgctgaacacggtgtcatagacaaagtacggggatttatcgagctgatgctcggagcgggcggtgaggatcccggtgatggcgtagcgattctcctgggcctggtagacccggtcagcgaagtttttcatccagggatgggagtactcgcgcgggctgttgttccggtcaccagggttatcaaagccaaactccatgccatacagcacgtaggattcactgaccacatagttatgctggctggtttgccgtgggtcgcgcgaatcataggggaccagcacgcagtaaatctccgccagctcgtagggctgcggccggctggcctgacaggtgttaaatccccacagctgaaagcccgccgcgccgtactcctcgtatcccagacggccttcctgaacgtatttgggctggccgttttccagatacgccccgtacagcgtgccgcagggatcgacaacatggctgaagtcccaccccagcaccacgttatcgatgctgttgctgtattccggatagcgctccttgatcaccttcagccagatcagcattctgccgatatccagcgccgaaaagccgatttcacccggcttgttctggtagttaaccttttgtccgcttatcgtgttataggctttgttgggtagttcgttacggaataaatcgagcttattcaacgtggcgagaaacttcagcatccgacggtcgaactccgccttatcaataatccccaactcacgggctgcggtcatcgcggccagataggaggcgctgtcccacatggtggtggaggggtatttgtttaccgcattcaccagcccggtggtgggctgaaagttggcgacgaagtattgccaggcgtttctggcgatagtcatctctctcggcgtcagctccccgctgcgcggggcgtattccgcagccggcagaccggtcgcggcctgcgcgccggagagcgagagccacagcgccatgagtccggccagcaggggaaaacgggaaaaataggtcagcttcatggcgttgctcctgctgaggacgagggtagaggggcagggctcaggcaggccagacacagcatctgcccccgggaaatgtaggccaggctttccagcacgatcgcgttggtatcgccgtcaataacgtcgttgacgctgcggttgagatttaaccctcgctgccagcccttgcccgggacctgcagcgtctgcacctgctggcgcagcgcctcgctccagctattacggaacagagcgtaccaggcaaaggcggtgcgggtggaggtgatcgccgtttgctccggggcggcgctgcgtggggcgaaggcgctctgcggctgccggtccgccagcgcgctggcataatccggcgcgggctcggcgtagtcagtgctgatcggcggcttgctgaccctcaggctatgacggcgctgctggatttgcatgatgcgccaggcgatctccgcactctgcgcgtcaaagcccagctcaaggccggtgagcaggtacggcaggctgatcagtgaaggctgccgcccccagggcgtgcgcagcccctcgtcgggcaccatgatgccgtcgatatcgatcatctgctgcccctgcggcgggttggtcaccgccagccccgccgcgctgtcgatcaaccgcagcgtatggctggcgtacagccggtagccaaagctgtcccgcggttcatccgccgccagcgcccagtggtgcagcggcgccgcggcctggctggcggggctgttgctgatgagcgcgccgacccgccactgattaaacagatcccgcaccgcggcggcgtgctgaggatagcgccagagcagggtttgcagggcggtgagcaggcgtcccataccgatggcggaggagtccgggttgccgaggatctgcagcgtgtcggcatggtactgagcggcgggcaatccctgggcgttgaggggcagttgaccgagggtaaacagggcggcggcaatgcgctcatcaccttcggcggcggtcacaatatgcagctgctctgcggcgaccacggcgaaaagatagctgccgacgctccacaggctgagccagggttcgccatcgtgcgcgttggccaggccgtttggctgggtattgttgacataatactgccaggccacccgcgcccagatcgcctcgtcaaaggtcagctcgcgcgggggagggagcggcggaaaatcctggctcaacgtcatcccgccgctgctctcgacgcgcgcgggcatttgtttttccacccacacgacaatcgcaaaacccagcaggaagccaatgaggatagtgagatagctgcgcgcggatagcagggcgtcgcggatcctcatcggctcgcctcctgctcttcggggggcgtccacatggcggcgaagatcagtggcagcatggcggcaatattcaccgcgccccagaaaatgttgatgacgtacccggaggggtcgtcaacctgaccgcgcgccacctgaataccgccccatatcagccccgtcagggtgagcaaaacgatggcaatttgcggcttgacgagatagagaaaacggcccgtctgtcgctctttcggcgtaacgtgaaatttgatctgctccccgcgcaaaacggtgtccagcgcccgcagattcatcgagaaaaaggagaggtaagaggcccggccgtcccaggcagaaatgccccaggtgccgaacataaaggccagttcggagacaataaaaaagggtaaaaagtgcagatagaaaggggtagaccacgccgacaccggcggaatgccggtgaagagatagataacaggcgagatcaggaatacggtgttccacacgcaggccagatacgaccagaaggtggtcgcgtacatcagcgtttgcggcagcgagagtttaaagcggcgtcggttgaagatgttgtcatggaacaggatatccagcgatccggcggcgtacttaaagcgctggatcatccacgtcagcatatcctgcggagagagcattttcgactcaatccgcgggtgcattaccgagcgccagcggcgggcagcgtcgccgtgcagcaggatggaggtataaatatcttccgagacgtggaacttatagggcgtcagttcagtatcgaaggcaacgtgggggcgcatggcgtcctgcagcgcttcccgcgttgccgggtcacgaatatcccgcgtatgacgcgcgatttcggcgtcaacgctccagacgtagctgcgcagcgccgcctgcatcaccgcttcccgtcggtgaacggaggcggcgccacagcagaacgcggcgttagcccagttgcggcgccgtaaaatcacgtcgtaaaacatgcgcggatcgttgaaaaaaggatcgcgaccaatggtcaccggaccgacgattttctgcgccagccagcccacgccatagcctgcaccgcctgctttacgccgcagccagctcgccagatcctctccttccgggagatcgaaaaaccattgtggggtctgcacccaggcgacgtccggatcgcgaaaatagccgagcgtgtggctcagcagggtcgggaaaacgcgggtatcggcatcacagatgatcagaaagtcgccatcggtatgttccagcccgttgcgcaggttaccggccttgtagccgatattgctctgacgggtgatatagttcgccccctcctgctcgcagaccgccttcatctccgggcgacgcccgtcgtcaaggacatgcactttataatcgagcggaccaggataggtcatctgcatggcgtcacggatcgacagcctgaccagctccacgtcttcggaataggtggcgataaacagatcgactttaatcggcctcgactccaccgtttcatccgcgcgcagacagtcgttgatctccgtcggggggacccctggcggaggatctttttcctgccataaattaatggtgaacagaactgtgccaatccacgccagggtttccgccagcaccagagggatcgcataccacagggcgtcagtgtttaaggacgcggtccagcgccagtaaatataattggcaccaagcaccagggcggccacagctaatacctgccaaatcattctcacccagcgcggggtgctgagcggttcaggcggtcggcgatgttcaaaacgggaaaaataaaaatccatagcaaggatatcctgattccgcgctgggtttgaatgacaggtctgttatcgattgggggcgttctgcagaacgcacaggggcttataaataacagtaaagtgagtgtagatggtggcgcaaaaatttcaacagcgcgaaatgatagtcaccgggatgacttaacatagtgtgatacacgccggcggaatttataaaacgaacattgcaagatagcccattctacactatctaaataatttgtaataaatgttgcagggtagacggcaggatccctaatgagccaggttgcttcagcgatttcgcaaaaagaaactcataaatcaatgccctggcgttactctctgaccggggatcgcgacctgcgtatcgactttatgcgcggtattgctcttgtgatgatggtggtggcgcataccgaagtgatgtcgatatttaatattttcagctgggaacgatttggtttgaccaccggtgccgagggctttgtgatcctgtccggcttcatgttagggatgctaaatcgtgtcagattacaaaaggcagtattactgacggtgagctgggggctttatcttcgcgcatggaaaatatatcaggttaatattattattattgtctcttttcttttgctgagatatttgccttatcttaatgtctatgaagtcactcattttaccgaccgcttttccgggaccagttggtcgctctatccgctaaccccgcaaataaaagagacgtggtttaacattatcctctatctgcagattggcccgcatcagacgcagatcctcggactctatatttttttgttattgctcagcccgctgtttctgggaatgctgcaaaagggtcacgtctaccccttactgggcgcctcgctgctgatatacggctgctggcaacgctggccgatacgggtcacgccctgcgaatttgaattcgcctttcccctgctggcctggcaatttatctttgtgctgggcatgtgctgcggctggtacaaagcggaactgatctctttcgcccgcacgccgcccggcaaagtcgccgtggcggcgctggtgttcatcgcgcttatccttgcgtttgtcgcccagaaccataccaatccttttatgccgcccgcgctgctgttgcacgtaatcccgccggcggattttaacgccttttaccatacctgggcggcgaaaaacggcctcggtccggtacggatcctcaatgatatcagtctgatggtcaccatttatctgctattgacctggtgctggcgcccccttaaccggctggcaggctggttcctgatcccgctcgggcagcgttcgctctacacctttattttgcatgtttacatcgtgctcgccgtaagccagctggttaccttcgatctgtggcgccaggcgtggatagagaacaccttgattcatgccgccgcgctgggcgtactgtggctgatggccaaataccgcgtcgccgcacgctggatacctaactaaggaagggcaaatgcgggagaaatatatgctggcctgcgcgctatggtgcgccatcgcaggtgcggaaggcgcagagaagaacgacgcacaaccgctgcgtgataaaaatggtgaaccggtgcaggccggcgtgtttaccagccgctggggacggcttttttccgggaatgacaaggtgttttcgggagcgctgagctttagttcgggtttaaaagagcagtggatgaccgtccccaacagctcagacagcgcagaacagaagaaaaaatataatcagacgctgaatcttagcctgcaatactcgccctacagcttctggttcgccaacgtgacatcccgtttaccggtgactgacaccagccgctataccgccgattttcgctatagttttggctacgacgactggcatgccaacaccttcagcctggtttacagtaactatggcgataaccacttctggacctcgggcagcaagcgtcacacctattttgagcagggggcgattaccctggcgtataaattttcgctgccgaagcccatggagcatgcgctgttgattaacaaaggcgacgccattatctgccaggcaggctacagctgggtgccgcgttattacgatctggagagtaacgatatccgcaaaaacaaaaatgtgctgcttggggggtgtggatatacctttaaacaacatttttttgtgcgcgccaccgcgttctggtatccggacagtagtcagcagcagccgtggaatggcgattatagttacagttttggctacgcgggctatacgccgggatcgttctctgtgcagtatgccaactatgccggtacccgctacccggggcatgacagcggcagcggcaagtttcgtgaaggcacgatcagccttacctggttcttgccgatttaggaggcgcgatgtcggcacagcacgtcctgattgttgaagattcgctggtttatcgtcggctgctaagccgaatgttgacgcagtggggttatatcgttagtgaggcggaaaacggtgtcgacgcgctggcgatcctcgaaaaccagcctgtcagcctggtgataagcgactgggagatgccggagatgaatggcctgacgctatgccgggaaattcgccgtcgccagtttggtcgctatgtttatctgatattgctcaccgcccgcgaagaccctggcgatttaacgcaggggtttgaggcaggggccgatgattttctcagcaaaccggtagagcagagcgagctgcgggcgcggttgcacgccggggcgcggatcctctccctcgaggctgacctcgccgcgcgcaatgcgcggctgagcgaagcgctgcgacagattgaacaggatctggagctggcggcgcgcattcaacagtcggttctcccggctcatcagctgcgccatcagggatttttctccgactggattttcctgccctcggcctgggtgtcgggggatatttttaacgtcttcccgctgggcgatcgtctcggattttactgcgtggatgtctccggacacggcgtgggggcggcgatgatgtcgctcgccgtcgcccgccagtttttgcatggcagggccgttgagcgctttctttttacggcagacaaccagccggcgtcgccggccgaggtggtggcgatcctcaatggtcgtttttgcagtgacgaaacagagatcgtcagctatttcacgttgatctatggcgtgatcgacctgcagaccggtgcgggcaaactctgtcaggccgggcatcccacgccttttatcgttagcccggacgctaccgtccgcccggtcggcagcggcggggcgccggtggggttgatagaccatctctcgtgggcagatgtcagtttttcgctggcgccgggagagcggctgtgcctgttcagcgacggtatcaccgaatgtgaaaaccggagcggtgaacagtttggcgaggcgcgcttgcaagcgtggctgcaggacagcgtgacgcagccgctgcccgcgctgctgccgcgttttgcccggcacctgatccgctggcgcagtggcgacgcgcaggagacccaggcgatggccgatgatgtttcactcttgattattgaacgtacaggggacagtgatgaaaattgaaactgaacggcaggcctcggtgacgatcctgacgccggcggtgcgtcggctggatgcttccgtcgcggtagcctttaaggcggcaatcgcccaggagataggcgaagatagcaccgatctgattgttgatttcagtaaaatcgattttatcgacagcagcggtttgggaacgctggtttccctgatgaaaatgatgaacggtaaaggagaaatgacactgtgcgcgctgaaccccggcattcgcaatatgtttaccctgaccaggatggatcgtatttttcgtatttgcgaggatcgcacttcagcccttgcgcagttcaatccgtgacgcgcccgtgaataacgtcatgaattttcctgcccaactcagctcgctatcaacgctggcggcgtggctggctcaacaaatggcgccgctgcccgtcggggaggagtggcgcttcgcgctcgatcttgccgtctgtgagacggctaccaatatcattcgctatgcgttgcatgaggatcggcaacgtgtttttcgtgtcgaatttatcgcaacggaagaccgggtgacgctgcgctttattgatgcgggagaggtctttccggccgagcgcctggcgctggcgcgtggcgatgagcgcttcgatgtcgatccgttagcggaaagcggcagaggtttgcggcttattctgcgcgcggtggactattttaatgtggaaacccgcgccggggagaatgtgacgaccctgataaaagcgttgccggatgccgttcttcgccattccaccgacgatcgcgtcaggtgaaggaacagagcttgcccccaggtgaatccccgggggaattttcccgcccgcgttcaccctcttcatccgtcttatggctgggcctgagcggtggacagcgcgcccaggtgataagggcgaagagtatctaacgtcatcatggccgatttgcagaaaatgcatttcgcaccaaagggatttttttccgtcacgtcaaactgggacgttctgtactgggagccatggcagcatgggcatctaaaatggatatgttcaatcataatgtaaaccttgtatgggtaatgttctgttgaaaagacaatggtcgttttcagggaaattaacgcggctgatttttgttaggagtaagccgggtattgggtcagtcggagggcttgtttaacgagccaacagggggctgacagggcctgtttacagaaaaagcaaaatactaacgggactgctcaaaggaaggtggtatcagggataacgcctggagatgagaacacgtacttagataataacttttcgtctggtaaatcgacttaacgattaacgcacgagccgcaaataatagcaaacattattttagccttccggatgcctgctgcgccaggggcgccttcatcagcaccgtcacccagtcgataaatacctgtacccgggcagagagctgccggctgctggggtagagcagggagagcggcagcggcgcagggcgaaaatcagccagcacctccgttaatactccggatgccagatcggcctcaaggcgggataagggtgcctgatacaggccaaagccaagccttgacgcttcggcgccgacgtcggcatcggaggtcagcagccgacagggcaaactgacctcggtctggcgaccatccagggtaaaagtcagcggcaaggtacggtgcgtgcgcgctgaaacaaaaccgatcgccacgtgtcccgccagcccgtcaatcgtatgcggggtgccgtaccgggcgaggtaggccgggctggcgcaggtgatctcctgtagcctggcgagcggccggcaaatcatctcgctatcgggaagatggccgccgcgaatgacgcaatccaccccttcgcggaccagatcgacgtcgcgctcgctttcgcctatctgtaacgtaatggccggatagcgggcgagaaactgcggcagcgcgggcagcagcagggttcgcgccagattgcccgccacgtccacccggatggtgccggagatgctccccccggcgctgcggttggcctcctccagggccgccaggatggacacgcagcgctgataatacagcgagccctccgccgtcggctgcacgtgccgggtggtgcgctgcagcaggcgcgccccaaggctagcctccagcgccttaatggctgcagtcgccaccggccgggaaaaacccagatccgcggcggcggcgctgaacgaaccccgttcgacgatgcgcacgaacagggtcagggtatccagtttatccatggcattgttcctgctggcaaaacaatcctgtcgcgccatgcggtcttatcgtcggcattcagaggcctataatcgctcatgttttcagcagagataaaagggggaaacatgaacaatagcgcaaaaatcgccctggtgacaggcggcagccgcggcctggggcgcgcaaccgttgaagcgctggctcagcgcggcgtgaacgtggtattgacctacaacgcgcattttgccgaggcgaacgatgtggtcgcgcgggttgaagctcagggctcgcgggcgatcgcgctgcccttcagcgccggcgaaaccgacacctttgacgggtttgtcagcgcctttcaggaggcgctgacggagctgggggccgatcggtttcattacctggttaataatgccggcaatgccagcggcatggggtttctgaatgctaccgaatcggagttcgatgcgctttatcgcatccatgtgaagggggtttttttcctcagccaaaaattattgccgctgctggcggatggcgggcgaattgtgaatatctcgtccggactgacccgtatcgtgatggcgaaccgggcgccctatgcgatcatgaaatccgcggtggaaaccctgacccgttatatggcgtttgagctgggcggccgcgggatcacggtgaactgcgtagcgccgggcgccatcgccacggatttcagcggcggggtggtgcgggataacccgcaggtcgctcaggcggtagcgaacatgacggcgctgggccgacctggcctgccagaggatatcgggccgatgatcgcctcgctgttatccgatgatcatcgctgggtgaatgcccagcgcattgaggtttccgggggaatgcgcatctgagcgaagaaaaccggggctgttttcatccgtagtcaatcgatatgtcagtggatgccgatatagcgcgacgctgtggagagataaggaaattatgatctgccgcgttgctcgttaaatattagtgattgaccttattgcctgaatgcgcaagattattgttgaataaacagtcaatatgctaaatatatttaatgcacgtatgaaaggatttaagatatggattttgaaaatgaactgaccagtaagatccttgatcccattcacggcactattcgtttgacgacactcgagattgcctttatcaatcaccccctgttccagcgcttacgcaacattaaacagaactcttttttatataaggtgtttccctctgcggtgcacagccgcttcgaacactctctcggggtgctgcatttatcaagtgaaatactcaataatttacgcctgaatgcgatacggtatcaaaagaaatatgatgatggccatgtgtttggtcatatcgatcagataccaaaacacaacattcaggagttgagactcgctgccctgatgcatgacatcgggcacgggccggtatcccaccagtttgagagttttatgcctggtaagcacgaattctccgatgttctccccacagcctaccattcaatcattgatgtattaagcaagccagaacagaaagttgaacatgaacagctttcgctgttgttcagcctgatgatttaccatgatctgagaaaacaaggtaaggtcgatgacgaaataaatatcgaaaatgtgttaaaaatcatcgaaaaaagatacggtgaccaacagatcattgaggaaattaatggaaaggcaacagatatcctgccgttaatgacctcgatcatctcttcctgtccgatcgatgccgaccggatggattacttgctcagagatggctatttctccggcgtcaagtgtggcatctacgattacaatcgcttgtttatgtcaattgtcccggtcgaggaacagggaaaattgtaccttgcttacaaagagagtgggattgattcgatcgctgagtttattggggcgcgctccagccttttctcgcaggtgtattaccataaaacaaaccgcgcctttgcgacgatgttgagcacattatgtgagattatgcaaagcaaggatccacaaaatgtcattatcgctgacgttaccgaccgtatcgttgaccatagcgatgaaagcttcatcgatgcgctgaaggatttttatttggcgtgcagtgatgattattttttgaatgacaaggttggtgaatggatagatatcagcgataccgaggcggttaataaaaaaatacttgatgacattattaaccgacacccatggtcgaaggtctatgaggccaaacactctgtgtataaagctaacatcgctgacaaggaaaataaggcgtggaagagtcaactcaccgggttattgacttctgtattacagcctcatttcaaaccacatgaatttgccgttgatattgtctccgactgcgcctttaaagacctggataaaaccgaagttaagcttttggtgaaagatcttaagaaccgctacgaaataaaaccgttaattgaatgtggtgataagttaaatcagtatcaaatcatcaaatattgcattcgggtatttgttgaccgcgatatcaaagaacgcgtaactcctgaaataatctataaaatcaatgaaatagtggtcaagcagatcgcgttgctgaattgatgatgcccgtcagggcagcgataaatctttcaggggctggttttttaaccggcccctgaagataagcggtaaatcgtggcgcatccccgccatcggtataacttacaacagcgcctttacccgagactaaacaccgcgctgaggcatagattcccgcaggggagcgggtggctcaacaaaaacgccggctcagtatggttattccgccagcagggcggcgaatttcgccagccactgtggatgagccggccaggcgggggcggtaaccaggttaccgtccacatgcgcctggtcgataccaatatccgcatagtgcccgccgctcaaacgcacttccggggcgcaggcgggataggcgctgcaggtgcggccctgcagaataccggcggcggccagcagctgcgggccgtggcagacggcggcgataggtttacgcgcggcgtcgaatgcctgtaccagtttaataacctcctcgtacaggcgcagatactccggcgcccggccgccggggatcactagcgcatcgtagttctcggcctttactgcggcgaagtcagcgttcagcgtgaagcgatggcccggcttttcgctataagtctgggcgccgtcaaagtcatggattgcggtcatgacatagtcgccagcggttttatccgggcagacggcatcgacctggtggccaatcatctgcagcgcctgaaaaggaaccattgtttcgtaatcttcggcataatcgccgaccagcattaggattttcttgctcatctttgtgtctcgttgtgggcgaaaggtgtcttagatatagcctggcgacttgcagaatgcgaaccgttcaggatgccgacgacggtgtcgtgtgcgtcttgtaaccgggttcatgtttttttgctaacgacaactttgtccgacatcgcgctgtggctcgttatccgcaaaaaatcggtttgtggggagtaaggggagcagaagaatattgttaccgtttagatttcgcgcctgcactattaagcgtccgccgcgaacgggcaatcggatggaagccagatattatccctctgagtaatttattgcgttgttacgctaaatttgcataatgagcgaattatattgccccgggcgtctctatggtttcctttattcatccgcttaatgttttagcccgtcttatagtatcctttgcaaacattcctttggtgcattatttattgaatttatcattgacggctgtttcatattttaaatattgatattcatggtgcttttattttcgtggtgaaaggggatgtttatgaataaatataattattaggtggttaagttgatcgctaatccatttttgctttatcatcgtcacgtttcacatcaatatatcttcaataattattccttaaggaaaggaactgctatggctgatacgttccagaatgaagtccccagggcgcgcattaatctcaaattatctcttcataccggcggcgcgcaaaagaaggtcgaactgccgctcaaactgcttaccattggcgattttagtcatggtaaggaaaaccggcctttatcggaaagagaaaaaatcaacgtcaataaaaataactttaacagcgtactttcggaatttagcccggaagttaacctctcggtgccgaatacgctgaccggcaatggcgaagaggagaacgtcagactgcgttttaccgacatcaaagattttgaaccggagcaggttgcccggcaaattccgcaactccgcgccatgctggcgatgcgtaatttattacgcgatctcaaatccaatctgctcgataacgccactttcagaaaagagcttgaggcaatcctgaaagatccggcgctgtcccaggaattacgcgacgaaatgagtgcgcttgccccgaaataagtgcggggcaagtctgttaatggattaaccgggaaaatgctaatgtctgttaccacagaaaacgcccctgttcaggggcaaaccacgctgcaggaaaacagcgcgggcgagggcgtttacgcctcgctgtttgaaaaaattaatctcaccccggcgtctcgcctcggggatatcaacgactttctggacgatgccgcgctctccgaggcgccggcggcggaacgtctcaccgcggcgatgcaggtgtttatggaacgcatccgtcagtccggccagcgggtggaaaagctcgacaaaacgctgatcgaccaccatatcgccgagctggatttccagataagccgtcagctggacgcggtgatgcaccatcaggagtttcagcaggtcgaatccctgtggcgcggcctcaaacagctggtggacaacaccgactatcggcagaacgtcaaaacggagatcctcgacgtcgccaaagacgatctgcgccaggactttgaggacgcgccggagcttatccagagcggcctctactggcacacctataccgcggagtatgacactcccggcggcgagccgatcggctcggtgatctcggcctatgagttcgacgccagcccgcaggatgtggcgctgctgcgcaatatctcccgcgtctctgcggccgcccatatgccgtttatcggcgccgtcggcccggccttcctcctgaaagagaccatggaagaggtggctgccattaaggatatcggcaactacttcgatcgtgcggaatatatccgctggaaggcgtttcgcgaaactgacgatgcccgctacatcggcctggtgatgccgcgcgtgctgggtcgtctgccgtacggtccggacaccgtgccggtgcgcagcttcaactatgtcgagcaggtgaaaggtccggaccacgaaaagtatctctggaccagcgcggcgttctccttcgcatccaatatggtgaagagctttgtcaataacggctggtgcgtgcaaattcgcggtccgcaggcgggcggcgcggtgaaagatttgcctatccatctgtacgatctgggcaccggcaaccaggtgaagatcccttccgaggtgatgatcccggaaacgcgggagtttgagttcgccagcctgggctttatcccgctgtcgtactacaaaaatcgcgattacgcctgcttcttctcggccaactccgcgcagaaaccggtgctgtacgataccgccgacgccaccgccaacagccgtatcaacgcgcgtctgccttacatcttcctgctgtcgcgcatcgcgcactacctgaagatgatccagcgcgaaaatatcggcaccaccaaggaccggcgtctgctggagctggagctgaacacctgggtgcggagcctggtgaccgaaatgaccgaccccggcgacgagctgcaggcctcccatccgctgcgcgatgccagcgtggtggtggaagatatcgaggataacccgggcttcttccgcgtgaagctgtacgcggtgccgcacttccaggtcgaggggatggacgtcaatctgtcgctggttagccagatgccaaaggcgaaggcgtaggttcggacgatgatgaaaacggaacgtccgttgtggggccggggcattatggtgtcgcctcagcattttcaacagcaggctgcgtatgcagcctggactgcggaagtgattgcccggatgggtcttaaccacccctggggagtggttgaggcgaccttcgaaccagagatgctcaaactgggccgcctgcaggctcacaggctgcaggtccggttccaggatggcacgatgattgatacggacaatgccgatgcgctgccgtccgcgctgtcgctggacggcgcgtccggcgaggcggtgatcgtgctggcgctgcccctgatgcaggcgaatggcggcaactgtctgaagccggaggaggtggccgaaaggccggtgcgcttccgccagcgctggcgcgatgtccgcaaccagtttggggatgatacccggcagattgccgtcatacagccggagctgatcctccgcttcgcccaccaggacaacagcgattacctgacctgtccgcttgttcgcctgcagcgggactcgcagggggcctggcttatcgacgagacgtttctcccgccgctgctgcagatccagggcagccgctggctggcgacgcagcttgaacagctgctcgtccagctccgggctcgtctgacgcgcctgatggccatgcgtcgcgaaagcaatgaacggatggctgattttgccgtggctgatgtctctctgttctggttgctgaatgcgctgaacagcgccgagccggtgctggggtactttctgcgttaccggcaaagcccgccggaacgcctctacccggagctggcgcgcctggctggtagcctgctgaccttttcgctcacccatcaggcgaatgccgtcccgatctatcagcatgaccagctgaacgcggtttttccgccgctgtttgatttactgggcgacctgctggaggcgagcctgccatcgcgggtggtggcgattgcgctggagcatgatgtccggctgcacttctggcaggcgcgtctgcacgatgcccggctgcgggaaggggctgattactacctgtcggttcgttcgtcggtaccggtcgcccaactgcaggagcagtttccgcgccagtgcaaagtgggcagtccggatcatgtcaaagccatcgtcaactcctcgcggacaggggtgcccctcacgccattgcgtcatgtgccggcggcgatcccgctgcgtctggaaaatcagtatttcagcctcgatgtgtcccaccctctggcaacggaaatgctgcagagcggcacctgtatgttttacgtcccggggatgctcggtgagcctgaacttgaactttttgcggtactacgaacgtgaatgagcctaaacgcggcaacgccgcgtccattgatattgatgcgctgctgcagaacacctggctgcaggttatcagcctgcgccacggcccgcagttccgcgatgaggaagggtacacgctatggcagcgctgtattgctgatgtcgagcgcgtgcaacatgagctgaaggtgagcgggcttgatgacgccagctgtcagcatattctcaccgcccagtgcgcgctgctcgatgaagcagtgaaaggtcgcggcgtggaggatgaggcctgcctgcagtggtatgacattccgctgcaggggcacttcctcggcaccatggacgccggcgacaccctgtgcgagcggatgcgtgatgtgttgcgtgaaccggcgcccaacctggccgtggtcacctgttttcagcgggtgatgctgctgggttttattggcagctttcgctccctccacgaccccgagcgcctgaagctggtcaacgcgctcggtgagcgtgttcctccttttcagtgcccggctaccgctcccgtactggtagagagtcgcgccggtctggggataagcggctggctggccccatggccggtacgtattggcctgagcgtggtggtggtactcgccctgtggtggggactcaaccactggctcgatcacctgctgctgaccttgttaccgggggaggtgaaatgagccccgcgcagcagcgtgggctggcgctgtgggccagtctgctgagtgcgctggtgtgcctgctatttttgccggttccccgctggggggcgtggctcattctgctggtcacgctggccctgatcatcgggatctggcgcatcgccagtcgtcgtaccggacgtaacgtcgcatcaaccctggcccctctcccggagggcgcttatcgccagccggtggtcctcgtttgcggcgacctgccgtgtgtctggccgccagcgtcaccggtgcgagtcgtcaaacagggctgctggatccgcgtggaaaagacggaggagctgcagcaggtcgcgcgccaggtattgagccagcggccggaatgggggcctcagctgtcggtgctgctctgcgtctgcccgcagcggcatgcgcaaagcgatgcgctgaccagcgctctgctggccctgcgctggcaactcagccagctgcgtcagcagacggggtatgccgtaccgctggcgctgcaggggcaggtgggcagcgcgatgagtcgcgacctgttgtggcaggcggcgataccgggtgaagcggtgaaagtctggcagccctcctgcgccccctgttccgtaccggcctgggtaagcgccggtggggcggccgcgctggagcagcaggtgctgatgaacagcctgatgggctggtttgaacagcacgtccatgccgtgttgacggaagagaataccgacctgccacctctgccccctgcggccgtgctgtgggggctcgggccctcgctgcctggaaggctggcatcgtcggcctggacgacgtggttatcccgacatagcggcctgtcgcgggtagctggctggcagcctggcgagagcgacaccggggacgcttcagctttgccggaattcatcctgccgcagttaccggcgggacggggactcacgccacgaggctgggcctggcgcgcggcgctcgcgattttcaccctcgcggctgtcgccgcgctgctcagcagtggctggaacaatcgacaactgctgcagcgcgtgggcgtcgatattgcccgttatgagcggattgcgatggatgattatcgaccaaaagccagcgctgtcagggtgctgcgtgaagatgccgcgctgctcgatagctgggcgcgtaacggcgtcccgctgcgcctgagtctgggcttgtatcacggggagcagattcgcctgccgttgctggaggcgattcgcggttacgtgccgcctccgcctccgcccaggccggtgcagcacgtcgcgccggatgtcatccgccttgacagcatgtcgctattcgataccgggaaatgggtactgaagcctggttcgacaaagcggctggtcagctcgctgatggacattaaggccaggcccgggtggctgatcgtggtggcgggccacaccgacagcgtgggtgaggaaaaagccaaccagctattgtcgctgaaacgtgcggaatcggtccgcgactggatgcgcgataccggcgacgtgccggacagctgctttgccgtacagggctatggcgaaagccgaccaattgcaacaaacgatacgccggaaggccgtgcgctgaaccgtcgtgtcgaaatcagtctggtgccgcaggtagacgcctgccggttaccggaccaaccctctgcgtcatcccaggatgatggcgcttcactacacaatggagagtaattccatggcaattcctgtttatctttggctgaaagacgacggcggcgcggacattaaagggtctgtcgacgttcaggatcgtgaaggcagtatcgaagtggtggctcaggagcataacctgtacatcccgaccgataacaacactggcaaactgaccggcacgcgtattcatacgccgttcctgttcaccaaggagatcgactcctccagcccctacctgtacaaggcagtgaccactggccagaccctgaaatccgctgagttcaagtggtaccgaatcaacgatgccggccaggaagtggagtatttcaataccaaacttgagaacgtcaaggtggtgaaagtgaatcccctgatgcacgacatcaaaaaccccgcctacgagaagcacaaccatctggaacagattgagctgcgctacgagaagatcacctggacctataaagacggcaacatcattcactccgatagctggaacgaacgcgccaccgcgtaattgcccgtcatagttcgcgccgctggcgcgcaggcgacgttcgctcatcccggccgcatcgttatctttgcggccggggattattgcgggcgatcgcctgatgcgggcagcgtttctctgcccgccgttttttgctgagcgcctgagatacgggttctcagcaaagaaaaacacaatctgtctgcctgaccttgtgcgcttggggttcctgttcgggaacagcgacgggcggtagcgtgtccggaaccaataagagaggatctcatggaaaatccagccagcctgttacgccgtcttaatccctgctgtgcccgcgcaatggagggggcggcctccctgtgccagacccgggcgcatgccgagatcctgcccgagcactggctgcttaagctgctggaacagggggaaggcgatctgacggtgctggcgcggcgctatgaatgggatatggatgcgctgtggcaggatctgctgaactggctggataaacagccgcgctcggtacgtcatcgtccccagctctctgaccataccctgaggctgatgcaggaggcctggctgattgcctcgctcagcggcgaagcgcagatccgcagtgttcacctgctgatggcgctggttgaaaaacagaatctgatccagtgcgatggcctgtggccgctgttaacgctgggccagcgtcagctggaacgcctgcgccccttgcttgatgcccagtccgacgaacgtccaccagcgcagcaggaagcggcgctggcgcagccccatggcggggacgtggaatttgtggggcgtcctgcgggcaacgaactgaatgcggatgggctcaatccggcgctgcagaacgcgctggacaaattcactctcgacgtcaccgccaaagccagagacggccagattgacccggtgttcggacgcgacacggaaatccgccagatggtggatattctctcccgtcggcgaaaaaacaacccaatcctcgtcggtgagccgggcgtgggcaagaccgctctggtggaaggcctggcgctgcgcattgccgaaggcaacgtccccgacgcgctgaagccagtgtcggtgcgcacccttgacctcggtctgctgcaggccggcgccggggtcaaaggcgagttcgagcagcggctgaaaaatatcattgaggcggtacagcagtcgccttcgccggtgctgctgtttatcgacgaggcgcacacgatcatcggcgcgggtaatcaggcgggcggcgcggatgccgccaacctgttgaagccggcgctggcccggggcgaactgcggactatcgccgccaccacctggagtgaatacaagcagtacttcgagcgcgacgccgcgctggagcgccgctttcagatggtcaaggtggatgagccggacgacgacaccgcctgcctgatgctgcgcggcctgaagtcccgctatgccgaccaccacggcgtgcatatcacggatgatgcggtgcgcgccgtcgtgacgctgtcacgacgctatctcaccggtcgccagctgccggacaaggcagtggatttactcgacaccgcttccgcccgcctgcgtatgagtttggataccgtgcctgagccgctgacccgcatgaaggcgcagctcaccgcgctggcaatggagaagcaggcgctgctggaagatattgcgctgggcaacagcgcccgcggcgatcggctggcggccattgagcaggaggagatccgccttattctggcgctggatacccttgaaactcagtatggtcaggagctgcagctgacggaagcgctgctcgcctgtcgccgcgatatctcccgccaggcggaaattaacgacctgcaaaacgcgcttatcgccgtgcagcagggcaatccgctgctcgggctggacgtcgacgtccgcaccgtggcgacggtgattgccgactggaccggcgtgccgctctcctcgctaatgaaagatgagcagacggaactgctgagcctggaagagagtctcggcaaacgggtggttggccaggaggcggccctgagcgctattgcccggcgcctgcgcgccgcgaaaaccggcctgacgccggagaacggtccgcagggtgtgttcctgctggtcgggccgagcggcaccggcaaaacggaaacggcgctcgccctcgccgatgcgctgttcggcggcgagaaagcgctgatcaccatcaatctctccgagtaccaggagccgcacaccgtcagccagctgaagggttctccgcccggctacgtcggctacggccagggcgggatcctgaccgaggcggtgcgcaaacgcccctacagcgtggtgctgctcgatgaggtggaaaaggcccatcgcgatgtgatgaacctgttctaccaggtcttcgaccggggggtaatgcgcgacggcgaggggcgtgaaatcgactttcgcaacaccgtgatcctgatgaccgccaacctcggaagcgacctcctgatgcagttgctggatgaacagccggaggccagcgaatcagacctgcacgagctgctgcgcccggtgctgcgcggccacttccagccggcgctgctggcccgcttccagacggtgatataccgtccgctgccggcggcagcgctgcgcgccattgtcggcatgaagctcgggcaggtaagtcagcgtctggcttgccattacggaatcaccaccaccctcagcgagagcctgttcgacgcgctgaccgaggcctgcctgctgccggataccggcgcccgtaacgtcgacagtctgctgaatcagcagatcctgccggcgctgagtcagcagctattgagccatatggcggcggggcagaaaccgcgccaggtgacgctggggtatcacgaagaggaaggcgtcgtgatggcgtttgacgaggggacaatatccgatgagtagcgtgaaatcgttgttgttcagccataaccaccacctgctttcggtgaagggatgtgaagccgggcttgatgtgctggccttcgagggcgatgaagccctgagccagccgttccgctaccgtattgaattcaccagcgcagaccatgccatcagcaaagagatgatgctgatgaaggcagcctccctgacgctgcaggcgtcggtggctcagggcttcggcatcaatgttcagcaacccgtgcgggtgatccagggcgtggtgacggggtttgaacggctcagtacctccagggatgaaacgcactacgcgctgacgcttcagccgcgcctggcgctgcttaaccgctcgcaccagaacgccatttaccaggaccagtccgttccgcagattgtggaaaaaatcctccgcgagcgccacggcctgcgcggtcaggattttctgttctcgctgacaaaaacgtatccgcgccgcgagcaggtgatgcagtacggcgaggatgacctgcgctttatcacccgtctgctgggtgaggtggggatctggtttcgctttaccgccgacacgcggctgcacatcgacgtcgctgagttctgcgacagtcagcagggctatgagaaggggctgacgttgccttcggtcccgccgtcagggcagcagtcggccggggtggacgcggtgtgggagatggcatgtcgccaccgcgttgtggagcagcaggtcagtacccgcgactacaactaccgcgaggcgacggcggacatgaacgcgcaggtggatgtcacccgcggggagaccaccacctttggtgaggcttaccactggggagataactacctgaccgcggggaatgtccatgaccgccatccggcgccggagtccggggcgttttacgcccggcttcggcatgagcgttatcttaacggccagacccggatgcaggccaccaccagctgcccgacgctctgcccgggacaggtgctgaaggtcaccggcggagaggaggtggccggggagtttgctgatggcgtgctcatcacggcgatgcacagccacgcccggcgcgatgccgactttgcggtggagtttgccggcataccggacagcccggacgtcggctaccggcctgagcccggcgcgcgtccggtgatggccgggacgctgccggcccgcgtgaccagcacccgggaaaacgacacctacgggcatatcgacaaacacggacgctaccgggtgaatatgttgtttgatcgggcgcgctgggaaaccgggttcgagagcctgtgggtccgtcagtcgcggccgtatgccggagacacctacggcctgcacctgccgctgctggcggggacggaggtggcgattggctttgaggatggtaaccccgaccggccgtatatcgcgggcgtgctgcacgactcggcgcacggcgaccacgtcaccattcgcaatgacaaacgtaacgtcctgcgcaccccggccaacaacaaaatccgcctcgacgatgagcgcgggaaagaacatatcaaggtcagcacggagtacggcggtaagagccagctgaacctcggccatctcgtggatgctgaaaagcagccgcgcggcgaaggctttgagctgagaaccgacagctggggcgctatccgggcacagaaagggatatttatcagcgcggacggacaagtgcaggctcaggggcaggtgctggcgatggagccggcggtcagtttgctgaaaggtgcggtgaatcaggtcacggaatggggaagcattacgcaaacccatcataatgttatcccagacaccggcccattaagcgcactgaccacaggcgccagcgatcttaaacagccgacattgctgatgtcggccccgcaggggattgccgcagtcacgccggaaacaaccctcctgcacagcggtaacgggctgtatctgcagagcctgggagaggtcaacatcaccacggcacagcgctgttctctgaatgccagccaggctatttcactgctggcgcaacaggaggggatgaggctggtctccgccaaaggtccgctgcaagtagagtcgcacggcgatattctatcgctgaccgcgctaaaagatatcaccgtccagtcaacccaggggcatctgcagttgacggctaaaaatggcatcaccctgggttgcggcggcgcatatatccgtcttaccccgcagggagaggtacagatccacggaccgggggtgattagccttaaggggcagcatgatttgcaggggccggtcagcgaggagtttcccttgcctgagctaccggcatcggtgtgtaaagagtgccttaaaaaagcccaggcgctggcgcagggcttcgtgccgcgggaggcatagatgaccagacaatggattgaggaggtcgccggaacctgtcgggctttcggaacggattatctgcatgtcattatcgatcaggcgggggtggatttttccgttattccggcgctgaattcgctgtcagttgagtggcagtcgctttttcatggacttccggaagcatttattgtcgatgatgctccgctggtggcgcgctttacgcttgatgatcttgagcaaatgcgctggttacaggatatcagccagcaacttgccatccaggcgccgctgctcctgttctgcacatattggcccttttcggcgctagcgaactggctcacgcagtgtatggatattctgcaggaagggcgcagcggaattttacgcttttacgatacccgggtatttccgctgttgtttacgcacattctcagtgacgagcagcaagagccattgatgcgtccggccctgttttgggcgtggcaggatcttgacggccaggcgaaaggcatcaagggcagtggtctcccgccggaacgcgatgaaaaggcgccaaaaatagaactcagcgatcgccagcttgagcatctgatgtgtatcagcgatgtcatcgtcatgttgtcgcactgtgctccgcctgcgggcatgtttgactcaagacagtcactgttttcggcctgttaccagggcatggtggaggcgacacgccagggtcttcttctggatgacgctcgtgaagactgggtaatgaagaagtggcttgccgacgtaaaaaccagtgagagaccttcagaatgaaaagcctggtctggctgagtacacccctctcttcattaccctcaaaccgatagggagagtccaatgaaatctgcattaatcagcccgctgctggcggggttgctgctgttaactggctgcgcgcagcctgctgcccgggccggaggcggcggtggcggcaccattgacgccatcaaccacacaaaatgggcgatcaaccacttcagtatcaacggtcagtcgggcatcgacattataggtccgtttcaggggggcggtggcggctgctgcttcagcgtgcccgcccgctggacgccgggtatgacggtgcgcgttgactgggaaagtggagtcgcatttgccagagacattcctgaaattcctgaacctgcttatccgaattataaagggcaggataataaagtctggaccgaagaaatagcagaatataaccaacaaaaaagagtttggtataaaaaaatcaaagcactaaaacgtcagcacagcaaaaccgtcccgctgcccgactataacggccaggatgtgtgcggcattacggtgcactttttaccctgcgatgacgtgaaggtgaccaccagctgttacacctacggcagtccgtcctacccgataaaagagcctgtcaggatgaaggagcccgccgtatgtccgaaataaccgaaacccatgccgcctggatcccgccgccgtttccgccgcagggacgtctgccgaaccgggcgctgcaggttgggcagaactgccatcagcagaacagcgacgagcggcgctatcaccaggaactgtgccgggctgccggacgtcgcgtggagccgccgtgctgcaagacgctgcacatcagcctgtttttcgacggtacgggtaataacctgaacaatgacctgctgctctctgacccgaagcacccgaccaatatcgcgcgtttgtttcgtgccaccattggcgacggcaccgccggcggcgtcactgataccaaaaagatgccactggatggggtaaaagacagtggaggaaaatacttcaagttttatattcccggcgtgggcaccccgttcccggaagtgaatgacccggactattccaccatgggtctggtgggggcagttaagggggaggagcggattaactgggcgctgctgcggattattgatgtgctaatgcgcctgagtaaggacaaggaaaacaatagcataaagctgtccgaaggagccagccgtgaatccctcaaaaaaatgggtaccagctggaaccggctgtggtttggcggcagccataaccgctatgaagagttcactcgtttgctgaatgatttggcctctgatttgaagcccctgattattcagcctgagccgggcaagccgaaactgacaggcatcaagctgtatgtctatggtttttcccgcggcgcggcagcggcgcgcacctttgtgcgctggctgagcgaactgctgccccctccggcggcggaaggtgaaaaaccgccgcagtgcctgcagacaggcgggatgcagctgcccgtcagcgtggagtttctcgggctgctggatacggtggcctccgtcggggtggcgcatgtggtgccggttgccgacgggcatatgtcctgggcagacggcacgatggagctgccggatgatgaaacctatggcgggctgataaaaaaatgtgttcacctggtctccgggcatgagcagcgtctctgctttccgctggactcggtgcgccgggcaaacggcaaatacccgccctgtgccactgaggtggtttacccggggatgcactcggatattggtggaggatatccgccgggggagcaggggaaagcgaatggtgaggatgacagcttattgctatctcagatagttttgcatgatttgtatgcttcagcgtttttggcaggtgctccattaaaaataccaatgatagtaattccagaaggtaaattggtagatgtatggcggataatgccaattgaacttgaagagttatttctcatttcaattgaattgatcaaacgcttcaacgcctggcgtgagcttaccctgggccaaaccacgccgaaaacgttcgatcccgatgcagcctctcactacgaaccacctgccgccggcggcagtctggaaaccgtcattgctgagcagatggcctggatcaccgcctggcgcatcgaccgctatgccagaggctcgatgctgaaaacgccct

SEQ ID NO: 76 - DNA, 73577 bp, Unknown
  source: /note="Description of Unknown: MKP2_coc_1 Mutant Bacteria sequence"
accgcgcgcgttgccgtggaagcgggtatcgctgactactggttcaaatacgttggcctgaacggcgctatcgttggcatgaccaccttcggtgagtctgcgccggctgagcagctgttcgaggagtacggcttcaccgtcgataacgtggttgctaaagcgaaagcgctgctgtaaatccccaccgctatcgcccggcccgaagtcgggcgatacgctctctgagtaatgatcttccgatcatgagtttgtcttttcctttctgaaccatttcccactctattttgtgcgtgaccgctgatttctgtacgtttttttgtgcagaccggcaaatgtagaccagattcaataggcgcccgcacgatcgcgccgcgcccctcgattccgccggacgtctgtaaaggagaccccgccatgccgtcaccgatgatttatcaggatctcaccactgccgcgctgctcggccatgcagcgcagtatcacagcgagaccgagattgtctcggtgagtactggcggtgagaaggagcgcagctgctggggggaggtggccagccgtgctcagcggctggcatcggcgctggcgtcgctggggctgccgccgggcgcccgctgcgccacgctggcatggaacaaccgccgccatctggagatctattttgccgtcgcctccggcggctgggtgacgcacaccgtcaatccgcggctgtcggttgaccatctgcggtatatcctcaacgacgctgccgatgaagtgctgttttttgaccagacctttttgccgctggtagcgcagctgctgccgcagctgccgacggtgaaacacgtcgtgctgatggagtcccgcagcgaagcggcgctcagccagctgccctcattgctgttttatgacgatctgttgcagcaggggatggcagactatcgctggccgcagctcaatgaactgactccggcttcgctctgctacacctcgggaaccaccggccggccgaaaggggtgttgaatacccatcgttcgctggtcctgcacgccctgagcggcaaccagccggacgccgccggcatatcggcgaaggacagcctgttgccggtggtgccgatgttccatgtcaacgcgtgggggacgccgtttatcgccgccatggtcggcgcgcggctggtgctgccggggccgcacctcgatggcgacagcctgctgcagctgctggccgccgagaaggtgacggtggggtttggcgtgccggtgatctgggccggcttgctggcggcgatgcgccggacagaggtccggctgcctgaatttaaacgtgcgctggtcggcggctccgcgctgccgccgtcgatggccgaggcctttcagcgtgattacggcattgcgctgacccacgcctggggaatgaccgaaacatcgcccatcggcaccatcaacacaccgttgagcaaacatgacgcgctcccggcacaggagcagcaaaagcagcgcgccggtcaggggcggcccattttcggcatcgaactgcaggtggtggacgtggatggcgaaccgttgccccgggatggtcaaagccagggttatctgcaggtcagagggcactgggtggtagagcaatactatggtcaggacgcgagcgccctgaccgcggcaggctggtttgataccggtgatatcggtacgctcgacgccaatggttatctggtgatcagcgatcgggcaaaggatattatcaagtccggtggcgagtggatctccaccgttgagctggagaatatcgccatcgcgcatccgggggtgcgcagcgcggcggccatcgccgcccgccatccgcgctgggacgagcggccggtgctgctgtgcgtccgtgcggaagggggcgaagtggaggagaccgatctgctgagctggtttgagaagcgggtgcctaaatggcagatcccggaccgggtgatatttgtcgatgcgctgccggtcagcgccacgggtaaggtgctcaaaaatcagctgcgccaggcctacggagagattttaatgagtgagggaaaatgagccatgcgcgacccggtctgacgacctgttctcagtatgatgcggccctgcacgccttgtcggcggcgcgccagcgctgggcggaaacctcagtgaaccgtcgtctggcgctcctgcgccagatcaaggatgccctggccggcattgccccggcgtgggtggccgcggcagcggcggccaaagggctgccggcgggcgatccgctggcgggggaagagtggctggcgggcccctgcgcgctaatggtcggctgcaacgggcttatcgccaccctggagcaactggaggagaagacctttctgcggcggatcccactgcggacgctggcggacggccgcctggcgctgcgggtggtgcccggcacgctctgggatcggctgcttctgtctggtgttcgcgctgagatatggatgcagccaggcgtcacccgggcccatctcgaccgctatgcggcgcgggcatacgacatcccgcctgccgcgcggcagggcaagctggcgctggtgcttggcgccggcaatgtggcctcgattgcgccactggatgtgctacacaagctgtttattgagaatcaggtctgcctgctgaagctcaatccggtgaatgattatctgcacgatctgctggcccaggccctggcgccgctgattgccatggatgcgctccgcatcgtcaccggcgacgcccgggcgggggcgtggctgaccacccatcccgctgtcgatgagatccatatcaccggctcccgcgagacccatgacgtcatcgtctggggcgagggtgaggcggctcgccagcgtcgggccgccgggacgccgctgaacccgcgtcgggtgacctcggagctgggcggcgtcagccccaccattatcgtacccgggccgtggagcgaggcggacatcgcttttcaggcgcagcagctggcgacgcagaagatgaacaacggcgggtttaactgcgtggccagccaggtgctgatcctgcagcaaggctgggagcctgcgacggccttgctgaatcagctgtaccgactgatcgccgcgaatacccgcccggactactaccccggcgctgaaaaccggctgacagactttcgcctgcgcgcccgtcagccgctggagatagcccgcggtgacgcgctgccgttgattgtggcgaataccgacgatgatcccgggttctgccagcaggaggtctttggcccggggctgtcggtcacccgtcttgaggccgatagtgcggaaagctttctgcgccaggcgatcggctatgcgaatcagcggctgcagggcacgctaggggccaatattgtgatccacccgcgcacccgcaaagcgattggacgtaagcgttttaatgcgctgatcgccgagctgcgctacggcacggtggcgatcaactgctggagcggggtggccttcctgttagccccttgcccgtggggggcgtttcccggccacacgctcgacgatattcagagcgggcggggcaaggtgcataacagctttatgctggagaaaaccgagcgcacggtgattgaggcgccgtttcggccgtttccgcgtagtctttggcatggcgaactgacgctgatgcccctgccgccctggttcatcacccaccgggggcaggaagcggtggcgcagcggctggtggatttttaccatcggccgcgctggcgcaaattgccggcgctcctctggcgcgcgctgcggggctaaggtgagagcaaaaaaaagggcggaaccgcggttccgccctgcgggattaacggcccgctttcagcttctggtaatactcttcataaatggcgctggcgctgccgacgtcattctgccattcgcctttctcaatggttgcggcgtccggatagagcgatttatcgttggccactgccgggctgagcatcttgcgcgccgcaaggttcggcgtcggataaccgatggtttcagcgacctgtttggcgacatccgggcgcagcaggaagttaatcagcttcagcgcgccgtcgacgtttttggcgttcgccgggatcgacaggctgtccatccagaagatgccgccctctttcggccagatcacttccagcggggtaccggcctggcgggcgacgtaagccgagccgttccataccatcccgaggttcacttcgccttccatatacgggttcgccgggttatcagagttaaacgctgcgacgttgggcatcagctttttcagctcgttataggcggcttcaatctctttcgggtcggtggtgttgccggaatagcccagcttacgcagcgccatctggaacacttcgcgcgcgtcgtcggtcagcagcaggctgcttttgtattccggcttccacaggtcggcccagctggtgatagttttcgggtcaatcgcctcgctgttgacgccgatggccgtcgccccccagatataggggatggagtagtcgttattcggatcgaacggtttattcagcatctgcggatcgaggttgctgaagttagtcagcttgctcttatcgatcttctgcagcatgccttctttgcgcatcttgtcgacaaagtaggtcgacgggacgaccaggtcgtacgcgccgtctttataggttttgagcttggcgtacatggtttcgttcgactcgtaggtcgaatagataaccttgatgccggtctctttggtgaactgctccagcaggcccggcggcacatactcggtccagttatagaaatagagcgttttgctatcgtccgcgtgcgcagcgcccatgccgattgccagagcgctcgccgcgagcaggtggcgtgaccattttttcattttaacgtcccctgagttttatcacgtgcaattaactgactggcgatgaccatcaccagcgacagaaccaacaaaatcgtggccagagcgttcacctctggcgaaacgccaaccttgaccatcgaatagatcttcagtggcaggatttcataccccggaccggtcacgaacgaggagactaccacgtcatccatcgacagggtgaagctcagcaaccacccagcggctaccgccggcagggccagcggcaggataattttgcgcaggatggtcatctcgctggcgcccagatctttcgccgcctccagcatccgcacgtcaaagcctttcaggcgggagtaaacggtgaccaccacaaacggcaggcagaaggtgatatgcgaaaacagcagcgaccagaaaccaagctggacgccgatcagcataaacagcaccagcagagagatggccatcacaatatctggcgacatcatcaccacaaacagcatgccgctgacaaacggtttgccgcgaaagcggtaacggtacagcgccacggcggtcagcgagccgataagggtggcgaaggtcgccgacagcaccgccatggtcagcgagtgctgggcggcctgcagcaggctatcgttgttcatcagcaggctataccagtcggtggtgaacccctgccagttgatgccgaagcgcgaccggttaaacgagttaacgatcagaataataatagggatgtagagatacgtgtagatggcggtcataaagccgccgcgcagcagtcgaccgatcattccagctccacctttttattcagcaggcgcgccgcgcgccagtaaatcaacagcatcaggcccatcaccagggttaaggtaatgctggttgccgcgccgaacggccagtcacggatattgaggaactggcttttgatcacgttgccgatcagcaggttcttggcgccgcccatcaggtcggaaacgtagaacaaccccatcgccggcagcatcaccagcagacagccggcgatgatccccggcatggtcagcgggatgataatgcggataaaggtctgcagcttgctggcgccgagatctttcgccgcttccagcagcgggcgatccagtttctcaatgctggagtagagcggcatcaccataaacggcagcaggatgtacaccaggccgatgatcaccgccgagggggtgaacataatgcgtatcggggtgtcgatcacccccagccacagcagaaactcgttcaggtaacctttagtgctgaggaaaatcttcagcccgtagatgcggatcaacgagttggtccaaaaagggacgatcagcaggaacagcagcaggggccgtaccttctgcggcagccgggcgaggaaccacgcaaacggatagccaagcgccaggcaggcgagggtcgccagcagcgccatgtttagcgaatgcagcagaacgtcataatagagcggatccagtagccgcgaatagttatccagcgtgaagaccagtttgacgaagttggcatcgtcgcgggtcaaaaagctggtggcgatgatcatcaggttgggcaggaagacaaacagcaccagccaaccgacgatagtggcgatcaccacattctggaatttactggtgttcttcatcggccagcaccacctcccagctttccacccaattgatagacattttctggtcaagagagtggtcgaaatccgggtcgtcttcgttaaagaactcgctgaccatcaccattttgccgttctccagttccaccaccgactccagagtcatgcctttatagttgcgctcgcggacatagccgatcaggccatcggcgtcgctgttatggtggatctcgtcgacgcgcagatcttccgggcgcagcaggacatgcagacgctggccggcctccacggcaaaattgacggtgatgttgcattctcgtccttcaacgctggcgcgcacgcgctgttcgtcgagacgttcaattaccgtggcgtcaaagatattgatctcgccgataaagctggcgacaaacaggttcttcggctcttcgtagatctctcgcggggtgccgtcctgttcgattttgccatcacgcatcaccacgatgcgatcggacatggtcagagcctcttcctgatcgtgggtgacgaagacgaaggtgatcccgagcttacgctgcagcgctttcagttcgttctgcatctgcttgcgcagcttgtaatccagtgccgaaagagactcatcgagcagcagcagacgcggtttgttgaccaccgcgcgggcgatggccacgcgctgctgctggccgccggagagctggtgcggtttgcgctgggcaaacgcctccagctgcaccatttttaaggcatccatcacccgtggggtgatttccgccgccggggttttctgcatccgcaggccaaaggcgacgttctcgaacaccgtcatatgcggaaacagggcgtagctttggaatacggtattgacgtggcggttttccgccggaacatgagtgatatcgtgatcttcgagatggatccgtccgctgtcgacgttttccaggccggcaataaggcgcagaacggtggttttaccgcagccagaggggccaagcagagtgagaaactcaccattgttgatggtcaggttaaggttgtcgatgaccgttttaccatcaaagctcttgcgaattcccgccagatgcaccagcggcgaacgcgaacgcggttgtatattcaatttttgactctgtcccatgtagacgcaacggcaaatttccggccgctgcggggtttgtgattaaccacctttggggttgcacgtttttaataagggccagcattctacggcaaacgagggtaatcgccaatccttgatacgcccgcatagtctacctttacaccataacgtcggttccgttattaaatttcgctttacgggctaaaaatgacctgacgcaatatttgtcttttctggcttatgaataatgttgtcacaaaagaagagggtggctacatggataaattgcttgagcgttttttgcagtacgtttctttggacacgcagtcaaagcctggcgttcgtcaggtccccagcacggaagggcagtggaagctgttacgcctgttgcaggcgcagctggaagaaatgggactggtcaaggtaacgctgagtgaaaaagggacggtaatgggaactttgcccgctaacgttgagggcgatatcccggccatcggttttatctcccacgtcgacacctccccggatttcagtggtaaaaacgttaatccgcagattgttgaaaactatcgcggcggcgatatcgcgctgggtatcggcgatgaggtgctctccccggtgatgttcccggttctgcatcagcttttgggacagacgctgatcaccaccgacgggaaaacgctgctcggggcggacgacaaagccggcattgccgaaattatgaccgcgctggcgaccctgcaggcgaaaaatattcctcatggcgatatccgcgtggccttcacccctgatgaagaggtgggtaaaggggcgaagcatttcgacgtcgaggcctttgacgcccgctgggcctataccgtcgacggcggcggggtcggcgaactggagtttgaaaacttcaacgccgcctcggtgacgataaaaattgtcggtaataacgtgcaccccggcaccgcgaaaggggtgatggtcaacgcgctgtcgctggccgcgcgcattcatgccgaagtaccggccgatgaagcgccggagaccactgaaggctatgaaggtttttatcacctcaccagcatgaaaggcagcgtcgatcgggccgagatgcattacatcatccgcgattttgaccgtaagcacttcgaggcgcgcaagcgcaagatgatggagatcgccaaaaaggtcggcaagggactgcacccggactgttatattgagctggtgatcgaggacagttattacaacatgcatgagcaggtgatcgcccatccgcacgtggtcgatattgcccgccaggcgatggtggactgcgatattgaaccgcagatgaagccgatccgcggcggcaccgacggcgcgcagctctcatttatgggactgccgtgcccaaacctgtttaccggtggctacaactatcacggcaaacatgagtttgtcaccctggaaggaatggagaaagcggtgcaggtgatcgtgcgtatcgccgagctgacggcggcacgcaaagggcattaatcttctcaggcggcccggtagggccgcgtgtcggacaagatgccggatggcggcttcgccttatccggcctacggtccagccggtgagcgcggaacccgtaggcccggcaagcgcagcgccgccgggcaggatgatggctcagtcgccaaagaaccagtaaccgctgttgaccagcgctgccagcatggcgaggaaagaaggatcttccagcgcatcgccaaaatggtcggcgcgcagcgtcagatgggtggctaaggcgtccagcgccggacggtgcggggagttgatcttctcgccgttaacgaatacctcgccgtcaatgcgcagcacccgcaggccgcccaggcgttccagggtatcgccctgctgcagggcatcgtaaatctcatctggctgatacggcggctccggcggcgcgacgtcgagctcatgacgcgactgggtgataaactcgccgaaccactgcttaaagtgctccggttggttaatcagacccagcatcatctcgcgcaggcggtcgagttcggtcggtaaaatatccgccggatggtcgcgggacggcacgtccggatcggcgtagcgctggctgcccagttcgcgctggaggacatagtcggcaaagccgctaaacagctcgcgggcattcggcgcgcgatagccgaccgaatagttaagcgagttttccagcgaataaccctcatgcgggaatcccggcggaatatagagaatatcgcccggctccatctcttcatcgatgatcgcctcgaaggggtcaacctgcagcaggtccggatgcgggcagtgctgtttcatcggcaccttttccccaacgcgccagcgccgacggccggtgccctgaatgataaacacatcatactgatccagatgcgggccgacgccgcctcccggcaccgagaaggagatcatcaggtcgtcgatacgccagtccggcagagcacggaacggatgcatcagcgctgcggacggttcatgccagtggttaaccgcctgcaccagcagggaccagttgttttcgctcaggtgatcgtagctttcgaaaggaccgtgactgacctgccattttccatcctgatggctgacaaggcggctatcgacctcgctctccatggccagtcctgccagttcgtccgggcttagggggtcgataaaattggcgaagccgcgcttcaataccaccggccgtttttgccagtagcgttcgataaagtcgggccagttaagcgttaattgataatccatattgatattccactgcaggtgtctgacagggattataacggatgcggcgccctggcgatgcaggcgccgtgaaaaatctcaacgattaactctgtttatcttccatctgctggcggccaaacaccacctccatgcaggcgccgccgagcaggctttccccggcgatgatctctccatcatattgttcgacaatttcacgcgcaacggagagccctaccccctggccgggacgcagggtatcagcccgctggccgcggtcgaaaacggcccggcgctggctctgcgggatccccggcccatcgtcttccaccaggatgtgcagatggctgtcggtggtctggcgcacggaaacttccacgaactccagacaatacttacaggcgttatcaagaacgttacccatcacttccataaaatcgttctgctcgccgacaaaagtgatctccggcgagatgtcgagcgagatattgacccctttgcgctgatagaccttgttgagagcggaagtcaggctgtcaagcaggggggcgatcgggtgtaattcccggctcaagagggtgccgccgctgcgcatgctggcgcgatgcaggtaataaccaatctgctgcgagatgcggcttatctgctccagcatcaccggctccgcctcgtcgacgctgatcttctcgccgcgcagcgagcgcagtgtactctgcatcaccgccagcggcgttttcagactgtgagtgagatcggtgagggtagtgcggtatttgtcatagcgttcgcgctcgctgcgaaccaggcggttgaggttgctgaccagccgggtcagctcgcgagtggtgttgggattgagcttttcgcggtgatgttcctccagttcgcgcacctctttggccagcgactcaatgggccgcaggctccaccaggcggcgacccacagcagggggatcaccagcagcaggttggcggccagcacatagacaaaccagctccacaccatatagctgcgcttgagctccaccggaatggtgtcgaccaccacaatgctgagctgaggcattttgctggtggccgggtagaggttgatcgccaccgagtgggtcatctcagagtcgtcgccctgttcgcggatagcgtccagctgttcctgaatctcatggttattgcgcaacagcatactgctgctgtcgacatcggcttcaatctcatggaagccattgcgtttcagccattccggttgaatgcgtttcgccagccatggaacatcacgctgcgcccacagcagtttgccctgctcatcgtagataagggtcaccgtcgggctttccatattcaggttttccgggatatcgacgtcaatagcgccgttttcccatctcgccagcatataaaagagattgctctcgccgcgcagcaggcgaaaggtggttttatcgaagctaacgctatagcccaccagggccaccatgccgtaggccagggagagcaccagcaccaccccggcggtcgccagcaggaagcgaacccgtaatgacagcgggaagatatgtcgcaacagtcccttcatcagcgcaattcgaacagatagccctggccgcgcaccgtggtgatgacgtcctgtgggtattcagcctgaattttcttgcgcagccgacccatcagcacgtcgatggtgtggctttctcgcagttcggcatccgggtaaagctggagcatcagcgaatctttgctgaccactttgccgcggttacggatcagggtttccataatggtgtattcaaaggcggtcagcttgatcggctggtcattcaccgacagctcgcgccgggagaggtcgacctggaacggcggcagggagatcacctgcgaggccagaccgctgttacggcgcagcagcgcctgcatgcgggcggcaacctcttcaatatggaaaggcttggtgacgtaatcatccgccccggcgctcagcacttccactttatcctgccatccttcgcgggcggtcagcaccagcaccggcagcgacacgtcgtggctgcgccagcggcggatcagtgataaaccgtcttcatccggcaggccgagatcgacgatggcgatatccgggagatgttcgcccagatagtagtccgcttccctggcatcttccgccgcatcgacctgatggcccagctcctgcagctgaactttgaggtggtgacgcagcagggcattatcctcaaccacgagtacgcgcatggctgttctccctagcattttcgatagtagtctgacgctcattatatacgcaaaatataaacggctgttaaataaagctttttataaaaagggcccctggtgcccccgggctggccagcattctgcggcgccctttgcgcatactgcatggaactccttcattctatgcgtaatttcagtaaacgcccagcggcaggatgcgaacggcgagcgggttggtgatgttaattttttgtgtaatagtgctggaatcacccctcaagaacgtcgcaggttatccattatgtctcagcagcagagcgcggactgggtcaggctggcgcaatcgcccagccggacggaacgcatcgaagccttcttcggcggccacggctacgaaccgcaccggcatgatacctacgccatcggccagacgatcgccggcgtgcagagctttcactatcgcggcggactccagcacagcctgcccggcggaacgatggtgcttcatccggacgaaatacacgatggcgaggcgggcaccgaggcggggtttcactaccgtatggtttatatcgaaccggcgctgatccagaagatactcggcggcaggccgctaccgtttatccccgacggcttgtcggcggatccacggctacgtcacgccgcgcagccgctgttgaaagcggtcacggataccttcgagccgctggaggaagaggatgctctgtacgacctggcgcagaccctggccgttgtcggcggccaacgttcccgtcgccaggcgtttgattatcaggcggcggagagggcccgggagtatattcatgcctgttttatgcaggatatgaccctcgacaccctgtcgcaggtcagcggccgggaccgctggagcctgagccgggatttcagaacgctgtacggcaccagcccgtggcgttacgtcatgatgcgtcggctcgatttttgccgccagcggatgcgcgccggggaacgtctggtggatattgccgccgacgcgggctttgccgaccagagccacatgacgcgccagtttatcagccgctttggcctctctccggggcgctggctgcgggctatccgcggataaggcggcgcaggttgcacaatcgttcaagcgtcaacgcggcgaggcgaactatgctgactgcctttatcataaggagacagcccatgtttcaactcgttaatcttgctcataaattttccctgttcagcgaacaatggcagcccaaagtggtggctgaaatgaacgactatcagttcaaggtcgtgcgcatcgccggcgactttatctggcacagccacccggaaaccgatgagacattgatggtggtggagggggtattgcgcgtggacttccgcgacgggcatgtgctggtgaaggccggggagatgatcgtcgtgccgcgcggggtggaacataagacctcggcggagacggaagcgaagctgatgctgattgagccgcgcggggtgttgaataccggccacgagggcggcgagcggacggcggtgaacgacgtttggatctgatcgctttccggcgataaaacgcccctctttccggcggaaagaggggcagggcgattacttcagctcgtcaaccatgctggttgcccgaccgatatagttggccggggtcatcgctttgagacgcactttttcctcttccggcagggcgaggctgtcaataaactgcttcatcccttccgcgtccacgcgtttgccgcgggtcagctctttcagcttctcgtacggtttttcgataccgtaacgacgcatcacggtctggatcggctcagccagtacttcccagttgtgatccagttcgtccagcaggcgatcctggttcagctccagcttgctgatccctttgagggtggactgataggcgatcagcgcatagccgatgcccacgccgaggttacgcagaacggtggagtcggtcaggtcgcgctgccagcgggaaaccggcagtttgctggccaggtgctgcatgaccgcattggccaggccgagattgccttcggagttttcgaagtcaatcgggttcaccttgtgcggcatggtggaggagccgatttccccggcgatggtcttctgtttgaagtggttgagcgcgatgtagccccacacgtcgcgatcgaagtcgatcagaatggtgttgaagcgcgcgatgcagtcaaacagctcagcgatatagtcatgcggctcgatctgcgtggtgtacgggttccactgaatacccagcgaggtaacgaactcttcgctgaactgatgccagtcgacttccgggtaggcggcgatgtgggcgttgtagttacccaccgcgccgttgattttaccgaggatttccacctggttcagttgacgatactggcgctccatacggtaggcgacgttcgccatctctttacccatggtggacggcgttgccggctggccgtgggtacgggagagcagcggcacatcgcggtactgggtcgccagatcttttaccgcgtcaatcagtttgcgccagtaaggcagaaccacttcgtcgcgggcggttttcagcatcagcgcgtgggagaggttattgatgtcttcagacgtacaggcgaagtgaataaactctgataccgcgtgcagctcggcgacgtcagcgactttctctttcaggaaatactctaccgctttcacgtcgtggttagtggtgcgctcgatggttttgatgcgctccgcgtcttcaacgctgaaatcggcgacgattttatcaaggaaaccgtttgcgtcggcagcaaaagcaggaacttccttgatcgctgcgtgggcggccagtttttgcagccaacgtacttccacctgaacgcggaatttcagcaaaccgaattcgctgaagataccgcgcagcgcgctgactttatcgccgtagcggccgtctacaggggaaacggcggtcagtgaggataattccatagatcacaactccggggttaaatgagcaagaatttgctttgcctggttaaccagacgattacgggaaaacataagctgcagacgtccgccgcccacctgatgccagagcaccgcggcgcgaatacccgccagcagcgctgagcgaactttcgcctgcacctgcgggctttgcagcacggcaggggagccggtcacctgaatacgcggccccagcgggcttatcacatcgacatagatgcccgccatggcgctgagcagcgtttcggactgcaggtcaaagtgttccagctgacggtgcaggccggcgatgcggttgccgagcgtgtccatcgcccctttactggcggcgagcttgcgctccagcaccatcaggctcagggtatagcgcgtcagttcagcattgaggccctgacggctgctggtattgagcaccccgagcagcgtttcaagaccgaggcgaagattggcttcactgccaccgaacaccgccagcgtcgactcaggatcgaggtcgatgatgctgttcagcgacacatgcagggcatcgctgtcgcaatgtccctgatgcgccagttgctgaaccagtcgcgccgcctggcaaacgccagccagcgccagggtgatgtcatagtaattcttcgccacacatactccttgtcagccgccagggcggttcgtcccggcggaaataacgcgcgttcaggactgcagaggcagtcgttgttcaataattccgccgccgaggcacacttcccctaaatagaacactgcggactggcccggggtcaccgccgcgaccggctcatcgaagcggacttcgatacggtcttcatccagcgcggtaacggtgcaggggatatcggtctggcgatagcgggttttcaccgtgcagcgcagggtgccctgcagcggttcacggtttacccagtgcagctgttgggcaatcagaccgacggacatcaggcgcgggtggtcatggccctgggcgacgataagaatattattctcaacgtctttatcgaccacgtaccatggatcttcgctaccctctttggtgccgccgatacccagccctttacgctggcccagggtgtggtacatcagcccctgatgagtaccgatctcctcgccgtcgacggtgaggattttgcccggctgcgccggcagatagcggccaaggaaatcgcggaatttacgctcgccgataaagcagatgccggtggaatcttttttcttcgcggtgatcagatccagctcttcggcgatcttacgcacctgcggtttttccagctcacccaccgggaacaggctctgggcaatctgctcgtggctaagggtgtagaggaagtagctctgatctttgttgccgtcgaggccgcgcagcagctggcttttaccgtcgacatcggcgcggcgcacatagtgcccggtggcgatgtagtcggcgccgaggtcttcggcagcaaactcgaggaaggctttaaatttgatctctttattgcacagaatatccgggttcggcgtgcggccggctttgtactcttccaggaagagctcaaagacgttatcccaatattcggcggcaaagttaacggtgtgcagttcaatgcccagcttatcgcagaccgcttgcgcatcggcaaggtcggcggcggcggtgcagtattcctcgccgtcgtcttcctcccagttcttcatgaacaggccttccaccttatacccttgctgcagcagcaggtacgcggagaccgaggagtcgacgccgccggacatgccgacgatcacttttttctggctttctgacatggaaatactcgctacattgaacttcgaggcggcgtattctagcacgcgctcaccgttcattcaccccctgtgaacggccagttaaatgcgccaatcagcgacagcggctgccccgggtcctgcaggtagcagcgaatgctttcggcaaccagcggcgagcgcaggttcggcgcgttaagaatttcctcagcactgagccacaggcagcgatcgatatcgctgtcgtgtggttcagtggcgcacagatcgctaagttcgatggcgaacaggaagcgcagaaacggcgtgttatcgggagccagccactgatgcatgcggatgaagtgctgcggcgtggcgcgaatgccggtctcttcccacagttcacgttcggcggcctgcagcagcgtttcattggcctcgagatggcccgccggctggttccacagcgctttgccgttaatggtttcttcgacgatgagaaatttatcctgggcgtgaaccacgcaggcaacggtgacatgaggtttaaacatcgcttttccttttcagttattcggctttgcgccagtcgccgttgggcagtccgtcgagggtatagccgcccatggcgtagcggatcagccgcagggtggggaagccgacgtgggcggtcatccggcgaacctggcggttgcgtccctcgtagagcgtgattttcaaccagcgggtgggaatcgatttgcgctcacgaatcggcgggttgcgcggccacagccagacgggttcctcgacaagttctacgccggcaggcagggtggggccgtcgttaagggtgacgccgtcgcgcaaggcggtcagcgcctcgggcgtgggttcgccttccacctgaacatagtagatcttgccggtgcgcttacccggctgggtcagcttcgcctgcagcgcgccgtcgttggtcagcaccagcaggccttcgctgtcgcgatcgagccgacctgcggcgtagacgcccgccaccggaataaaatctttcagcgtgctgcgcccggcttcatcggtaaattgcggcaacacatcatagggtttattgaacaagatcacagtttttggctggcgttctttacgttgtctggtgacttgttgtgtgctgaatcgctcaacgcgatgttttctaaatgaagttttctgcatggtattttcaggctttatcaattgccgcattatagcctaattacgaatgcctttcatggacgcaaacattcaggtagtattgacatgctcattacaaattattaacaaaaaattgctcaaaccgattcgcactacaggcaggaaggcgacacggacgcgatagctccggttagcgggaagacccggtacgccgaagctggccgactcagccaacaccaggctcgcgtgaagagggaagagcagaaccagaagcgctcgaaggagaggttaatggaaagcaaagtagtagttccggcggaaggtcaaaaaatcaccctgcaaaacggcaaactgaacgtccctcacaatccgattatcccgttcattgaaggtgacggtatcggcgttgacgttaccccagcgatgctgaaagtggttgatgccgccgttgagaaagcctataagggcgagcgtaaaatttcctggatggaagtttacaccggtgagaaatcaacccacgtctatggccaggacgtctggctgccagctgaaaccctcgatctgattcgtgactaccgcgttgctatcaaaggtcctctgaccaccccagtcggcggcggcattcgttctctgaacgtggcgctgcgccaggagctggatctttacgtctgcctgcgtccggtacgttactaccagggcaccccgagcccggttaaacacccggaactgaccgacatggttatcttccgtgaaaactcagaagatatctatgcgggtatcgagtggaaagccgactctgcggaagcagacaaagtgatcaaattcctgcgcgatgagatgggtgtgaagaaaattcgcttcccggaacattgcggcatcggcatcaagccgtgctctgaagaaggcaccaaacgcctggtgcgcgccgcgattgaatacgcgatcaccaacgatcgtgattccgtcactctggtgcacaaaggcaacatcatgaagttcaccgaaggcgcgttcaaagactggggctaccagctggctcgcgaagagttcggcggcgagctgatcgacggcggtccgtgggtgaaaatcaagaacccgaacaccggcaaagagatcgtggtgaaagacgtgatcgccgatgcgttcctgcagcagatcctgctgcgtccggcggaatacgacgttatcgcctgtatgaacctgaacggcgactatatctctgacgccctggcggcacaggttggcggtatcggtatcgccccgggcgccaacatcggcgacgagtgcgcgctgttcgaagcgactcacggtactgcgccgaagtatgccggccaggacaaagtgaacccgggctccatcatcctgtccgcagagatgatgctgcgccacatgcagtggttcgaagccgcagacctgatcgtcaaaggcatggaaggcgctatcgccgccaagaccgtgacctatgacttcgaacgtctgatggaaggcgctaaactgctgaaatgtagcgagtttggcgacgcgattatcgcgaatatgtaatcccattgatggattaagtaaaagcgggagccgatgggctcccgttttttttcgccttcaggcaattattctgccggacgcttgaagcattaggcgatggcgaatgtcccgcagcgcaacgttcaacaaagctatatacctcatgacagggagagatccatttgccgtaagagctcgcatgaaaacggattgcacgccaggcgtcatactgatggcccgaccggcttaaaccggggccgttcggcgaaaatgtgctgtagcctaaactcaggctatccgcgcactttcagattaaacagccgggacagcgccgctttgccgctatccgtcacttgtacttcccgatatcccggtgcgcgcgttatccatcctttttgcaggaacagcgtcattagcgccgagccggcgtcgcctcccagatgaaaacgtctttcgctccagtcgagacaggggcagcagggcttacgccgtgggcgggcgttcagtactgcgccaaggcgttcaagctgggttttaccggctgacgtcagggccaggccatctgccgccagccatttttccctcagcataaattcataaatattgaccgccagctcgcccgccagatggtcgtagcaggtgcgtgcgtaacgaagattaaccggcgtgctggggagaagcgtcttatgcgcctgcatagagacgcccatcaggttttccagcagcccggcaatatgcgagcccgccaggcggtaatagcggtggcgcccctgcgcgagacacaccaccagtccgttgctgagcagccgggcaagatggccgctggtggtggaggcggacacctcggcgaccgtactgagttcggttgccgtccatgcgcgcccgtccatcagcgcgcagagaatactgacccttgacgagtcagagagggcggaggccaccatcgccatagcggtttccagcgcctcctctggctcactgtcttgctgcggtttcaggagattcattcagaaagtatggcccattttttggtcacttccgctgcccgggcgtcatcatcggtaaggagaatgagccggttacggtggtcgctgtactgtaccagaatattaataccattatgggccagggtgtccgcgatgtctcccagttccccaggacgttcctgaggtaactttcgtatcagaggacggcatacattgctgaccgtaaagccggcctcggtcagcaccctgcgggctgtctcaccgtcttccaccagaaaatgcgcatgtcctgcatcaggcgtggtgaatacgccgccgccttcgagccccacgccgttgttacccagcgccatacccattgcgccaagcgagcccggcgagttgctgagaatcacgtgaatgtcatacatctgactgtgctccccgatccgatgcgtaatcccggaacacgcgggctacgcgtattctgtaatatgaaaaaatcgatgctttgccttcgcgctgggcagccagatgccgctcattttgctgccagttggccaccgaggcttcatcttcccaccaggatagcgagaggattttgccgggcgtactcaggctctgaaagcgctcaatggcaataaaccccggcgtgtctgaaagcaaaggcgtcagcccggccgccagctgaagatatctttcctgtgcttgtggtaaggcgtcggcctcaaaaagtaccgcaatcataagtctgctccgtggtgaatttcccggcagtctactgacggccagagcaggaagcttcggtgtgcagcgaaatatgcctggcaggagatcaacgattgcaacggaaatgctcccaggcgttattgcgatggtgaataaaaaagaacgccagccatgcgatacggcagcctgagcgcacagggctggctgagttttagtgaaatcgcgatgtggggagataaaccctgacggctgcggctatcgatgaaagcgatcgccgacgggcagtacgggcgggaaagccgttttactgacatgcagaatatgaacccggaaacgctcgcccggactagcgaagcgccgccgggcgataatcgaaagagcacgttgtctgccaccggtcacgccttcaggctccgcgctctcctcgggcgtggatttttaccttagccgggagacctgcgtctcgcctactgtgcatggcggcgcagggtggaggcggggtggcgccgcagcgcctcttcgggacgcacagggcgccgcaccagttcgccgccgcagttcgggcaatgtccgttcagtcgcgtcgtcatgcagtcccggcaaaaggtgcactcgaacgaacagataaacgcctcgggtgagtctggcggcagatctttatcacagcattcgcaattcggacgtaactcgagcatcaacttctcctctggtgaacggctatatcagcgacggcgggccaaagcacgctatgtttatatcatgccgcgatcggtccgccgagaatttccttgcgcggtaatcgccttctcagagggtcgctttcccgggctgcattcccggtacgaggatcactttgcggcacgcctcttcacgtttctcaaagatctgatagccgcgcgcggcctcctccagcggcatatggtgagtgacaatctcctccggggtaagcagcccttgctcaataagcgccagcagatccggcagccaggcgtggacgtgggtttgtcccatcctgaaggtcagtcctttatcaaaggcatcgccaaacataaagccgtggatgaaaccggcgtaaaccccgggtacgctgacgatgccgccgcggcgcacggcggcgatgcactggcgcagggcttttccgctgctcccctcgattttcagggtgctgaggacggtttccgtaaggctacctttcgcctcgaagcccacggcgtcgatcaccgcgtcgacaccgcgatggcccggcgtgttatcgataatccactgcgcaggatcgtcatggtggtcaaagtttatcgggatcgcgccatagcgttgttgcgcgaaatcgagtcggtaatcgttatgatcgatgataaatatctgttctgcgccattgagcctggcgcaggaggcgcagagcaggcctaccgggccggcgccaaaaatagccacgctactgccgggtttgacctcggcgtttttaaccgcctgccaggcggtgggcagaatatctgacagaaacagcaccttttcatcgggtaaggtgtctggcactttaaacggtccggtattggctttggggacccgtacatattccgcctggccgcccgggatcccgccgtacaaatcgctatagccaaacagcgccgccggtggcgaaatgccttttcgattgagcgtcgctccctggccgctattggtgctttcgcaggcggcatactgctgcaagcgacaaaagaagcagtctccgcaggcgatgacaaacgggataaccacccggtcgcctttgcggaccgcggtgacctcggaaccggcttccaccacttcccccataaattcatggccgaaaatatcaccatggtgcgtgccggggatctttccgcggtacagatgcagatcggaaccgcaaatcgctgtcgcggtgacgcgcagaataatatcgtccgctgcctcaagagccgggtcaggcatgttgtcgacgctgacatgatgcgggccgtgataagtgagtgctttcatagaatattctcctcgagagaaaggttgacagcatgcggttcttcggcctggtgaacggctgctatcgtcaccgataaatcatcgtaaaaaataaagcgtagagtactaataatggaactgcgtgatattccaggggctgaatatattccacgcttcgcttatttcccggctggtctgttcgagttatttgcctattgcccttatgtgtgccagtattaatcgggcatgatattcgctccattttgtttgctagccgcttccccagcggcttttttttattcgtaaaatcagggaaaattcttaatttccgtctggcaaaggacaatgctgccgcttcgttatataacccaacggtagtaatcctccggtatagataattctttgccgcagaggtgatctgcatacattatttccctgaacacagtgagttagcggcaaggtgccgtctggttatttttgaggtgtcttgtagaattattccgaattactgctaaaaggtgtcgaaaaaacggaataataatttgactaaccagcattacccgctagatttaaatatcgaacgacgagtgatacggaatattttcgtatcgtactgacataaccgatatacatgaggtgaaatatggcagagcatcgtggtggttccggtaattttgctgaagaccgtgaaaaagcttctgaagcaggtcgtaaaggtggtcagcacagcggcgggaactttaaaaatgatccgcagcgtgcgtccgaagcgggtaaaaaaggcggacagaatagccacggcggtggccgcaagtccgataattcctgattatccttttccttgcaccctgaagtgaaagtatctcctgcgagtctgtcacagactcgcagttattttctgactccagaaggtatttctatgaatatgaaaagcattgaagatgtatttattcacctgctctcagatacctacagcgcagagaaacaattaacccgcgggctggctaaactagccagagcggcgtccagtgaaaaactcagcgcggcgttcaatgctcatcttgaagaaacccagggccagatcgaacgtatcgaccagattattgaacaggaatccaacctgaaaatcaaacgcatgaaatgcgtggccatggaaggattaatcgaagaagctaatgaagtcgttgagagcacggaaaaaaatgaggtacgtgatgctgcattaattgccgctgcgcaaaaggtcgagcattacgaaattgccagttacggtactctggtcaccctggcagagcagttgggctataaaaaagcagccaaactgcttgccgaaaccctggaagaagaaaaacaaaccgatgtgaaattaaccgatctggcggtaggtaatattaataagaaagcggaaaaataaactctccctgacacgaggaaatcacgatgaatcacgttgaacattaccatgactggctacgagatgcgcatgccatggaaaaacaggcagagtccatgctggaatcaatggctggccgtatcgataattatccggatctccgtgccagaatcgaacagcatgttaacgagaccaaacggcaaattaccgtgctggaagagatccttgaccgcaatgagatttcgcgctcggtgattaaagattcgatgagtaaaatggcggctctcggccagtccatcggcgggatgtttccttccgatgaaatcgtcaaaggctcgatcagcgggtacgttttcgagcagtttgaaatcgcctgctatacctctctgctggcggccgctgaaaaagcgggcgataccgcctccatcccagccattgaagccatcctggcggaagagcgggaaatggccgactggctgattaaacatattcctcagaccacggagcagtttctcctgcgttcagatgctgacggcgtagaagcgaaaaaataacccaggaggcaggcctatgtttcgtcatgtgaaacaactgcagtataccgtacgcgttgctgaaccgaatccggggctcgcgaatttactgctcgaacagtttggcggccctcagggcgagctggccgccgcgtgtcgttatttcacccagggattaagcgatgacgatcccggccgcaaagatatgctgatggatatcgcgacagaggagttgagccatctggagatcattggcactttggtcggcatgctgaataaaggcgccaaaggagccctggcggagggcaccgagagcgaggcggaactctatcgttcgctcaccgccaacggcaatgacagccatattacatccctgctgtacggcggcggtaccccgctgaccaactcggcgggcgtgccgtggacggcggcctacattgatactatcggcgaacccaccgccgacctgcggtcgaatgtcgcggcggaggcgagggcgaagatcgtctatgaacgcctgatcaacgtgaccgacgatcctggcgtgaaagacgcgctggccttcctgatgacccgcgaagcggcgcatcagctctcttttgagaaggccctgcagtcgattcgtaacaactatccaccgggcaaactgccgcccattagcgagtacgctaacacctactacaatatgtctgaaggtggagaagtacgcggcagctggaacagtgacaaacacttcgattatgtcaaggatccacagccggccgtagatggcggagatggcagtgcttctgtcggcctgacgccagagcaggaagcgctgtgcaaagcgatgctgaagcgaacgcagtctgacccgcagggcgatcctttgaccggcgccgaactcggcgccgggaagcaaaacacttcatcatcagctaagtgatgttcgcatgagccccggctgcggccggggcgattcacaatgatgggtgtggaatatgtttgaattcgacgcgtttcatctggcccgattgcaattcgcctttaccgtatccttccatatcctctttccggccatcaccatcggccttgccagctaccttgtggtgcttgaggggatgtggctgcgaacccgggataatgtctggcgttcactctacaatttctggctgaaaatctttgccgtcaattttggcatgggcgtagtctccggattagtcatgtcctatcagttcggcaccaactggagcggattttcccagttcgctggcagtattaccggcccgctgctgctgtacgaagtgctgaccgccttcttccttgaagcgggattcctcggggtgatgctgtttggctggaataaagtgccgccagcgctgcatttttttaccacctgcatggtggcgcttggcacgttggtttctaccttctggatccttgcctccaatagctggatgcagacgccgcagggttttatcatcgaaaatggccatctcatcccgcaggactggctggcgattatctttaacccctcttttccgtatcgcttgttccatatggcgatagccgcgtttctcagtagcgccatgttcgtcggggcgtctgccgcgtggcatcttctgcgcggcaacgactcgccggccatccgcaaaatgctgtcgatggcgatgtggatggcgctgctggtggcgccgatccaggcggtggtgggggatatgcatggtcttaacacccttgagcatcagccggcgaagatcgcggccatcgaagggcactgggaaaatcgccccggcgaggccacgccgctgctgctgtttggcctgccggacatggagcaggagcggacccgctatggtcttgagatccccgctctcggtagcctgatccttacccacagcctgcataagcaggtgccggccctgaaagacttcccgaaagaggaccgaccctattcgcccgccgtcttctggtcgtttcgcatcatggtcgggatgggcgtgttgatgatcgccttagggatctgcagcgcctggctgcgctatcggcggcggctgtaccactcgcgtcccttccagtggtttgcgctctgtatggggcccgccggtcttattgccctggtcgccgggtgggtgaccaccgagatgggccgccagccgtgggtgatatacgggttgctgcgcacgcgggatgcggtgtcgttgcacagcaccctgcagatggccatcagcctgctggtatttatcgtggtttactgcgccgtgtttggcgtggggtattactatattttccggcttatcaaaaaagggccgcagccggtgactgagctgacctcgcaaaccgcaggcaccccggcgcgtccgctctcagcggctgagccggtgcgtgatgaggagaacgcatcatgagcatcgatatctcggtgatttggtttgtcatcattgtcttcgccacgctgatgtatatcgtgatggatggtttcgatttaggtattgggatgctgttcagcgtggtgcatgatggcgaagagcgcgatgtgatggtcaacagcgtcgcccccgtctgggatggtaacgaaacctggctggtgctcggcggggcagggctattcggcgcctttccgctggcctatgcggtgatcaccgatgcgctggttatcccgctgacggcgatgctcatcggcctgatttttcgcggcgtggcctttgaatttcgttttaaagcggttccctcgcatcgcatcttctgggactatgcctttgccggcggctcgctgttggcgaccttcagccaggggattgtcgtcggcgcgtttatcaacggctttgcggtggctgaccgccgcttcgccggttcgacgctggactggcttacccctttcaatctgttctgcggtctggggctggtggtggcctatctgctgctgggcaccacgtggttgattatgaaaagcgaaggcgcgctgcagcagcggatgcgcgagctgacccgcaaggtactgctggcgctgatggtggtgattgcggtggtcagcgtctggacgccgttgggctggcgctacgtggcggaacgctggtttacgctgcccaatttcttctggttcgtgccggtgccaattctggtgttggctctgagcctgtggatctggcgcctgagcgcgcgccccgccagccacgcccgtccctttatcctgacgctgggcctgatattcctcggcttcagcgggctggggatcagcgtctggccgaacattattccaccgcatatctccctgtgggatgccgctgcgccgccctccagccaggtatttatgctgccgggggcgctgctcattatcccggtgatcctgatgtataccgcctggagctactacgtctttcgcggcaaagtctccggcagcgagggctatcactagcctgattcgcgccggcaggtgaggatttgctggcgcgtcgcgccgtccggtcagggatgaccgagagggatgcgcacaaaccggtgatctgctgcaacgactctggccgggtgtttatgccttcggcggcttgatcttaataataaatcgttcgttaacccgggtgatcctcgcgccaatatcgccaaactcggtggcgattttaaaaaaatcgtccgcggcgacatcaaaatcgagttcaatcttcgggtgttgtcctgtcgccagtaattcatagaaatggtcaaggctgcgggctttttcgctaggcatcttatttctccatggtaaaccaatctgcaggggttttattgcttacggcgcttttacggattattcagcaggatgacaaacgtgcctgatataaaattatgcaatgacagtaagaatgaggcagggcgaggttattccgtgttgttaaaccgcgtggcgacgcgttgtccgccataccatgacggcagagacgaccctgcggcgccggttgatgatagacattttttgatgacaaattaatgacaataaaatgaatctgtccgggctcgggatggcatcgtgctaaataattttattctgtggctggtaaggtggttgttaactactttatggttatggagcgtcttttttagggccaacggcgagggaacaacgatgcaattacttgatttattcgcaggcttattatggttaagcagcgttatcttcctgctgtttgttcttgatgtgatcatcacccgttatctttatcgtaaataatcgacaacgacagcggcgttgggcataggggacggcgtcggaggatgataatataacccgcggaatgattcagaaaggaatgcgcggtggccgggagaattgattacgatattgaaaaataccagtttaccgaagccggtgagacgccacggctccgggagcagtggcgcgaagtatacctggagtgtcgtcagctgcgggccggggcagaggagcgcctgcgcattgcgttactgaacgtcgactatgtcaccagcttcgagctgccttttcgcctgctgctggtgcgtgcgccgcagctaatcgccgatgttcgcgagacgttgcagcttagccgtaaagctgccgttttcaacggcaaacgttacggctgcgtctatagtttgaaacaggatttacaggctgtcccggaagcctttcattaccgcctggcaaaccgcattcgtcgcgtcgatgcaaccgggctgacggcggccccgtaccagcagattgcccgggagataaagccggcccgggagcggctccgccaggcgctgaacgccggcctgccggtcaccgctctcgacgccctgttctggttcggcagtcagcgagtggcggcggacatcgcgcagttgcgccggtccggcatggcgattgtcacgacggaggtggaggtcagcgacaatttgttcaataccacccgacgagtgcccgtttaccgcctggccagcgagtgaatcggcgacctttcgcccagccgttgcctctgcagacagttgaccattgtcccgtcgaaccagacgcacagccctctggcgacaggccgcggggtcagttccagccatgcgctggcgatgagcatgaggagcattagcgccagtggaaccatgtattttcttttcactgccctttatccgctgcgcctgttctgccagcaaggtagcggtaaagtatgacgtttcgttgaccggggcagcgtttttattatcggcaagcggttgcgttgggccagagattattcatcttttggcatacgagaggacgaaaactggcggcttgtatttttgatttttattacaccacgcttttttttgccgccggggaaaagcgtaatgtggctacgaatggatgcggctcgtcatgtaactggctggtttgaaacaatattttaattgttgtctaaacgcatgcgacagcggtggctaatttatattaattcactttaccgatcaataaattatatgttgatagtttttagctatcgaatgtttcttatcgatcattttaaactatttttgttggcgggaaatatatgacatgctttaaccctttcttatttttggtattttttaaatggttgaagaaaacgcgaaaaatacctcctatcgcttcgtactggagcccgctattagcgatgatggcagctgccactcgtgggaattgctcactaaagatattatagcacccgcacgaaataacgcctcagcgcccgcgttttctttctccacgcttaccgaaagcgataagcttgcactatttacccgacaaatcgagttgctttccgtatttgatttttccctggtcgataataagccgatctcgctcaatatcgatgatttattaagccattttattctgacggaccgctatctctgcgattttctgcgctcgtgtaagcatattgctttggagataaatgagaattttcatgagtttatcgccggccgcgagctgacggcgctaagcacgctggcggcgctttgtccggtctggctggatgattttggtcgcgggcgaacctccttcccgctgctggagagattccgcttcgattgcgtcaaagtggataaggactacttctgggataaagaaaacgaccccgctttgcccggtctgttgcagtctattcataccctgaccggccatgtgatcgttgagggtatcgaaaccgaaaagcaaaaacggttaatcacttctgccggggacatcataggtcagggccgctactggaaggaagaatatatttttctttgcggttgagggtcgaccgggggctggtttcggttacctgctattcttttattatccagttttaaattccccctttgctactgatagtctttattagcgcagtgataagcgcctctcttttttatgaaggatcattccctgtaaatacccccatgcgtaacgccccgatcgccatttcgacgtaagccaggtgctgacctctgagctgcgcgagctggtgaaaaaagatctcgccgctgcgatcaattaatcctgcctgcgccatccgctcaggatcgcgcggcatggaaaaatgccgccgtttaccggcggctattgcttattttgcgctaccctggtttttttccagccgggcgaaatactccggtgcaaacgggcgcggatcgacgtcggcaaacggcgcgcgctcaaagtgcgatttcagcgcccaggggaccgtgcagtcaaaaatggtcttgcagctgatgccatttccacggatcgacgggctgtattccggcgtctgggacggatccagctggtgaccgcgaatgccggggattgtcgtaatgctgacgtccccctgcatgcgggtggtcatcgcccacaggatatcgtcgctgtcaaagatgtcgacatcttcatcaaccagaataatattttttagctcggaataggtcgccagcgccagcagcgcggcctgcccctgccggccttcatcggcgggttgacgttttttcacctgcaggatcccgaggaacttaccgccacccgcggtgtgggcgtagacattttgtaaaaagcccggaatggcggcctcgacggcattccagatactggcttccgttggcaggccggcgagggtggtatgctcttcccccggtcccaccagggtctgcagaatcgcattgtttcgcatggtcactgctttgactttgattaccggcagcgacggattagcgccgccgcagtagccaggaaattccggcatcgcgtggccgctattggtgtgctgatcctctctgacgcgcacgccaggcaacagctcaccttcgataacgatctcggcgcgggcgatggctttctccgggacgctgacgccctgaaccagctccaccggacgttgacgcagcgcgccggcgacgcccagctcgttatagccgaacggcgtggtaggggcttcgaagcaggcgccaatatagatggccggatcgagacccatattgatggttatcggcagcggtttgccggcggcctcggccttctggcgaaacacttcgatatggcggccggcggcaagaaacatcgacagctcatcccggccctgaacgcacaagcggtggatggtgacgtcggtcagcgaggcgtcgtcgggatcgctggccagcgccaggcccaggcagaagaaggggccggcgtcgataggggtgttggtgggcgccggaagcagggtgcgcaaatcaaaatccggatcgtcggccagaaagatctgttcctggcagggggcgctgctggccgggacgaccaccggcgcgaccggttttttcaccgccttacccacttcaagggccagctgcgaggcttcgcagcccagcagcagcgcggcccgctggcggctggcgtgcatacccaccagaatgcgcgagtgtggataacccttaatattgttaaacatcatcgccggcccgatgcgagtggggcgcttcacggtgccgcccgcgccgatatggcgataaacaccggccagctcggcgttagggtcaaccggatgatcggtttcgagatactgattgtcatgctgttgcagcagcgcgatggcgtcgcgcagatcctgaatcggtgcggtcatgatgttctccttagcgtatcgatgctcacagtatgcttcgcaggctaatggttatcaattgcatcatttatgctttattgataagctttttcttatctatttgtagggaggagtccgaccatgtccttgcgagcgttacgccattttgtggtcgttgccgaagagttgcatatgcaccgggcggcggagcggttacatatcgcccagcccgccctcagtcagcagattaagcagcttgagcagcgcctgggcgtggtgctcttttcccgcgccaaccgccgtctgactctgaccgccgcgggcgaggcctttttacacaagacgcggctggcgctggaaatggccgatcaggcggtgctggacgcccagcgcaccgcgcggggcgagcaggggaggctgcatttggggtatgtctccagcgcgatgtacgacagtaaactgccggggctcctgcgccggctgcgcgccgactggccggggattgagctgtcgctggtgcagggggatgtgcaaatgctctacgaagcgctgttggatctgcgtctggatatcgccatcatccgcgcgccgctggcctcgccgccggacgcgctggtggtcaggccgtttgtacgtgaaaagctctgcctggccctctatcaacagcatccgctggccggcgtgggcgcgcttaatctggcctcattgcgcactgacaactggatctcgcttgacgatccgcagggcaccggactggagcaggtttttatggatgcctgtcgcgtcgcgggctttacgccgcaggtggcgcagcggattaacgacgttacctcgatgattagcctggtctccgccggggtgggagtggcgttggttccgctctcggcgcgggccttacgccttgataacgtggtgtatatcgatctccaggatcggctggcggagagtgagctgagcatggtttaccaccgccatattcgttcggcggtggtaaggaaagttatctcgctgcttaataccgctgagcgatagtcccggttagctggtcttcaggcggccaaagctgacaatccttgaacggcccagctctttcgcccggtacagcgcggcatccgccgcgcgaagcagactatcgctttgggtgtgctgcgggtagctggcgatgccaatcgacacatccacctggcctatctcggtcagaccatcacgcagcgtcatattgcgcacctgggtgtagatctcgctggcgcactggtgcgccccggcttcgtcaatcccggggagcagcactaaaaactcctcgcccccgtagcggaaagccatgccgatatcgcgcaccgcgcgctgcacaatggtcgcaacgctcttaatcaccagatccccagcctcatggccatagcgatcattgatggttttaaaatgatcgatgtcgatcatcagacagctcagcggagtatgggtatggaccgccagcgccatctgcgaatgcagcgcttcgtcaagatgatggcggttacgcaggccggtcagggaatcgaacagcgctttttccagcagggcgctgcgcaaacgctgattggccagcgccaggcccaacgcttccgccatcagctcgagataggcccgggaaggagcgtcaccggcggtgacgttctggaaggtcagcaggccaatggcttcgccctgggcgatgagcggtacgcagagcgactggccggcgtgcgtctccggcagatgatagcaggtgatatcgggctcgccctgcaccggcggatggctgagtccccgccgtatcgcccagcagtcgtcgggagaaaagggcgtcgtctcaccggcgggcgacagccactgcgctacgcagcgcatctgccaggggtcggtatccagaacatacagtttaccggggatcgtcggggcgatattcggcgcaaaccgctccgccaccttaatcacatcctcaatggtttcacagccctgcagccgctgagtcatacgcgccagcagctcgcggatcgcccagtcggcgtcgcgctgctgctccagccgctggcgggccaggccgttctcgcgaaaaatgcggatcgcctgagccatgtcaccaatctcatccacctgggtaaagtgcggcgtctctaccgcataatcctgggaggcgagacgctggactacgtcgctcaggcgaaccaccgggtagagcacccggcgtttgagaatgaagccgaggacgaacaaaaacatcagggcggtcaggccgaccatgatttccgacagcgtacgccagatccgctagcgctcggtggcctggtcgatagcgacggcggcgcgatgctcaagcatctggcggaagcgatcgatctgcgtctgcatgcgctccagttcagtctcgtacgcggtgccgtacagcaccgcgatggccgctggcgcatcgccgcgagcgacatgcgccagggccgcctgctgttcatcctgtagctcattggcgatccgcaggccatcctggagcagcgccagctcctcgcggctggcgccgttatctttcaggccgcccagccgctgctctatgctcttgtcggtctgctgcagctgctgatattgcgtaagcgtctccggcgaaggctttatcacgtacagccgggcgaggtcagacagcgcccaggcgtcgttttccacctcgtcggagagggtatcaaagacctggcgctgctgtaccgcctggcgttcgacgcggtcggcgctggaggccatgagcatagcgctcccggaagccagcgtcaggccaacggtgatcccgtaagcccagttagtgatggtggcgattctcaccgtgaatttccttgcatgcagatgaagctgttttgattatagaactccgcccccgccacgacggcggcccgcttcagaggcggcgctcgctatgcagaggggcaagggtctgaagaatgatggcgtgtagcgtttccgcatggtggcgcaaaacgaggaagacatcgctatccagagcgccatttataacatccgcttccataatctgtaaggcttcctgccaggccatccctttacgataagggcgatcttcggtcagcgcggtgaaaatatcggcgatggagataatccggtcggcgagggtcaggtgctccttttcgagatgcagagggtagccgctgccgtccattttttcatgatgattcgaggcccagttaatgatgtcgccgagctcgctatagtcgctgagaagttcgccggtcatgtagctgtgctcccgcacctgactcagctcctcatcatccagctcgccctctttttcgagaatggagagtgggatatagaccttgccaatatcgtgtagatagccggctatctgtatttgctgacaggtgggctccggcagctgcatccagcgggcaagctggcgggcgatttcccccaccatgatgctatgggtggcggtaaagctactgtaggtgtcgacgattttggcaatcagcaggcagacatccttcagaccgtgaatatccagatagcgcgtgttgatggggccaataatctccagcagccgctgaatatggccggggtgaaggtgctgccagaagttcgcattttcagcgacctcgcacaggatatcgcagagcggcggatcgatctcccgatgcaaagcgacgaactgttccaccaccgcccgcgtgggccaggcggcaacgtggcgatcggccggcagcagccgttcaaaggcatcagcaaaatagacaatgtgctgttcgcgggagccccggtggttcgggctaaaatggtgatcgcgaataaagggaacgatgggctggaaggtcgctaatccctccagcatcgccacaccctggcgctgatgcgggtcgtggatattatcgatagcatccagcgaatgaatggtgcgtttatcccccagcacgccgatatcgtgcagcagcgcggcgcaaaaaatggtctgctgccgttcgtcaggcagttccagcctttgcgccagcgtcagggcgattaaggccgttcgttgcatatgccggtgcagttcagggttaatgatctggatgactctggtggtcagcatcagggccgacttcagggcaatacgcatctctgttctccgttcgcgtgacctggcgggcaaaaatgctctcgccggtgacggaagtgtcgataatctgatcgcaatgcgtgttgtgtgttgctgaacaggtaaatactcagaatgttttggttcatagctctgcccgtttcagatccagtggtgcaccagagttgggcgatatcgtcctaagaaccttattattgtctgatagttaaccatttcccccccagaaaagaaatgaattctggcaagccctttgcattaagcaagcgtaagtttgattaatgtctatgaagggagtgacctgtatgaattttagagcattacttgccattgcgttattgacgatgagcagcctggcgtttagcgagacgcgtcttccgcatattgttattttagccaccggcggaacgattgctggttcggcggccagcaatacccaaacaaccggctataaagccggggcgattggggtgcagacgctgattaacgccgtgccggaaatgagtaaaatcgctcacgtcgagggcgagcaggtggccaatattggcagtgagaatatgaccagcgatattattctccagctctcgaagcgggtgaatgcactattggcccgggacgatgtcgatggcgtggtgatcacccatggcacggacacgctggatgaaaccccgtatttcctcaatctgacggtgaaaagcaacaagccggtggtctttaccgcggcgatgcgcccggcgacggcgatcagcgccgacgggccgatgaacctgctggaagcggtcacggtcgccgccgatcctgatgcccggggacgcggggtaatggtggtgcttaacgaccgcatcggcgcggcgcgctttgtcaccaaaactaatgccacttcgctggataccttccgggcgcccgaggagggctatcttggtgtcgtggtgggcggaaaaccccagttcgagacgcgggtggataaaattcacacgctgcgctcggtgttcgatgtgcgtcagctgaaggttctgccgaaggtggtgattatttatggttaccaggacgatccggagtatatgtacgatgcggcgatcgcccatcatgccgacggtattatctacgccggaaccggggcggggtcggtgtcggtacgtagcgccgccggtatcaaaaaagcgcagcaggcgggcatcgtggtggtgcgagcctcccgtaccggcagcggcgtcgtaccgccggatgacagccagcccgggctggtggccgactccctcaacccggcaaaagcgcgtatactgctgatgaccgcgctgacgcagactaaagatccgcagctgattcagcaatatttccatacctactgatcctctgcggcgagggcgtttttcacaccctcgccgtgctttcttctcaatgacctggcttccatgcaaatcgatggcggatgattgcccatcattcactccacctgtgtttcccacgaggcgtaaaaaaatattttttattgtccggcgggcacagtatttcaatgcaccgcgcttattttaaaagcaggtttaaataagtctattcttaattgttgtcttaaagtcgttttaatcttttttatgctgacggattaaaaaagatgcatttcgcagtgggacgcgtttaatactcgctttgacagactacgatgcatcccaacgcggtcagaccgccgatcgcgcggctcagcggacgcctgccaccggcggccagggccgcactgcggcagctttcggttgttttcgttagtaacgctgatgattagcgtgaaaatgatatgcatgatgaatatattaagcgtggttcaagatttaagtttacatttagtaacatatgtgccgcaattatgtttttttgtcagcttgctgttttttacttgccggagggaatttcagcggattagtattgtcgaacttgctgtacgtaccgcctaatgatgataaatggattctgttttccttaagcgttaccacataattaatgtttacaggaaaaatcatggcctgcgtatttaataaacaacttttacacccgcgtaactggctgacctggttcgggctcggcatcctctggttaatcgtgcaactgccttatccgctgctgcattttatcggcaccagcgctggtcgcctttcccgtcgctttcttaaacgccgcgaacatatcgcccggcgtaatatcgaactctgcttcccggacatgtcgccagcggcgcgcgagacgctgatcgatcaaaactttatgtcgctgggaatggggcttatcgaaaccggcatggcctggttctggagcgacgagcgggtcaaaaaatggtttgatgtcgaggggttcgccaaccttaatcacgcgcttagcggtgggaaaggggtaatggtcgtcggcgtgcactttatgtcgctggagctgggcgggcgcgcgatggggctgtgtcggccaatgatggccacctaccggccgcacaacagcccgctgatggagtgggtgcaaacccgcggtcgcctgcgttcgaacaaagcgatgatcgatcgcaacaatctgaccggtctggtgcatgccttaaaatccggtgaagcggtgtggttcgcgcccgatcaggattacggtcccaagggcagcgtctttgcaccttttttctccgtcccgcaggcggcgaccaccaacggcacctatgtcctgtcccgcttatcgggcgcgaaaatgttgagcatcagcatggtacgtaagctggatcgccggggctatagcctgcatatcagcgaggtgatgaatgactatccgggtgaggataagcagatcgccgccggctatatcaacaaggttattgagcgcgagatcctgcgcgctcccgagcagtatctgtgggtacaccgtcgttttaaaacccgcccgctgggcgaaccttccgtctattaaccttcccgcacaggctgcgctttcaaaatcccgacagttggggtaacgtgagccggatcatgttttagtcgtgcgcgaaggagtgcagagtgttcgctgagtttggtgttctgaattatttaacctatctggtcggggcggtgtttatcatcctcgttcctggccctaatacgtttttcgtgctgaaaacgggtattgcccacggggtgaagaaaggctatctggcggcggcgggcgtctttattggcgacgcagtgctgatgtttctggccttcgccggggtggcgacgctgattaaaaccacgccggtgttgtttaacgtcgtgcgctacctcggggcaatttacctgctgtggctcgggggcaaaatgctctatgcggtgctgacccagcgcgacggccagtccgacgccagcgcggagccggcgagcgcgatcctcaagcgctccctgaccctgagcctgaccaatccgaaagcgattctgttctatgtgtcgtttttcgtgcagtttatcgatgtcaacgccaaaacccccggcgtggcgttctttatcctggcgctgaccctcgaggtgattagcttctgctatatgagctttttgatcctctccggctcgtttgtcacccgctacgtcaaaacccgcaagaagctggctaaacttggcaacagcctgattggtctggttttcgtcgggttcgccgcgcgcctggctaccctgcagtcctgatccccacgggccggttacccgctgaccggcccgccgtctcttattctgccctgtaacaaaaacccttcattttttattgcattggtgttacatatacagccgtttatcgctcagcaaaaaggaagccccgatgattctgcaaaaactcctcagcaataaaaactgcaaaaaatactgtctgtcgctcgcggtggtgtttgctatcgcgctggcggtagtggggcgggcgaccttcgggggcgtggtgagcgagtacaatatgccgtactcagagtggacgacgtccatgttcttcctgcagggggcgatggtgacggtttacagcattgtctttaccgcgctcttcgctatccccctcggctttattttcctcggcgccgatcgtcaggattaagcgtcaacgggcgaaccgcggttcgccctgtcttatcggcttatcaacagcgtgaagcattagtcgtcgtcatgatagtgatgatggtggtggtggcgatgggggtgatatccatcgtcaataatgcatcccgataacagcgtgcacagcgcaataatcaacggtaacacgatcggttttttcatccttacttctcccgctattcttattccccggggccgagaatgccgcggcggataacgtgagtgtaaagggttaacttattgatgggataggataactccgcaatatcgccgcggcgatcaccaccagccaaactgggtgccggccaccgccacgatggcgacgaccagcatgataatggtgctttttttcattatgccccacccggcgccgcatagccgccgacaaaaaaccagccgagaaagacgacggcgatgataaagatcgccaccgggaaaagaatacccaatttcatgattgtgtccctgtgcccacgaatgatgccctgcatgatactggatatcgcggtactttagtcaatatgaatgaaattctcctggcggcgggacttcttatcctggtacatcgcctcatcggcagcgcgtaaggccgcttcaacatcgatactctgcggatcgcaggtgaccaccccgaagctggcgccctcatagtcgatacgctgttcgccgaggaagtaggcgccgcacagagcctgacgcagggacgtgacatacgcctgctgtgcggcaggctgctgggcgctaccgacgatcaaaaactcatcgccgccaaggcggccaacgatatcttcccggcgcgcgacagcggtgagtcgtttgccgacctgcaccagaaagctgtcgccgcacggatggccgaaccgatcgttaatggctttgaaaccatcgagatcgataaaaataagcgagacctgctgctgctgggcgcgggcggaggcaaagcgtaacgccagctgcttaaacagcgcgcggcgattgggaagctgggtgagctcatcggtagacgagtgcagctccagcgcgacgtttgccgcctgcagctgttgcaccagggtgtctttttccacgtagtgggaaatgagcttcgcaaacaggcccatgacctgttcgccttcgaggttataaggctgttgttgccggctggtggcgcagagggtgccgaacagagagccgtcggccaggcggacgggaatgcttaaaaaagtagcgattcccagctcctgggcggcgatgcaggagtgccagcggttggcaacgtcattgctaaacgtacactgatcctcaagggcgcgtttgcacagggattcatcccaggggacggaaaatccttccgggatctgcatttcgctgctgttgtgggcgaacatgatctgctgccgctgggcgttggtatcaatgcgggtgaggtaggtggactccattcgcgttaccgcctccagcatctccagcagctggcgcaccagggtttccagggactgttccgcagcgagggtttgcgacacccgggcaagaataaaatctgacatgaataatacagctccagcacgccaaacgtcaccccagcatattgggctgcaaacggacatcagcgtcaaataaacagtgatatttttaaatttatcacatctgtctggggaatacttgtccacgcggtgggaaaaaaagccccgtcgggggcgacggggaaaaactcattgattatggaatgatctgttctctggtcagttcgagaacagggctactctacgggggaaaagtgcaggcaagatggagaaaacgtggagattcaggctaaaatccccgggcattcaggaaagggaggaacaatgaaaaagctactggctattctgccactgttattagccggctgtgcccagccgcagcccactgcgccgacgaaaaccatcggcatgcccaaccccgcggcggtatactgtcagcaatccggcggcacccgggtgccggtgcaaacgccgcagggcgtcagcacccagtgcaaactacccagcggcgaaactctcgacgagtgggcgctgtggcgccgggatcatccggctaaatcgtaaccggcagggccgccagccaggcggccaacacccgggcatgattctgctcggtgttcttcgcggcgtacagcagcgtcagcggctggcgttgcgccagcgccgccagccgcaggcccgtttcgcgatgggcgtcgagctcctgacgatagcgctggctgaagtgggcgaaatcgatcgcctcgccgtgaaaggctttgcgcagctcagcggaaggcgttaactccttacaccactcatcacaggccagcgcctcttttttaatcccccgcggccagagacggtcgaccagcacccgatagccgtcgctgctttcctgcgggtcatacacccgtttacactgaatcatcatcctgctccttctgtgccatccaggcgagcaactgcgggatttgcccgtcggaaaataccgtgatgccgtgggcgcggagtaggtcggcggccacgccggcgcccgctttgcgccgtccgcgaaaggaaccgtcatagacatactggctgccgcaggtagggctgccgtcggtgagtaacgctgcctgacagcccgcttcccgggcggcgctgagcgccagccaggcggccagctgataatgtccggtgacgtcgcggccgtcgctttccacgatccgcgcccgtccggcaagcacatcgccgcccgtgccgccgaggatctccgccggcagtcggggcgtaggcagaccggccgccagctccgggcagtggatcaccagccgccccgcctgctgccagcgggacagcgtcgccgccagctgtgccttctcactaccgttataccgcacctggaatcccatcaggcaggcgctgaccaaaagcttatttttcattctctctcccttacgcgctttttccagtatacctcacccgtcggccacggcggtggggtgaaaataaggattgtgttccacaggtgggatcgctattctgacgtgccttgtgctgtccgtctcgtccagacataaggaacctgctatgaaaactcctttacgcctcgcccttgtcggcgattatcaccccgatattgttgcccatcaggccattcccctggcgatagacgatgccgccgccgtgctggagcagccggtgaaatatgactggctcgccaccccgtcgatcgcctccggcgaggcgctggcggagtacgatgccatctgggtcgttcccggcagcccgtatcgacacccggaaggcgcgtttaccgcgatccgctatgcccgggaaaacagcattcctttcctcggcacctgcggcggctttcagcacgcggtgattgaatacgcccgcaacgtgctcggctggcaggacgccggacatgcggaaaccgacagcgaagggcggatggtgatcgctcccctcagctgctcgctggtggagacctctgccgtcgtcgagctgcgggcgaatacgctgattgcccgcgcctatggccgggagagcattgaagagggctaccactgccggtacggcgtgagcagcgcgtttgcggcggagctggagcagggcgatctgcgcgtcaccggctgggatgaagagggtgagatccgcgccgtcgagctggtgacgcacccgttttttgtcgccaccttgttccagcatgagcgtcacgcgctggacgggcgtcccgcgccgctggtgcaggcgtttctccgcgccgcggcacaataattccaccggcagcgggcgctgccggtcatcttcaggggtgaatttcccggtcacgtccggcgagcgcgccgcagaccgccatcaccagcgaaatcagcgccaccgccagcagcggaatatgccagtcgccattggcatcatggatcctgcccatcagcggcggcccgcaggcggccagcagatagccgacgctctgcgccatccctgacagcgccgcggcctgatgcgccgagctggcgcgcaggccgataaacgtcaggccgaggatcatggtggctccggagccaaagccgaacagcagcgtccagccgatcgccagctcaggcaacagccacagcccggcggcgctgatggcgcacatcagggcgaccagcaccgcgatcccgcgctggtcgcgcagccgatgcaggatcagcggtatcgccaggccgggcgcggcggtcgccagctgcagcaggccatgcagcgagccggcctgcgcttcgctatagcccatactctgcagaatcgacggcagccagccgataatcacgtaatagaccagcgagttgatgccgaggaacagcgtcacctgccaggccagcgccgaccgccagatcccccggttatgcatagcgcctgagccggtcaatggcgtctccgcccggcgccgggactgcggcagccagctgaggagcgccagtagcgggaagaccatcagcagcagcagcgccccgcgccagccgaatccggccatcgccacggggaccaccagcgccgaaccaagcgccgccgcgccgcccatcgtcagggaataggcgccggtcatccgcgcgacatgttgcgagaaatcccgtttaatcagcccgggcagcagcacgttacccagcgcaatgccgcagccgattaccgccgtgccgataaacagcagcgcagcggagggcagggagcgcagggcaatgccggcgcagatcagcagcatcgccagcagcaggctgcgttccatgccgaaccggcgggcaacccctgccgccagcggcgagacaaggccaaaggccagcagcggcagggtagtgagcagcccggtctgcgcggtggtcaggccatagtcgctacgaatcgcgtccagcagcggcgccgcgccggtaaagaccacgcgcagggtggtggcgatgagcaggataccggcaatcagcagcgcggggcggcggccggtagaggagatcacagaagacatatcattctcaaagtaactaacgaggggggttacgatagcggctttgtccctcgtttaaatcaagctaaaatgacagattatcgctaatatcggacaatatgatgattggactggggctggatggctatgaaccggacagtggccacgaatcggccattgcctttcgtatccgggtggtggaggcggagcagtatattccggcgcattcccaccgtaaggggcagctgatccttgccctgcacggcgccttgacctgcgaggtggagaacgcaatgtggatggtgccgccgcagtatgcggtgtgggttccggggcagctgtcccacagtaaccgcgctacccccggcgcccaggtatgcttcctgttcatcgagccgggcgccgcgccgatgccggatcgctgctgtacgctaaagatttccccgctggtgcgagagctgatccttactctggcggagcgcggcggagagtccctggccgcccccgccacggcccggctggtgcaggttctgtttgatgagctgccccgccagccgcaggagcacctgcagctgccggtatcaaaccacccgaaaattcgtcaaatggtgacgatgatggctgaggatccggcgcgctggcagaccctgagccagtgggcggcggtgtttgcgatgagcgagcggaatctggcccgcctggtagtgcgcgaaacggggctgagctttcgccgctggcgccatcagctgcagctgatcctcgcgctgcagctgctgatccgcgggcagacggtgcagcagacggctcaggcgctgggctacgattccaccaccgccttcatcaccatgtttaaaaaagggctcgggcagacaccgggccgctatcacggtagcctggctacgacttcccaataaacaatgagatgatcccggcggcaatcagcggcccgaccgggacgccgcgaaacagggcgacgccgagtactgtaccgaccagcagcccggccaccagatgcggctgggagcccatcagggagacgccgcgcccgccgagccacgaaacaaacaccccgaccgcaatcgccagcagcgatttccagttcataaaggagtggatcagcgtcgagggcggcagcgtgccgctggcgataggcgccatcacgccgatggtcagaataatgatcccgacggtcagtccctgtttctcaacccagggaaagaaggcgttcagcggcgtgacgcgcacgataatcagcacgaggatggagatcgccacggtggtgttatgactgataaagccgagcgccgccagacccagcaggatcaacagggtggtatcaaacatgtacagaggtccttgccaaaataagaatgccaaaaatatcccgcttactctacgcatcgtggcgtgaataaacaggatttttacgccatgcggcggaaatctgggcggatgcccggttagctaagacggcgaaaggtcgcgatctctggtcgggcgatatgtaaatagtcttcggtgtcgagaatgatcgaccggtccaggcgcccggcgttaaaggcgatttgtggaaagcgttcaaacagcagcgggtccgccaccagccgcagcgccggatggaaactgaaggggggaatggcgccgaacacgcaggcggtgagggcatccacctccgccgggctggccagcgaggctttgctgccgccgatatgccgggccaggctggcgaggtcggcctgccgatcggcggcgaggatcgccagcacatgctggttgacgccgtttcctttcactttacagactaacgctttcgcgccctggccaagcgcggtgccgcggattgccgagacggcttcgcactgaccgaccgcctcgtgcgccatcacccggtagcgggcccggtgctcgtcgagcagcgcgcacagccgctggtggatattaccttctactgcttcaagcatagcgtcctcctgacatcataaagcagccagcttagcgctgttgcgccggcctgccaacggtgggccgggaaattcaccattcgctcattattacttcacagtgctgtggtgcaatcccgcaggcgcagatgagttttgtaaataaaaaaaagaatgattttcattttcaatcgaactttttttatttcgctcagtctctatcggacgacacagaatattaataattgccgtaatgaggttaggatgatgcacgatgcaaccatgcagggttccccacgcaagaaatttaataaaataagggagctcaacagacggcggaattactttactaagaaagtacgtaatgccctgcgggtgggggtggcgaaagcgctctgggatcgccgacgccgtcagccggtagatttgtcgtctgcgaaaaccgtcctgttgatgcgcaatgagggggcggtcggcgatgtagtggtggattccgcgctggtgaaatgcctgcatcagtcaggctatatcgttgattttttgctgacgacctctaacagccaggtgatgcgttataacccgcggatccgccatatttatgaagctgacccggtcacgtccgctgattttttgcgtaaatttaatcataacgttcctcgcgacgttattaatgaactggctaataataagtacgatattattattgacccttcgctgttcgatattcccgtgcatcgcctgcggcttttccgacaaataaaagccaaatcagtgctcgggtttaataaatggccatcgattaagcactactcccactcttttgattttgactgccagcgctggcacgtgacgaaaacgttcgagctgatcgccgattatctccaactggacacccgcgggctggacgcttacgacctggcggtgcccgggccgattatgcaggaggtggcgcagtatctggcgtcgctaagcggaaaagcggtggtgattaatatttttgccggccatgccgaccgcagtctctcgcagacgcagctggcggaactgctcgacaaactgctggcccgccacccggggagcgcggttattctgctcgatcaccggcgcgagatccgcatcccgctgccgccggaggtggtgataaacccatttaacacgttacaccatgcgatggcgctgatcgcccaggcggagctgattatctccccggacacctcggtggtgcacatggcggcggcgtggaacaaaccgctgatcgcggtctataaggacgttctgcttaataaccggctgtgggccccgggctatgacaacgccaggcagatcattgttaaatgcgggaaggtccatcagcatcgcgggctagtggatagaattatagcggcgctaccggagacgctgtgaggcgatgaggggagacaggtagggctcacctgctggccgtatgcaagagccagcaggtgagcgaaggttgcattgccagtctgcaaccgccgctattgtactgttgcccgcggctctgccacatccgggaaagctcttaaagaggtggtcgccgcgactgacgggcgggatcactcttcagtgagccacatatccgcctcttcaaacatctcctgcaccgtgcggctgatcagctctttttcatgcttgctggcgtcggtgttgatcgccggcagcgtcatcatcggcttcacccgcacttccgcctccgggaaaatgcgctgcatgcgtttggtcagctcgttaagaatggcctctctggcgcccggcagcccggcaaaattgcgcttgtcataaatcagttccacaaacatcttctgtcctctgtatgctgatcgcgggcgatagttttactgtattaatgtacagtgtcaagcgaatgccgcggcgctgcgtatctaccacctcgcgcggcgggcgggctgcgcgcaaaagcagcaaacggttcgctggcgctgaagaagacccctattgacatcaaggagttatttcagtgctggcgattgatagctggagccgatattgaccggtaaaactggcaaaactactgtatatatattcagtattgtgtggtgggttgaaaaatgaacgtttacacgccggttgagctacgtcagattgtctcctttcccttttttgccgacctggtgcagtgcggctttcccagcccggctcaggactatgttgagaagcgaatcgacctcaacgagctgctggtgcagcatcccagcgcgacctattttgtcaaagccgctggcgacagcatgatcgatgccggcattgacgaaggcgatttgctggtggtggacagcgcgcgtaaagcggagcatggcgatatcgtgattgccgccgtcggcggcgagtttacggtaaagaagctgcagcttctgccgcgggtgcagcttaacccgatgaacccggcctattcgcccatcgtggtcggccgcgaggagacgctcgatattttcggcgtcgtaacctacatcatcaaggcggcgggctgatcatgttcgcgcattgtgatgtgaacgccttctatgccagctgtcagaccgccttccggccagacctgaaggggcggccggtggtggtgctgtcgaacaacgacggctgcgtgatcgcccgctcggcggaggcgaagccgtttgtgaaaatgggcgaaccctactttaagcagaaggctgcgtttcttcgccacggcgtcgtggcgtttagcagtaattatgagctgtatgccgacatgtccagccgggtgatggccaccctggaagagctcaccccgcgctgcgaaatttacagtatcgatgaggccttttgcgatgtcagcggtgtgcgtcattgtagagatctgaccgattttggccgcgaaatccgcgccacggtgctgcagcgtacccatctgacgctgggcgttggcatcgccccgaccaaaaccctggcgaagctggccaaccacgcggcgaagcagtggccgcggcagacgggcggggtagtggacttgtcctgcccgcagcggcagcgaaagctgatggcgctgctgccggtgagcgaggtctggggcatcgggcggcggatcggcaaaaagcttgaagcgatggggatcggcacggtactccagctggcggagagcgatatccgctttatccgcaagcacttcacggtggtgctcgaacgaacggtacgggagctgcgcggcgagccttgcctggcgctggaggagtttgcccccgctaagcaggaaattatctgcagccgttcgttcggggatcggattacggcctatgaggatatgcgccaggcgatctgcagctatgccgcgcgggcagcagaaaagctgcgcggtgagcatcagtactgccggttcgtctccgcctttgtcaaaaccagccccttcgcgctgaatgaaccctattacggcaacagcgcctcgctaaagctgctgacgccgacccaggactcccgagatattatcgccgcggcgacgagctgtctggatgccatctggaaagcggggcatcgctatcagaaggccggcgtgatgctcggcgatttctacagccagggcgtcgcccagctgaatctgttcgacgagcttgctccgcggcacaacagcgccagactgatgcaggttctcgatcagctgaatgcgaaaaacggcaggggggcgctctattttgccggccaggggatccagcagcagtggcagatgaagcgagagatgctctcgccgcgctacaccacgcgatacggcgacctgctccgcgtcagataacgcgcgctatccctgcaccgcggccggaaaaaccgccgccagccagtcaataaagacgcggagccggggcgggacgtgccggtgccgggcatagacaacgtgaaaaggatagggggccgggcgccaggcgctgaggatctccaccagttcgccgctcgccagcgccggtttcagcgaataggtaaaggtctgcacaatgcctaagccggcctcgccggcggcaatatgcgcgttgctctcattgatgccgggatggggctctgtcttcagctcggtgctgacgccgtgacgcgtaaagcgaaacggaaacgctctgccgctggccggcgacagatagctgatgagccggtggccatgatgtagttcatccggcgaggcgggggtgccgtagcgctgaagatagcccggggtggcgcaggtgaccagcgtcgcctcgccgattttacgggcgatcagcgtcgagtcttccatcggaccgccgcggatggcgcagtcaatattgccgctgatgaggtccgcgggtttatcggccacctgcaaatcgatatggatatccggccaggaggtcataaagtccgccagcagcgggatcagcacatcgcacgcggtcgacccgccgatggcgatccgtagatggcccttcggcttattgcgggcggtattgaacgacgcgtcgatctcttccaggtcttccagcagacagcgggctttttcatagtactcccgtccttccggcgtcacggtgatacgccgcgtagtgcgctgcaggagggaaaccccaagatgcgcctccagttgctgaatggttttgctgagggtggcgttgggcatattcagcgagtccgcggcgcgggtaaagctgccggcttcgacaacgcgggtgaaggctttgagagctgaaaaccggtccattattcgctttatcctggttactggaggtcattatccaccgaggggaagagtgtttttcagattaggccatttttccgcctcgccgggacgattacagtgctttccatacccggcggggcgcgttcgcgagcctggcctgtttatactctaaccaaggaaatgcaccatgagcaaaaaacttgcggataaagtggcgttagtcaccggcggcagcgccgggattggcctggcgtcggcgaaagcgctggcggagcagggcgcgaaggtgtacatcaccggccgccgtcaggaggagctggatgcggcggtaagattcatcgggcccgccgcccgcgggatccgcgccgacgccgccgtgttaagcgaccttgacgcggtatttgcgaccattgccgaagagtccggccggctggatgtgctgttcgccaatgccggcggcggagacatgctgccgctgagcgccatcaccgaagcgcacgtcgaccggattttcgccaccaacgtgcgcggggtggtgttcaccgtgcaaaaagcgctgccgctgctcgccgacggcgcctcggtgattttgaccggctctacggcggcggtaaaagggacggctaacttcagcatctatagcgccagtaaggccgcggtacgcagcctggcgcgctcctgggcgctggaggttagcgaccgcgggatccgcatcaatgtggtcagcccggggccggtacgtaccccgggtctgggagggctggtggcggaggcggaccgccagggcttgttcgatgctctggcggccggcgtaccactcgggcggctgggcgagccggaggagattggccggacggtggtatttttagcgtcggatgagtcgagctttattaacgccgcggagatctatgtcgacggcgggctggcgcaaatctaaacgcctgccgtcgccgcaccgatctgaccgggcagaggcgctttcagcagggcgatcagcagcgtactgcccaccatgatccccgccgccagccacaccattcccgacaggccagctgaggcgatcagctggccgccgacaaacgccccggtgccgatggcggcattaaaaatggccacataaatggctgacgccggctgggcgacagcgcccgcgctgcgcagcagccaggtctgtaagccgacgaacacaatcgcgatgccggcgccccacagggctaacagtagcccgctaaaacagaacggcagtggcgcaagacgggcggcgccaaggagcgccagcgcgcccccgctcagcagcagcgcagcgaaaatcagccccttcagatgacgatcgataagcttacccgcgataacgttacccagcagcccggaaacccctgacagcagcagcaggccggagagggcggtcgccgggactccctgcagatttatcagcagcggttcaatgtaggtgaaggcggcaaagtgagcggtaatgatgcaggccgtggcgccatacaggccaccgagcagcggattgcggaagatatcgcgataaacacgcagcctgacgggggcaggggcggccagcgggggcagcgtcgagcacagcaccgcagcggcggctagtgacagcaaggccatcgacataaacgcgagtcgccagcccgccagggtggcgataaagctcgccagcggcacccccactacgcttgccgctgacacgccgccaaaaatgatcgccgtggccagccccagccggtgcggcggcaccagctgcgcggcgacaatgccaattaaggcccagaaggcgccatgcgccagggcgccaatcatgcgggcgctcatcagggcgaacatcgaataagaccgggttgcggcgaggcaggaaagcgcgaggatcagcatcagcccgaccagcagcgccttgcgggaaatacgcgccggcattgcgccggaaagcagagccgccagggcgcctacccagccataggcggtgacggcgaggcccacgccggattccgtctggtgaaaatccgccgccagggcgctgagcatgcccaccggcgccagttcgctggtgacgatcgaaaaggcgcagatcccgagcgcaacgacggcaatccagacgcgcgcctgcgccgggtggaggggtaaagcaatctctttcatatcaggcgtatccttaggaaaggagcgttccgcgcggtgcacggacgttcaggtgaggagagagcaggcgatcggatggcctggttgtctccgtgagtggcgtgcagtatcatccctgcaaaattgataaaaaagagcagaaaacggagatccgttttccataaacggaaaagagatgacagcagaatttcattgggatgatgcgcgcatcttcctcgccatcgcccgggcgggaacgctgagcggcgccgccgacaagatgaacatggggattgccacggtctcccgccggctggatcggctggagcaggcgttgaacgttccgctcttcagccgccatcagagcggctaccgcctgaccgacgatggcgaagccctgctcgcgcgggcggaggcgctggaatacgctggcctggcgttcggcgaagcggcgcaactgcaggggcatgtcgccggggttgttcgcctggccacctcggataacctggccacgcattttattctgccctccctgaaagggctcctggaccattatcccgagctgcgggtggaggtgctgagcggcgtgcagccggtgaacctgcaccgtcgggatgccgatctggcgatccgcatggtcaagcctgaggccgggcatctgacgttaaagcggctggggacggtggggtttggcgtctatggcgccgccgactgtctggccggcgcggacggcctgtcgctgagcgaggcggactttgtggggtggccggaaactcaccagcacctgccggccgcccaatggatcacgcgcaccctgcgcggccggccgtgtaaagtcgaagccaatacgctcgtggcccaggtttccgcagtatccgcgggcctcggattgggcgtcctgccgcactttatggcgcgggccagcggcctgcagtgcctgcagccggagatcggcgcggatcagaccctctggctggtgatgcattctgacctggccggatccagacgcgtgcgggttctcgccgaccatctcatcgctctctttgcggaccatcaagatcggctggcgatgccctgaaggggcgcggcttgggcgtgtatcgataagactgcccgaggctgacgagccacgattttctccgcgccagctaacagtgatactcgccgcgcaatattcggcccaatgctgccccgcagtcgaaaatactgcagagtgagaggatatccccgtccggcaaaataattttgtgttgtggccagcgcggcattgttgcgctcccccagaaatgcctgtcgatgttagggtgagacgtttatcaccacaggagaacgcaaatgattgtcaggacctggcacggctgtgtgccattgcaacatgctgaggggtttgcccgccacctcgagcggaccggcgtagaacacgctcagagcatcgccggcaaccggggggcgctggtgcgccaggaaaaccagggcgaatgggcgcatttctttcttgccacctactggcaggatctcgcggcggtcaaagccttcgctggcgaagactatcacgtcgcggtcacctatccggacgacgaagcattcgaactcctctccgacccctatgtgtttcagcatgaagtcgaggccgtgtcgccgctgtaggctgatgaccgggcaggtggaagattggccagcagcaggcggttgctggccgcgtgagagcgacgtctaccttgtatgggcagccagccgccgctgggtgaacgtggcatgatgggaacactcagcgcgtgagggccgcgacaatggaggcttccattttctccggcgtcgtgaacggcgcaaaacgcgtgaggggtgtgccgtcgcgaccgatgaggaacttggtgaaattccacttgatccgtccgccgagcacgccgggcaacgcttgtttcagataacgaaacagcgggtgtgcggcggggccgttgacgtccactttctcaagcatcgggaagctcacgccgtagttaacgtgacaagtctgctcgatttcatccgcaccgccgggttcctgcttaccaaactggttgcacgggaaaccaagcactaccagcccctgagccgcgtactttttgtagagcgcttccaggccagcgtattgcggtgtgaagccacaatggctggccgtattcaccaccagaaccaccttgccagcatagtcagccatggcgaggggctggccgcgcaggcgggtagccgtcaattgataaaaaggggtcatagcaggctcctgagagtagaaacagttcaacgctgacgatcgcgcgaatgtttgaagcagattaggcagttatgatacacagggttagggatttgtacctggagtgttaaaaaacgccagatgtcatagagaaaatcgcgaacaggaacggctgaaaataatgaaatatgtcttatcgctggtggtggtggcgatactcgcaggatgtaccagcacgccaaacttgccgcctcgggataccattgtggcgatgaaacccacagagtccggtattgtcgccagctcagcgaaatacagttactgctttgtccgtgacggtgtgcctcaggaatatcagcgttataagaccttttatgaacgctttcaccaacaggcttccggcgtgcgggttaactttgtcgtggaacaacatgaggtgacggcggaatatctggtggtgatggatcagcgcaaactggatgccgggcagcatagcgagctggtgaatcagtatcatgcggtgcaaattgataacgatcgcctcggggtgttgtttaaagcgacaggattttggactgcatcggacgcgtcagatctggccgccgcctaccagttagcgcaccccgttgtggtatcaatcaatgataagaccaaaacgattagctcgcttggcgccgttgccctggccccgttgtttccgttttacatgatgtatggatgtgccaccgggccttgtgtctgaggaaaacagccagcaagtcactcgactcactggctgagtatttaattaagcttcacttttagatgactgcttgtgaaacagttcgcggaataccgggtagatatcctcctggtcgcgaatatgctgcatggcgaaattatcaaaggtcgcctgcaggtgttcatactcgcgccacagggtctgatgcgcccggcgggtaatttcgatatagctgtaataacgcaccaccggcagaattttcttcgccagcagttcgtggcacagcggggagtcatcggcccagttgtcgccatccgacgcctgggcggcgtagatgttccactgcgccgggtcatagcgggcctgcaccacttcatccatcagcttcagggcgctggagacaatggtgccgccggtttcctgagaatagaagaattcgtgctcatccacctcttttgcctgggtatggtggcggatatagaccacgtcgacgtttttataagtccggctgaggaacagatacagcaggatataaaagcgcttggccatgtctttggtggcctggtccatcgagcctgagacgtccatcagacagaacatcaccgcctggctggaaggctccggccgtttttcgtaatttttgtagcgtaagtcaaaggtgtcgataaacggcacccgctctattttagcccgcagttcggcaatctctttgcgcaggcgctcctcctccagcagctgcaccggttcgctgcggctgatggcttccagatcctcctccagggcgcgcagttcacgacgcttgccggcggtcatcgccgtacggcgggccagcgagttctgcagtgaacgtaccacgctgatgttggctggcaccccattggaggtaaaacccgcgcgatgggttttaaactcattcagctgccggtgctggtttttcttcaggttcggcagggccagatcttcaaataacagatccaggtattcatctttcgagatctggaagacaaactcatcctttccttcaccatcggcgctggcttgcccctgaccgctaccgccgccgccgccaccgccctgcgggcgctcaatgcggtcgttttgcacaaaatggtcgttgcccgggtggacgcggttgcgcaggccgccgcgaccctgatgaaacatcggctcgttgatatcgtccgtcgggatcgagacggattctccgctctcaatatcggtcaccgagcgcttgttgatggcctcggagatcgactgtttaatctgcgccttataacggcgcaaaaagcgctggcggttgacggcgcttttgtttttcccgttcaggcgtcggtctatgaaccaggtcatatgccctcctgtactgcattagccaactttacttatcatcattcagctgcagttgacccggcggcgtgccgccgggttggacgcatcaggacgatttacgaacccgcaggtaccactcgcacagcaggcgaacctgtttgcgggtgtagcctttctccatcatgcggtcgacaaagtcgtcgtgttttttctgctcatcggttgaagttttggcattaaacgaaatgaccggcaacagctcttcggtattggagaacattttcttctcaataaccgtgcgcagtttctcatagctggtccagttcggattacgtccgctgttgttggctctggcgcgcagcacaaagttgacgatttcgttacggaagtctttcgggttgctaatcccggctggcttctcaattttctccagctcggcattcaacgattcacggtcaaacagctgcccggtgtccggatcgcggtattcctgatcctggatccagaagtcagcgtaggtgacatagcgatcgaaaatgttctgtccatactcggagtaggattccagataagcggtctggatctctttgccgataaactcggcgtatttcgggatcagatagcctttgaggaattccagatagcgctcggcctgctcctgtgggaactgttcgcgctcaatctgctgctccagcacatagaacagatgcaccgggttagcggccacctcgacgtggtcgaagttaaatacccgagacaggatcttaaaggcaaagcgggtggagagcccgttcatcccttcatcaaccccggcgtaatcgcgatactcctgataggacttcgctttcgggtcggtatctttcagactttcgccgtcatagacccgcatcttcgagtagatgctcgagttctccggctctttcaggcgcgacagaatcgaaaagcgcgccagggtttccagggtgcccggggcgcagggcgcatgggtcagctcactgttgttgagcagtttttcatagatgcggatctcttcggagatacgcaggcaataaggcaccttgacgatatagacgcggtcgaggaaggcctcattgttcttgttattacggaaggtcacccattccgattcgttggagtgagcaaggatgatcccgttaaacggcagggcggagatcccttcggtgccgttatagttaccttcctgggtggcggtcagcagcggatgcagcaccttaatcggcgctttaaacatctcgacgaactccataatcccctggttggcgcggcacagcgcaccggagtagccgtaggcgtccgggtcgttctgcgcatagtgttccagcttacggatatccaccttaccgaccagcgctgaaatatcctggttgttttcatcacccggttcggttttggcgatggcaacctgctcgagaatcgatggccagactttaaccacgcggaatttagtgatatcgccgccaaactcgtgcaggcgcttggccgcccacggcgacataatggtgccgagatagcgggtcgggatgccatactctttctggaggatctgcgcatcttcctgcggattgaacaggcacagcgggtgatcgttgaccggactgcgttcgccgttggcgctcagcacatagatgggcacgcgctgcatcagcgctttcagccgttcagccagcgacgatttaccaccgcccaccggccccagcagatagaggatctgtttcttctcttccagcccctgggcggcatgcttgaggtaggaaacgatctgctcaatggcgtcttccataccgtaaaactcttcaaatgccggatagcgtgcgataacccggtttgaaaagagacgggatagccgcggctcgagagccgtatcaaccatgacgggttcaccaatggccatcaacagacgttctgccgcattggcataggcactgcgatcttgccggcagatggtaagaaactcctgcagtgtgaactcttcgtccttggcagcttcgtagcgctggcgatagtgatcgaatatattcatggcatgccgtcctttcgttttttagcacaggttgagagccgttcatatgaatagtgggggcccccggaagacataagctgaacatcgctctcctggtatccagcaacccttatgccaggttgcgggtggggtagcgtgaatgtgcccggcaattacaccttctaaatttaagcgtagatgcatttagaaatcttgcatggcgcagaaaatcaatttcaatgacatatcaataactcatcctgaacatgacgctttttgattcgttgggacgcaaagttgtcatcgggctgtcaccggatggtaagagaagggtggcaaagtgaacgatttgtgtcatatcgggtaaagaatttgaggcatgagacctacgacggtacactgcacgggctgattatttgacaacgggaatatggattgtgactaaaatcaaacttctggcactcggcgtgctgatagcgacgtccgccagcgcggcgcatgccgacgggaagttcactcttggggctggcgtaggggtcgttgagcatccgtataagcaatacgatgcggatgtctatccggtgccggtcattagttatgagagcgaaaacttctggttccacggtctgggcgggggttactacctgtggaatgacaccaacgataaactgtcgattacggcctactggtcgccaatgtacttcaagccgggcgacagcgacagcgagcagatgcgtcgactggataaacgtaaatcgaccgtgatggccggtctttcttatgtccacaacacgccctatggcttcctgcgcacgacgattgccggcgatacgctggataacagcaacggtattaactgggatctcgcctggctgtaccgttacaccaacggtaacctgacgctgacgccgggtattggcgtggagtggaacagcgacaatcagaacgaatactactatggtgtctcccggcacgagtcgcgccgcagcggcatgcgcagctatgacccggacagtagctggaacccatatctggaactgtcggctaactatcgcttcctcggtgactggagcgtttacggcgtggcgcgctacacgcgtctgtcggatgaaattaccgacagtccgatggtggataaatcctggagcggtctgatctccaccgggatcacctacaccttctgattgtgcattcttacagtgcgcttcatgcatcaaaacagggccttgcgccctgttttgctttatggtggtgcatacggttaaggaggagaagatggtgaaaaaaacagtacgcttcggcgagcaggaggcagtgccggccatcgggctgggcacctggtatatgggcgaacatgcggcgcagcgtcagcaggaagtggctgcactgcgtgcgggcatcgaccatggactgacggtgatcgatacggcggaaatgtacgccgacggcggggcggaggaagtggtgggccaggcgatccgcggtctgcgcgaccgggtagtgctggtctccaaagtctatccctggcatgccggcaaagcggcgatgcaccgcgcctgtgaaaacagcctgcgccggctgcagaccgactatctggacatgtatctcctgcactggcgcggggatatcccgctgcaggagacggttgaggcgatggagaagctggtggccgagggcaagatccgccgctggggcgtctctaatctggacaccgaggatatgcaggcgctgtggcggacggcggatggcgagcactgtgcaaccaaccaggtgctctaccatctcgcatcgcggggcattgaatacgatctcctgccctggtgccagcagcacagtctgccggtgatggcctactgcccgctggcgcaggcggggcgcttacgcgatggactttttcagcatagcgatatcattaatatggctaacgcgcgggggattacggtagcgcaactgctgctcgcttgggtgattcgtcatccgggagtgctggcgatcccgaaagcggccagtattgagcatgtggtgcagaatgccgcagcgctcgacatcgtccttagtggggaagagctcgcgcagctggaccgcctctatccgccgccgcagcgaaaaacccggctggatatggtttaacccatcgttcacggcaaagaaaaacaaaagccccgttaccaacggggcttttgctattagcgttttttcacgctgatggtttgcgccaggcgagagggcgtctcttcgctggctttctgcggctgggttacgcagcaggtttcgacgcaaacgaaggttttgtagccatcgtccggcatatcgcccatgctgacggacagcgccgggcccgggttccaggccaccacattgtgctgatgatgatgcaccacgtcgatagtgcggtttagcgcgtcgtcatggatcacgctgcagctgtcggcgttgagatagacgcgatcggtgcggtcagggaaggtctgcacgccgttgctcagaacgccttcttcggcattgttcactttatcgatatagcgctcgccaagaccgctcaccttcaccgccgcgatatcgccgacgttgaaatagctgtgcagggcagaggtggtctcgaattcaccgtgggcttccagctcgatttcacaggtcttgcccagcttaaagcgggcatagagggtgaactcgtgcggccagagcttcatggtttcagcgctgtgctggagcgcaaaggtcaacattacgccgctgtcgtcttcgtcatgaccttccagggtccatggcagattgcgggcaaagccgtgcgacggcagaccttgctgcgcagaaggaccaaaccagggccagcaaatcggcacgccgccgcgcagggcgacgccctgtttaaacggggtgttgttgctcagccacagaacttcttcttcaccggcgggtttccaggagagcaggtgcgccccctgcagcgccacagaggctttcacctgcggatggtcgatgacaatcagctccaggtcgtccagctggcgacgggagatcacgggagaaatggtttcattcaccgggagagcaaaaattttatttatcattgtgcaatcctatctctgcagacaaaaaaaagagcgaccgaagtcgctcttacagattactttttcatctcaacttatttggagatgtgggcaatcagatccagaactttgttggagtagccggtttcgttgtcgtaccaggaaaccagtttcacgaagttgtcgttcagtgcgatacccgctttagcatcgaacacggaagtgcaaacttcgccgttgaagtcggtagaaacaacgtcgtcttcggtgtaacccagaacgcctttcatagcgccttcagaagcggctttgatggctttcttgatttcttcgtaggacgccgctttttccagacgaacggtcaggtcaacaacagatacgttcggagtcggaacgcggaacgccataccggtcagtttgccgttcagttctggcagtactttacctactgctttagcagcgccggtagaggacgggatgatgttctgagctgcgccgcggccgccgcgccagtctttgtgagacgggccatcaacggttttctgagtagcggtggtagcgtggacggtggtcatcaggccttcaacgataccgaagttgtcgttgataactttagccagcggcgccaggcagttggtggtgcaggaagcgttggaaacgatgtcctggccagcgtaagcgtcgaagttagcgccgcgaacgaacatcggagtgttgtctttggacgggccagtcagaacgacttttttcgcgccagcggtgatgtgtttacgagcggtttcgtcggtcaggaagataccggttgcttcagcaacaacgtcaacaccaacttcgtcccacttcaggttagccgggtcacgttcagcggtaacacggatttttttaccgttaacgaccagatgaccgtctttcacttcaacggtaccgtcgaaacgaccgtgagtggagtcatacttcagcatgtaagccatgtactctgcgtctaacaggtcgttgattgcaacgatctcgatgtcagaacgtttctgagcagcacggaaaacaatgcgaccgatacggccaaaaccgttgatacctactttgatagtcatatattccaccagctatttgttagtgaataaaaggttgcctgtaaaattacaaaaaccttacgcagcgtcaagcggaatcgtgtcaatcattgcgacaaatcaatcctgagcagacctttgcgcgattgatttgcctcactttccctttgagcccaattccatatgggggctgcgcgcggaattttaaagggcatttaagataaaaacgtgatttaagtcacaattatctggctgcctgtgggcaccggataagtttagaacaaaagtgtacgcttcattgttaatgttttgttagaattggagcgaaagtagtccattgcaaagcgagatgtaagcccatggcgaataaacccaccccggaagagctgaaaaatggcttgagcgaaatgcagttttacgtgacgcagcatcatggcaccgaaccgcctttcaccggacggctgttgcacaacaagaaaaatggcgtgtaccactgcctggtgtgcgatgcgccgctgtttaactcccagactaaatacgactccggctgcggctggccgagcttctacgagccggtaagcgcggaggccattcgctatctgaccgacaattcgcacggcatgcagcgcattgagatccgttgcggaaactgtgatgcccatctcggccacgtgtttccggatggtccgcagccgaccggcgagcgctattgtgtcaactcggcatcgctgagcttcaccgatgagcaaaatggcgagcaaatcaagggttgaagaaacgattcagcaaattattccaggcggaggtgagcggaagatggatattgagcaaattatcgacagtatgacgccggaagtgtatcagcgtctggcgacggcggtagagctgggaaaatggccggatggcgtcgcgctgacgccggagcagaaggaaaatagcctgcagctggtgatgctctggcaggcacggtataacaccgacgcccagcacatgaccatcgacaccagcgggcagatggtaatgaagagcaaacagcagctgaaagaggattttggcatcgtgccgaagccgatcgccaccgttaaactgcaataaaccgccggccggcggtgagacgttccggcgtcgggtaaccgcgcgccggatggcgtcatgtcgaatgaccgcgtccggcggtcagccgcttcgcttactttttgttcatcatcgctttcagatcggcaaacgggttgtaggtggcctcgccgacgctcttttgcgcatcttctcctgccaccaccgtggagccatactgatcggcttcggtgtacttggaatgttcgtgatcgtgacagtacaggcacaacatctcccagttgctgccatcttccgggttattggagtggtcgtgatcgatgtggtgcaccgtcagctcgcgcagattggagtagacaaactcccgtgagcagcgtccgcacacccagggaaaaagcttgagcgccttttcgcggtaacccacttccagacgtgcgtaatttttggggatataggccatggccccctgcctcctgtcaaacggttaagctgcgccaacccctggcgcagcggataacaggcatcataacctatcccgggcggcgcgatatacctgcattgcaggcgatgctgcctgcgtcacgcctcctggtgccgacgatgcggcggaacagccatgattagtgtttgatccccagcgattccgccagctgacgggccagctgattctggtcatcggcgccatattcccagaacatggccccggcgaggcccttcgccttgatatagtccgccttaatggctaccgagcgcgggttctcataggagagggcgaacagcggcttgccctccgcggactgcaccgacagccacggaaccttcgcctcatcgtcccagtgctcggtaaaacgcttttgcggatcgttgagcagtttgcccacgatatcattgtatttcacgtaggtgtctttgctcaggtcatagcccagcgaggcaaacagcgcgatctgttgtggcccaaaatagggctgggtgaccggattgttttgcgcatccgctttcgtccagtcaatccccggctcgaccgcccgtttcggtacccggccataaaaaccaatcccgaggttcatctggctgggtttaagcccggcggccaggtaattgttgaccacaaaatcggcgctgtatttatccgctgcggcgaccgtcggccagtggctggagtcatacagattcgagttgaagtactgcgtgccgtaggccatgtcgtaggtcatcaggttgatgtagttcagcaccggggccaccgctttgacgtccacccagcttttcgggctctcggcattggcgcctacggcgatagtcaccagcttttgctcaccgactgcctcacgcagcgatttcagcagggcagtgaagttgtcgcggtcagccggctggctggccaccagtccccaggcgccgttgaccggaaactcccagtcgaggtcaatgccgtccagaccatattgctggatgattttctgcgcggaacgaataaagacggcgcgactttctgcggtcgccgccgcgccggagaaaccacgcgcgccccagccgccgaccgacagcaggactttgaggtccggattctgtttacgcagggcggggagcttttgcagatccgcctgcaccttcggcgacagccagatctcgtgcagatgagcaggatccttcagggccgcattggtctcgtctttttcatcgttatagataaggccaaacgagtagttgagatgagtgatctgccggacgtccagcttatcgatatcaccgcccggcccggcggtgacgtcgccgccgccgttaaaatagccgacggacatcagcggttgggcagagagcgcggaagcgcaaagcaagggcaaggctgccagcaagggcaaaagtttcatagtggttcctctttgacataaaaataaccacgccacggaaatggcgtggcgaaaaaacagccttgccagactagcagcaataacctgttgaaactgcgagagagttcaatttatggacaatagcgaggcggcagaagaagacccggcgcgggggcgccggggggggggggagggatcaggcctgagtttcccgccagtcgtcgagggtatagagcgtggcgcccgcggcggccatctccataaacgcctggctgctgtcccgcggctgcagatttacgccgcgacagccgtcggtgatgacgttgaccgcgtagcccagcgccagggcatccagcacggtgaacttaacgcagtaatcggtggcgaggccgagaacggtcagctccacgatcccctgaccacgcagccagccgtccagttcggttttctgccggtgaccgttgtcaaagaaagcgctatagctgtcgatgatccggttttgccctttgtggaacacagcggcgatcgcctgctgcttgagcagcggatgcagcgccgcgccttcgctgtgctgcacgcagtgatccggccagaaagtttgcgccaggccgtccagctcgccctcggtgtagggttccacctggtgctggctggcgaagctgccgtgatccgccggatgccagtcctggctggcgacgatgggctcgccgcgcgccaggctccagtcgataagcgcattggctacctcgacggtactgtcgccttcaggaaccgccagcgcgccgccggcgcaaaagtcgttctgcaaatcaaccagtaacagcgctcgatgtgccatacgtcctccttaagcctcgtcgggggtgagttcgccacgcagattttgctgcatcgccgcgcgaatggcgtcaacgtccagctgctggctaagcagatagtgtagcttggtcagcgtcgcttccaccgtcatatcgaaaccactgatgacccccgcctgggcgagggcgttgccggtggcatagccgcccatgttcacctttccggacatgcactgcgtcagattgaccaccacaataccgcgctggctggcttccgccagcacctgaataaactcgccattctgtggggcattgccgacgccataggagcggaggatcagcgctttcaccggttggcgcagaaaattacgcaccacgtcggcggagatgccggggtaaatcgtcaccacgccaatcggctgcggagtgatggggtgcacgataagatctccgctgccctgcggtgccggcggagtaccgagacggcgaatatggatcccggcctccagcagcggggcaaggtttggcgaggcgaaagcgtcgaagccgtcggcatgggctttggtggtgcggttgccgcggaacagtcgattgttgaagaacagcgccacttcgttaatcggatagttggcggcgacgtacagggcgttgagcaggttaatctgaccatcggaacgcagctcggccagcggaatttgtgaccctgtcacaatgaccggcttgccaaggttttccagcatgaacgacagcgccgaggcggtaaacgccatggtgtcagttccgtggaggatcacaaagccatcatactcctcataatggctgcggatatcgtcggcgatgtgctgccagtcctcgggggtcatatcggatgaatccatcagcggatggtattcatggatcgtgaagtccggcatctccggacgatggaactccggcatcagcgccagctgacgctgcagatggccggaaacgggtacatagccgtgttcagagcgctgcataccgatggtcccaccggtgtaggcaacgtaaatcgattttttttgcatagcatcgcttaggttggtcgtagacaggcgcagtataaagagacgcaggaaaaaatacagcgtcggtcgcgggctttgtggcagtgttggcaggagagggaaaaaggctgccccgggagacggggcagccgctgcgtattaacggatgttagcgcaggtcaggcagaaggcatagcgattctgcgggtcgttaaacgccgccagcttgtcgctctccgctttcaccgtctcggccgccgcggcgaccggcgcaggcagccaggcctgaatggccgccggcagcgaggcgcgtaccgagccggtcaggctatccagcaccatcgagaagaaggtcggctcttcctgatagtagttgaggtgccaggttttcagcttcgccagctcggcggctttggccaccgcgtcgtcgaagtcgccgaggctgtcgaccaggccgttggctttggcatcttccccggtccagacgtggccctgggcgatctggtcgattttctccggcgtgctcttacgggcgttagccaccagggtgataaagcgctgatagccattctcaatgctcaactgcatcagctgctgcacttccggcggcagcgctttggtgctggagacatccgccagcggcgacgtggcgacgccgtcggtgtggacgccaatcgacccgagggtattttccacggtgttgatcaccccaaagatgccaatggagccggtgagggtgcttgggttcgccacgatgtaatccgctggggtggagatccagtagccgccggacgccgccatgccgcccatcgagaccactaccggtttaccggcggctttggctgccgccagctcttcacgaatgatttccgaagcggttacgctgccgcccgggctgtttacgcgcagaacgatggccttaattttcggatcgaggcgcgcatcgcgaatttgcgctgcggtggtatcgccgccgacgttgcccggggtctcttcaccgtccatgatggcgccgttggcgaagattaccgcgatggcggaaccctggtcagacggcgtcttcacgttgtagtcgtaatagctgatcgcccggtaattgttatccgctttgctccagccaaactgtttggtcagcgccttttccacttccgtggaggtcgccagctcatccaccagcttattgtccagcgcatatttcgccgtatcgccgcccaccttacgcaggccatcgataatgccctgggcgcccgggaagagctgctgggcggtgatctggcggttggcggcaatggtgttgaggtagttctgccacagttcgccaatccagcggctatccgcttcgcgggcggcaggggacatatcatcgcggatgaatggctcgacggcggatttataggtgccgacgcggaagacatgggtggagaccttcagcttatccagcagcgatttgtaatatagcccgttggtagcgaagccgtgcaggtctacctcgccctgcggcgagagccagattttgttggcgaagctcgccaggtagtactggccctggctgtagctgctgccgacggcatacaccggtttgccgctatcgcggaattcgctcagcgctttgccgatgtactgcatggatggctggtcgccaccgacgaagtttttcagatccagcacaataccggtgatattgcggtcatccttcgcctggcgaatggtctgcacgatatcgaacagggagttctcctgcagacggtccgagctggcgccaaacagctggcggccaatcacgccgagcttgctgctggcggatggtttatccaccaccacgccggtaatatccagcaacagcgcgccgcgcgcggcatgttcgctggtggtgctgctgaactggctccagatgccgatacacaccagcaccagcaccaggaagatcgcattgagggccagtttgcgaataaagttgagtatccgccacgtccatttaaaaaagctggcaatcagtcgccaaagggttcgcatgtcttctccctaacgttatctaaaaagggcaggccgcaggggccgccgcgtctggctatcctaaagagtgagccgtcggttgtcagcaggaatcaccgaccgcgctgtaacaaaatccttgtgcatgttaattttatgaaaaatgacatcacaggagttatacagatggatgctctcgatctactgcttaatcgccggagcgcttcccgcctggcggaacctgccccggcgggcgaacagctggaaaacattctgcgcgccgggctgcgcgccccggatcatggcaccctgcagccgtggcgcttctttattatcgccgatgacggccgcgagcgcttcagccagttgctggaaaaaggggccagagaggccggccaggatgagaagggaattgagaaagcccgcaatgcgccgttccgcgcgccgctgattattaccgtggtcgcgcgctgtgaagaccaccctaaggtgccgcgctgggagcaggagatgtccgctggctgcgcggtgatggcgatgcagatggcggccctggctcagggattcaacggtatctggcgcagcggagcattgaccgagagtccggtggtgcgggccgccttcgagtgccgcgaacaggataaaattgtcggcttcctctatctggggacgccgcagctaaaagcctcaaccaccattgccctgccggataccgcgccgtttgtgacgcgatactgagtccgcgtgtgttatgccgggtggcggctgcgccttacccggccaacgcatccgtctctgactgtctgtaggcccgcgcaagcgcagcgccgccgggcaaggacagcgggcacggagccgattttgtgccgggtggcggctgcgccttacccggcctacgttcgtacgacctgtcgttaatttattcacttt

SEQ ID NO: 77 - DNA, 72898 bp, Unknown
  source: /note="Description of Unknown: MKP2_coc_1 Mutant Bacteria sequence"
gtacttgcgtacgagctcttcttaaaatatggcggtgagggggggattcgaacccccgatacgttgccgtatacacactttccaggcgtgctccttcagccactcggacacctcaccatattgtctttcccgttgttgtcgggaacgggcgctaatgtagggaaatacgtatcgcccgtcaatcaactttttgcaaaaaaagcgcgtttagacaaacttcgagcaacttgctccttaaacgtgcgaaatccgttttttttgtcgccagtagcttttcccttttcgctccggggaaatttgttatgctggcaaaccaatagaaaacaatgagtaaaataagacgccagcgtcaatcggccaaaggcgtctgctatcaggagcccctatggagattattttttaccatccgacctttgatacccaatactggatctgtgagctggaaaagcagttacccggcgcgcgggtgcgcgagtggaaagcaggcgataaccggccggcggactatgccctggtctggcatccgccggtagagatgctgcagggccgggcgctgaaggccgtgttcgccctcggggcaggggtggactctattctcagcaagctgcgcgaccatccggatatgctgccgctgtcgattccgctgtttcgtctcgaagataccggtatgggacggcagatgcaggagtatgccgtgagccaggtgctccactggttccgccgctttgatgactatcaggcgctgaagctggcttcccgctggcagccgctgcccgagtaccgcgccgacgaattcaccgtcgggattatgggcgccggcgtgctgggggcgaaggttgcggaaagtctgcaaccctgggggttcccgcttcgcgtctggagccgtagccgcaaatcctggccgcaggtgcagagcttcgccggccaggccgagctgggcgaattcctgcagggcactcgcgtgctgatcaacctgctgccgaataccgccgaaaccgccggcattattaaccagacgctgctggcgcagttgcctgatgagagctatgtcctcaaccttgctcgcggcgtgcatgtcgttgaagaggatctgctggcggcgctgaacagcggtaagctcaaaggggcgatgctcgatgtcttcagtcgcgaaccgctgccgcaggagagcccgctatgggcgcatccgcgggtggccatgaccccccatgtggcggcagtgacccgtccaatggaagctatcacctacattgcggagaccattagccggcttgagcgaggggagccggtaagcggtcaggtcgaccgccagcgcggttattaagacgagagaaccccgccacggcggggtttttgctaatcaatagcccggtttcctgctattcttgcggcaaacagaagaggagaatgtgatgtatcccgttgacctgcacatgcataccgtcgccagcacccatgcctacagcaccctgcacgattatattgcggaagcaaagcgtaaagggatcaaactcttcgccatcaccgaccacggcccggacatggcggatgctccgcactactggcacttcgttaatatgcgcatctggccccgcctggtagacggggtggggatcctgcgcggtattgagtcgaatattaaaaatattgaaggcgagatcgactgttccggaccgatgttgacttccctcgatctgatcatcgccggatttcatgagccggtgtttccgccgcaggatcgtgacacccatacacaggcgatgatagccgcgatggccagcggtaaagtgcatatgattagccatccgggtaatccgaaattcccggtggatatcccggcgattgccgaagcggcggctcgctaccaggtggcgctggagattaataactcctcgttcgtatcatcgcgcgtgggcagtgaagacaactgccgggccatcgccgccgcagtgcgtgatgccgggggatgggtggcgctgggctcggactctcacaccgcctttaccctcggggagtttaccgaatgccgcaagatccttgatgcggtcgatttcccggaggagaggatcctcaacgtttctccgcgtcgcctgcttaacttcctcgagtcgcggggcatgccggcgatcccggaatttgctgacctttaatttgtataactggaataactgaatgaacgagttttcaatcctctgccgcgtgctgggttcgctgtattaccgtcaaccgcaggacccgctgctggtgccgttgtttaccctgatccgcgagggcaaactggccgccagctggccgcttgagcaggacgagctgctggcgcgtctgcagaaaagctgtgaaatgcaatccctggcgacggactataatgcgctgttcgtcggtgaagcctgcagcgtcccgccgtaccgtagcgcgtgggtggagggttcctcggaagcggaagttcgggcttttctgagcgaacacggcatcccgacaggggaaggtccggcggatcatctcggctcgctgctgctggccgcctcctggctggaggatcatgccgcagaagaccagagcgagacgctggagctcctgttcgccgactatatcctgccgtggtgcgggacgatgctggggaaagtcgaagcccatgcgcacacgccgttctggcgcaccatggcgccgttgacccgcgacgccatcgccgcgatgtgggacgagcttcaggaagaagatgagcaataatatgtgatgcaaatcactgtttgaatgaaactgaaagaaagttcattcatatactgtgttttagatcgcattcttccggcgcgtatctgctaggatacgcgccatgaacatactcttcgcaatcgcattaacgacaggcatcctctccgggatttgggggtgggtggcggtcgctctcggcctgctgagctgggccggattcctcggctgtacggcctatttcgcctgcccgcagggcggcttgaaagggctggccatctcgtcctgcacggtgatgagcggcgtggcctgggcgttagtgattatccacggtagcgcgctggcgccacaggtgcagatcctcagctatatgatgaccggtgtggtcgccttcctgatgtgcattcaggcgcgacggacgctactgtcgtttgtcccgggcacctttatcggcgcctgcgcgaccttcgcggcagacggcgactggcgtctggtgatcccttccctggcgctgggtctggtctttggctatgccatgaaaaatagtggcctgtggctggcggcccgtgcggataagcataaattgttcgtcaacgacaacgcctgatcggcgggacgactaaaaaacaggaccttacgggtcctgtttttttatcttctcgtcaccggacaaagcgatagtcttgctcccgcaggcgagaatgccctagtatcggcagaaagccgtatccacacgctatgccgacaggaggagaaatggctgttaaacctgaggtaattctcggcgatattacgacacttgatgtcgatgtgattgttaatgcggcaaatccctcgctgctgggtggtggcggagtagacggggccatccaccgggcggccggtcccgcgctgctggcggcttgcaagcaggtgctgcagcagcagggcgaatgccctcccgggcatgcggtaattactattgccggcaatctgccggccagcgcggtgatccacaccgtgggcccggtctggcacggcggcgaccgcatggaggcgcaaaccctggccgatgcttacaaaaacagtctgcagttggcctcggcaaataactatcgctccattgcgtttccggcgataagcaccggcgtgtatggctatccgaaagaggaagcggcggcgatcgccgtgcgcaccgtcaccgcgtttctcactcgctataaccctcttgagcgcgtcctgttcgtctgttttgacgaggaaacggcggctatctatcgccgcctgctggcgtcatacccctgattcaacagaataggctatgataaccgccagtcttgacgggaatgatgggtagcaggagggagcagggtgtcagaaggaaaagtccagcagaaacagcaggcgcgccgcgcggagatcgttgtcgctgcgcaaaaatgtttcgctgaaaaggggctgcacggcgcttccgtcgccgatatcgcccgggaagcgggcctgagcgtcggtcagctatatcgcatttttgccagcaaggaagcgatcatcgaagcgattgttagcgaaatcgtcaacgccagagtcggggagatgatcgatgagaaccacaatctggcgcgtaaagcggcggttttggctggcaggatcccgacgtcggcagccaccaaaagcgataattatctgctgatggagatcaatgccgaggcctcgcgtaacccccgcttgcgtgagatcctgatgcaggccgatcggcggttgaaagaggagggcggtcgcctgtcgcagcgctaccatcccgggctcagcgatgcgcgacgcaatgccgcatcagagctcatcgccgttctgacagagggggcagcctaccgctgtgagctgagcgcctccaccccggtcgataaggcagatttagaagccctgtacaatatgattttcgaccggctttttgacgagcaggcataatacggcacgcctggcgtgccgcacaggctaatggttagctggccgaggctggggttttggccggtttgttcatcggtttaccggagaacaggaaacgcagcagcggaatgcgcaggtgaatttcatacaggatcagggcaatacccaccacaaaaaccaacccgccaataaagcctaaggtattggacttaatgaccggggtgatccacgccccgtacagcagcgtcagcggatggtgcaccaggtaaataaacagcgaagcattgacgaaataggttacgcgcgccgactggaagttcagcaggcgatggccgagcgaaaagaccacattgaccatccacagcccaagcaccatggtgatcaccgattccgtttcatacatccagccgtcgccggagccgtactgctggttcagccggtaggcgataaatcccagcagcgccgctgcgcagcaccatggtgacggggtggtaaacatcgccttcagacgcggattaataaaggtctgcgcccccagcacaaagaagggaagatagaacagcgtctgcatcaccacaaagttaaacagaccattgctaagcagcggcgggtaaatcaggaacagcgatcggcggatcagcgcgtaaagcacccccagcgcaaggaaaatcatcgttagctggcccatagtgacagtgtcaccaaaggctgaggcaccccctgttgggcggcgcgtcagccatttaaacagcaccacgcccagcgaggtcagcaccaccagcaccagtaaaaaccacaggtgggaaataagctcccacgccagggtgttaaatttgtcgtacccggaaagggtgtgccagttttccgccttgccgttgacgtactgcagcataataaactgcggcagcgtcagcagtgggatagcggtcagcatcggaataccgacccgttcgacgcgcactttccaccactttttcaacgggtagcgcaggaacagcatgtaggagaaatagccggagatgacgaaaaagacctgcatccggaaggcatggatgaagtcattaaacagcgtcaaccaccacgagggctcagcgctgttgacatgccagctgtggctggaatagatcagcgaaatgtggaaagggatccccagcagcatcagccaggcgcggatgctgtcgaagaaatattcacgctgtaccggagtattattcatacgattcacgacaatctcagataattcgtcttatcactcaagatgataacgcttacattatcagcaaccctacatgaactcggggtacctgtctccaggataagcacgcaaagtgcaaacgggatagcgaactgtttattccctgcgccgctacgctgaacaaagcagggattatgttgtcggattgcctgagtttccattaaaatagatcggatcgatttaagcacacaaagggggaagtgcttacttatatgaaacataaaccacagatgatgaaaatgcgttggttaagcgcagccgtaatgttgtccctgtgtacttcatctgcatgggcatttagcattgatgacgttgcaaaagaggccaaaacgttagccgggaaaggctatgaagcgccgaagagtaacctgccctccgctttccgcgacatgaaatacgcggattaccagcaaattcagtttaatcacgataaagcttactggaataaccagaaaaccccattcaagcttgaattttaccatcagggtatgtacttcgacacgccggtcaccatcaatgaagtgacggccaccagcgtgcgcaaaattaaatatagcccggactattttaactttggtaacgttcagcacgataaagacacggtgaaagacctcggtttcgccggcttcaaagtactgtatccgatcaatagcaaagataagaacgatgagatcgtcagcatgctcggtgccagctacttccgcgtgctgggtcagggtcaggtttacggcctgtccgcgcgcggcctggctatcgataccgcgctgccgtccggcgaagagttcccgcgttttcgcgagttctggatcgagcgtcctaaagccaccgacaaacgtctgactatctatgcgctgctggactccccgcgggcaaccggcgcttatcgctttgtcatcatgccgggacgcgacaccgtggtagatgtccagtccaaagtttacctgcgtgacaaagtgggaaaactgggcgtggcgccgctgaccagcatgttcctgttcggttccaaccagccttctccggcgcttaactatcgtccggcgctacacgactccaatggtctgtcgatcctggccggtaacggcgagtggatctggcgtccgctgaacaacccgaaacaccttgccgttagcagctatgcgatggaaaacccgcaagggttcggcctgctgcagcgcggccgtcagttctcgcgcttcgaggatctcgacgatcgttatgacctgcgtccgagcgcctggatcaccccgaaaggggagtggggcaaagggaaaatcgaactggttgaaatcccgaccaacgatgaaaccaacgataacatcgtgacttactggacgccggatcagctgccggagccgggcaaggagatgaacttcaagtacaccatcaccttcagccgcgatgaagacaagctgcatgcgccggataacgcttacgttatgcagacccgccgctctaccggcgacgtgaagcagtcgaacctgatccgccagccggacggcaccattgctttcattgtcgacttcaccggcgccgatatgaaaaaactgccggcggataccccggtcgccgcccaggcgagtaccggcgataacgctgaaatcgttgaaaataccgtgcgttacaatccggtgaccaaaggctggcgaatgatcctgcgtttgaaggtgaaagatccgaagaaaacgacggaaatgcgcgccgcgctggttaacggtgatgacacgttgagcgaaacctggagctatcagctgcctgccaatgaataagataacaaagtacattgacgcattgccgctgtcggacgccgagaaatcggcgctgccggacaccagcctgcaggccgttcatcaggccctggatgacgaccatcagaccttcgcccgcgaagacgactccccgctggggtcggtcaaggcacggcttgcgcacagctggccggattcgctgtctggcgatcagctggtgaaggatgatgaaggccgtactcagctgcatgcgatgcctaaagccaagcgctcctcgatgatcccggacccgtggcgtaccaacccggtcggccgcttctgggaccgtctgcgcggacgcgatgtcacgccgcgctatctctcccgtctgacgcaagaagagcgcgagagtgagcaaaaatggcgtaccgtcggcaccattcgtcgctatatcctgctgctgctgacgctgtcgcagaccgtagtggccacctggtatatgaaaaccattctgccttatcagggctgggcgctgatcaacccggccgacatggtggggcagaacctgtggatctcgttcatgcagctgctgccgtacgtgttgcagagcggcattctgatcctcttcgcggtgctgttctgctgggtttccgccggcttctggaccgcgttaatgggcttcctgcagctattgatcggccgcgataagtacagtatttccgcctcgacggtcggtgacgaaccgttgaacccggcgcaccgtacggcgctgataatgccgatctgtaacgaagacgttgaccgcgttttcgccggcctgcgggcgacctgggagtcggtgaaagcgaccggtaacgccgctcatttcgacgtctatatcctcagcgatagctataaccccgatatctgtgtggctgagcaaaaggcgtggatggagctgattgccgaagtgcagggcgaagggcagatcttctaccgccgccgtcgtcgtcgagtgaagcgtaagagcggcaacatcgatgacttctgccgccgctggggcagccagtatagctatatggtggtgctggacgctgactcggtgatgaccggtgagtgtctgagcagcctggtgcgcctgatggaagcgaacccgaatgccgggatcattcagtcttccccgcgcgcctcgggcatggacacgctgtatgcgcgttgccagcagtttgccacccgggtgtacggtccgctgtttacggcgggtctgcacttctggcagttgggggagtcccactactggggccacaacgccattatccgcgtgaagccgttcattgagcactgcgcgctggcgccgctgccgggcgagggcaactttgccgggtcgatcctgtcgcacgacttcgtcgaagccgcgctgatgcgccgtgccggctggggggtgtggattgcctacgatctgccgggctcctatgaggagctgccgccgaacctgctggacgagctgaaacgcgaccgtcgctggtgtcagggcaacctgatgaacttccgcctgttccttgtcagagggatgcacccggttcaccgggcggtgttccttaccggcgtgatgtcctacctgtcggcgccgctgtggtttatgttccttgccctgtcgacggcgttgcaggtggtgcatgccctgaccgaaccgcagtacttcctgcagccgcgtcagctgttcccggtgtggccgcagtggcggcctgagctggccatcgcgctgttcgcctcgaccatggtgctgctgttcctgccgaagctgctgagtattattctggtgtggtgtaaagggccgaaagagtacggcggatttatccgcgtcacgctttcactgctgctggaggtcctgttctcggtcctgctggcgccggtccgtatgctgttccacacggtcttcgtggtcagcgccttcctcggctgggaggtggtatggaattcgccgcagcgtgatgatgactccacgccgtggggggaagcctttatgcgccacggctcacagctgctgctggggctggtgtgggcggtcgggatggcatggctggatctacgcttcctgttctggctagcgccgattgttgtctcgctgatcctctcgccgttcgtatcggcaatttccagccgggcgacagtgggcctgcgcaccaagcgctggaagctgttcctgatcccggaagagtattcgccgccgcaggtgctcaaggataccgatgcgtacctgacgatgaaccgtcagcgttcgctggacgatggctttatgcacgcggtgtttaacccgtcgtttaacgccctcgccaccgcaatggccactgcgcgccaccgtcaggggcatatcctggagatcgcccgcgagcgccatgtcgagcaggcgctgaatgaaacgccggataagctgaaccgcgatcgccgactggtgctattgagcgacccggtaaccatgtcgcgtctgcactatcgcgtatgggccgcgccggagaaatactcttcatgggtgaacgcctatcagcagttggcgcttaacccgctggcgctgaaaacgaaataagccgtacgttaaggaaaataccggcagcgatgccggtatttttttatctgaaatacgaggatgtggatgcgaatactaccgatcattgccatggcgctgctgctcagcggctgcggcagcattatcagccgtacggtgcccgggcaggggcatggcaatcaatattacccgggcgtacagtgggatgttcgcgattcggcatggcgctatctcaccattcttgacctaccgttctcgctggtatttgatacgcttctgctgcctctggacgccagccacggcccctataactgattaacgctcgtcccactcgtcggctgccgtctgcccctcttcggtgtccagcgagggctcgagctgaaattcgccttcatcccattcgtggagcgtattttcctccagccactcctgacgcagctctatctcatcataatccccgtcgaagacgctctgcgcggcttcgccgctgagcatcgggaggcattcgccttgttcctcttcgtcagcaaaaaattcggcctgccaggcgatatcgccatcctgcagcacatacttttgaatgttgagctgctcaacgttggcgctctcttcatcgctgtcagggttgttggcgagaaattcttcacgtgctgcatcaatagcttcttcaagcgtggcgtagaacatcgaatcctttggcatagcgaatctcctgagaagaatatgaattgaacacgattcaatctatagaaggcggtacgcacggcgtcaagggacagagcccctctcgacgttaatttactgaatgcgaagtatccgcggctggccgacgcaggctgagggtggagtagatcgcattaaataataccacccctgcggtgaccagaaatacagcgcggaagccatagttagcggaaaccgacgcgccaatcagggggccggtaacgttgccaatatcgcggaacgactggttatagctgaagattcgcccggagatctggctggtggagttgtacaccagcagggtttgcaccgccggcagcagcgcgccgtccgcggcgccgagcaggaatcgcaggatacctaactgcagcggggtctgaacgaacgacatcgggatcaggagtagcaccgagataatcagcgccacgatgaggattttttccggcccgatgcgatctcccagtttgcccagccgcggggcgctcatcagcgcggcaatgcccggcaccgaggcgatcattccgctgataaaggcgatgttactgacgttgcccgcgagatcgcgtacataaagcgtcaggatcggcgcaatggaaccggtggccacctggattatcagcgaggtcacaaacaggctgagcaccagtttgggattctgcagcgaggagaacacctctctggcactgagcatctctttcctggcgatcggcacaaaattttcgcggattaaaaacagggtaaacaagaaacagataaatagtaccgccgcggtcataaagaagacggtgcgcaatccccagtggtcggccaggaagccacctgccagcgggccgagcagggcgccgcttaccgcgccggtagacagtgtccccagcgcccagccgcttttatggcgcgggatctgggtggcgatcagggcgttggcgttaggaataaaaccgcccagcaggccgagcaatgcgcgcagcagcagaaactgccagatattctgcgccattcccatcagcatcatcacgatggccatcccgagggcggaacgcagcagcatgatttttctccccttgcgatcagcaagccccccccagaacggcgaggcgatggcggagaaaagaaaggtaatactaaagaccagcccggaccacatgttcagggcgctatgcccggtgacgccgagctgttcgacgtagagtggcagaaagggcatgaccaggctgaaggcggcgccggttaaaaagcagccaagccaggtcacggtcaggtttcgtttccagttaatgggggtttcagcagacgacatagggttccactggcctgcgcggcaggtcaaattaagagaaaatatgagcctgctaattatgcgcctgagaaatagatgccgcaatggaggagagcttttaaagctaaaggagagcctaaagcctgagcggcgaagcttcccggccgggatgagcgcggccgggaaaagggatcagtagcgggagggcatgccttcggggcgggttttgaagcgacgatggagccacatatactgttccggggccatcatgatgcactgctcaacgatcttgttcatccacgcggcggtggtttccgcgtcgtccagcggcggggaacactctggcggcaggataatcagttcataacctttaccgtccggtttgcggcgcgggacgaagggcacgatgcaggctttggacattttcgccagcatccaggtgccggaggtggtcgccgcctggtcgaccgcaaacagtggggcaaagacgctggcggtcgggccgtaatcgtgatccggtgcgtaccacaccacttcgccttttttcagtgcccggatcatgcctttcagatccttacggtcaatcatgtccttattggatcgtagccgaccccaggtctgcagccagtcgatcaccgggttgtcgttggggcgatagacgccaatccccggttcgttcataccgaacatccgcgcacccatctcgagagtgaggaaatgaataccgatcagcagaatgccgcgctgctgcgcctgcacatcgcgaatatgctcaaagccgatggtgtcggtccagcgggcgatacggcgaaccggccagaaccaggccataccggtctccatcagccccatgcccaccgattcaaagttcatcaccaccattcggtggcgttcctgctcgcttttctcggggaagcagagctcaaggttgcgataggcgattttcgcccggcgcttcataaagcgcatggccagacggccgatggcgttcccgaggcggtagatcagcgggtagggcagttggacaaccagccacagcaggccgatacccagccacagcagccaatagcgcggatgcaacagcgccggagaaaatttaggcaaatgagtcatttcatacccgtatcagtgagcaacgtcttatattatcgcatttttttaccggccagccaaaggcggcgacagtcagctcgttttgttaagcggggcgcgaccgggtgagagaaatgtagcgtaaaatgtagggatgtaaattaattagctttgctatatcatgcccgccgtttatttcctcatttctatgtcgagcaggtacaccatgccagtgttacacaaccgcatttcaaatgagacgttaaaggcgcaaatgctggctgaaaccgagccgcgcacgacgatctcattctataaatatttcaccattgtcgacccgcaggcgacccgcgatgcgctgtgggttgccttaacccagctgaaggtctttggccgcatctatctggcccgggaagggatcaacgcgcaaatcagcgtgccgcaaagcaacgttgaggctctgcgtgagtttctctatggcttcgatccggcgctggcggggctgcgtttcaatatcgccgtggaggacgatggtaagtctttctgggtgctgcgcctgaaagttcgcgatcgtatcgtcgccgacggcatcgacgatccctcgtttgacgcctccaatgtgggggagtatctcaaggcggcggaagtcaacgcgatgcttgacgatccggatgccgtgtttatcgatatgcgcaaccactatgaatatgaggtgggccatttcgaaaacgcgctggagatcccggcggataccttccgcgaccagctgccgaaagccgtggaaatgatgcaggaccataaagacaagaaaattgtcatgtattgcaccggcggcattcgctgtgaaaaagccagcgcctggatgaagcataacggcttcaataaggtctggcacatcgagggtggcatcatcgagtacgcccgtcgcgcccgcgagcaggggctgccggtgcgtttcattggcaaaaactttgtctttgatgagcggatgggcgagcggatctccaatgacgttatcgcgcactgtcatcagtgcggcgcgccgtgcgacacccatactaactgcctgaacgatggctgccatctgctgtttatccagtgcccgagctgcgccgagaagtttgccggctgctgtagcgaagcctgcatggaagagcataagctaccggaagaggagcagcgtaagctgcgcgccgggcgtgaaaacggcaacaaaatctttaataaatcccgtggccggctgaataccaaactcgggatcctcgacccggagccgtcagaaaaaccataaccagacgagatcgatgatcgccagcagcagccagagcgccaggtagatcataaaatgctcgcgcacgttgttgaccagcatattaaacaggcgacgcataaccgctctcaatcactaacggcctcagcagaggccgtttctttacccaacggcaaaagtgccgcattccattacgcgttaaagcgcgccagagaaaagggggccagattgaagctcggtgcttcgccctgagcaaactgactggcaatttcgcccagcaccggcgcaaacttaaagccgtggccgctcagcccggtgatcagcagcgtgtctggcctgcctggcaacgtatcgataataaagtcctcatcgacggtattgtcgtaggtacaggaggcgccgtgcaggcagccgccgatgccaggcaggacgttacgcaaaaacgggaaggattcggaaccatcgctggcgacagcgccaaacgctaccctttcctgcggggtggagatcggctggccgccgttatgcttgccaattttcagttcattatcttccgccgggaaaccgtaatattgatcgccgttgggcaactcgccggtgaaggccgggaagtgattcttgctgctgtaacggccatcggcctggtaccaggcgaacaccttgcgtaccggctggatagggaggtccggaagcaggcgggtgacccaggtgccggcgctgaccagcagctttttaccatgatattcaccgtcgagggtatcgatggtgatcccgtcagcatggtgatgaatagccgagaccggacagttgaatagctgcgcgcagcctgcttcccgcgccagacggatccaggtttcgacggccagttcgctgcgcagtacgccggaagcgggttcgaaaatcgcccgatagtcatcggggaggcgtatctccggccagcgctgcatcacggcctgggcatcaagctcttccacctcaagctggaacgcacgggcgctggcggcgacgttggcgagaaaagcggagctggcggggccgaggttaatgacgccggtgcgttcaaacacggcttcgccactgatctctgccagttcgtcccatagctgctgggcacgcagcaccagcggaacatatttctcaccttcgccataggcgtgacggataagccggctgctgccgtgatggctgccttcctggtggggaggttgatgggcatcggtcatcagaacattgagtccggcacggcgcgcataatagccagcggcggcgccgacggagccgctgccaataatgataagatcgtattgcatggtgagttccgggtaattgccttgttagcagggtaattaactccctgtgcttatacaagcccgaaaataattcaggcacccgcaggtgcctgttaagtttaatgttaagtcattcgcaagccgcgttaatgtcggcgatactcgttttcctggtattcgccagattcaatcttcgcaatgcctgcttccaggattgaaataaactgacgtgcgacgtccgtcgttagccatagcgtctggccgatctcagcatcattactgttttcttgagtggggttctggtagtgcaggcgcaacatcagcgcatcgtagctatgaacggtgctgatgtcccatccaacgaggggatgggtctgaatgacttcattatttttttccatcataaccccttattcatatgttaaaagacaacaattctcgaggtttaatgcatattttttgaagcaagttaattatatcagggatcaagaataaactcgagaaattaaatgaaaggcagcatgattttcttcttttgccgcttttttactcaagataagcgcgtaaaatggccactttagtcgatattgagcagaataatcaggactattctgaacagaagaggggataaaaaaagccggggcgacccggcaaaaaaagcacaatgagggagcaaaccagagtaactggatcccgccatgcttcaggagagatcgtggacaaaccagtcgtccgcgctttcccatgtttcctgcaggatttcgcttatccggtctttgtcttctttcagggcgccaaacaccgagagctgattaccggtggcgtagcggacgctcacctggctatcgatggccgggaattgctcggcgatacggcgagagagttcgttattcagcgcttccagcgcgccgttaggtaaggcggtcgttttggcgatagacacttcaatgcgcataattgccccctgcgttcgatactggttatttatacagtatccggttagcgttgacaacagggggctgcgtttttatttcttcacggtccagcgaacggtttcacccgccaggaagggcaccagggtgtcattaggcagggcaatgctgtccacaacggtcgtctcttcacgcaccagttcaacgtagctctcattgaccggcagaccgtagaagcgcgggccgttcagcgagcagaaagcctcaaagtgctgcagagcgttcatttcttcaaacacggtggcgtagctgccgagggcggtcggggcgttaaagcagccggcgcagccacagctggcttccttacggtggcgggcgtgcggtgcggagtcggtgccgaggaaggcgcggctgaagccgctggcgaccagctcccgcagagcctgctgatgaatattgcgtttaagtaccggcagacagtacaggtgagggcgaatgccgcccaccagcatatggttgcggttgaacatcagatgctgcggggtgatggtagcagccagcagttcattaccgtcacgcacgtactcagcggcgtctttggtggtgatatgttcaaaaaccactttcaggccgggcaggcgctggcgcaggggctccatcaccgtctcaataaagcgcgcttcacgatcgaaaatatcaatctcggcgtgagtgacttcgccgtgaacgagcaacggcatccccagtttttccatccgctccagcactggcataatggcgtcggtgctggtgacgccgtggctggagttagtggtggcattggccgggtagagcttggcggcggtgaaaaccccttcgttaaagccgcgttccagctccgctgggtcgagggagtctgtcagatagcaggtcatcagcggggtaaaatcatgcccggccggcacggcgtccataatgcgctggcggtaagcgatagccgccgcgacggtggtgacaggcggcaccagattcggcatcacgatcgcccggccataaaactcactggtataaggcacgacggttttcagcatatcgtcatcgcgcagatggatatgccagtcgtctgggcggcggattttcaatacctgggattgtgctgtcatggaaggctccggctaataggttcagtcatcagggctgttttttgccgggcactaaggataagcgtaaacgttttcctttgcactcatttccgtaaaaaattcagggcgccgtagcgccctggagattaattggtaaaggggatgacaatctcgcctggcttcacctctatacctttggcgtatttcttcgccagcgcttcgccggtgctggcgtcctcacgcaggacataagccggctgctggctgaagtagctgcgcagagactgattcaggtaggggagcagggcctgaataaccgactgcagcttctccggcgccactttggcatcgaccacttccatttcctgcaggaagatggcgcctttctctcggtcaaaggttggcagcgctttgagcttcagatcgatcgtcgctttctgcgtaccgaacagggagttaagatcgacgttggcgatcccgctcagggtgactttgcccggctcctcgcgcccgatagcgctggtcaggttctgcagttcgatatgggcgtcggcaacgcctttcagaccaatatctttggcgaaatggtttcgcttctgcagggcctggttaatctcctgctcgcttaccgtgtattgggtcagctgattacagccgctcagcaggccgctgacaattagcgcggcggcgatcaatatctttctcatggggttcctcaagctcataccttccttcatcctgacacaaagcatcatgacctgtcagcacccatcgcgccagcagaataggctgaaagcaggagaaaccgccgccgcgcgcatcaggtgcgcggctccagcataccggaggcagagcgtttcgggctgaattgccaccatagcgccaggaaggtgataaccccgatggcgccgagcatcagccacggcagttcgggctggccgacggctttcccggcatcaaacagccagccgccgcccgcgtaacccagcgcgccgccgaaggcgagccccagacggctgaaacccatatagctgccacgcgcccgggcgtccgccagcgaagcgcccagcgtctcgcgggcgggttcggcaatgatagagccgatgtaaaacaggcaaatcagggtaaacagctgctgtaaactgctggtcatcccgatggggagcatggccagggtcatcaccagcagaccggccatcagccggtgctcaaggcggaagcgtttttcgctccaacgggcaataggatagagcagggtgagcgaaatggtggcttcgatggcgtacatccatttcacggcggccggcgagccggcgatgtcattcaccatgatcggcagcatcagcatcacctgcaccgccagcatataatagccggtcagcgtcaggacataggtgacgaagcgtttgtcccgcagcacccggcccagaccctcgcgaatcggcgttttcaccgtcgagagcttccatgccggcagataccaggcgttaaacgcggcgcaggcgataaacagcgcggcgccggcgctgcacaccaggcgaaaatcatactgcagcagccagctgcccagcagcgcgccaatcaccgcgccggcgctatcctgcatcatcaggatggagaaaaagcggccgcgctgatgcggacgcaccagcttaaccaccagcgccgcccgcggcggatcgaacagtgtaccgccgagtccggagagtatgcacgagaaccacagcacccacggctcatgggcgacggccatcgccgcgaaaccgccggcacgcatcagcataccggtgacgatcatcggtttcgcgccgaagcggtcggcgatggcgccgccaaagatgcctaatccctgctgtaccagctggcgcaggccgagcgcaatgccgaccatcagcgctgcccagcccatctgatcgacaaagcggatggaaatcagcggaaaaacgacaaaaaagcccagcacgaccagcatgttatcgactaacaggaaatatttacccaggctccttgcctgcgagacgcgggacatttcccctccagggaaaaatagagataagcgaggatattctgcgggcaatctgctgcttttcccagcacccttgcgacaatatttttttatcaaaaagcaagatcgattgagcctattcatcgaaaagaggagatggcgcagaaaatggtatgttgctgttttcacactatcgtgcaggaaaggtatagtgatgaaagcaagagtgaagtcagggggactgaaaaaggaaatgtttggctatcgcagtaacgtgccgaaggtgcgtttgacgacggaccggctggtggtgcgcctggttcacgatcgtgacgcctggcgtctggccgattattacgccgaaaataaagcgttcttaaaaccctgggagccggttcgtgacgacagccactgctatccctccggatggcaggcgcgtctgtcgatgatcgctgagtttcataagcaggggtcagctttttatttcgcgctgctcgaccctgaggaaaaagagatcatcggtgtggcgaatttctccaacgtggtgcgcggatctttccatgcctgttatcttggctattccattggcgagaagtggcaggggcaggggctgatgtttgaagcgctgacgtcggcgattcgctatatgcagcgcacgcagcatattcatcgcattatggccaactacatgccgcataatcagcgcagcggcgcgctgctggcgcggttggggtttgaaaaagagggttacgccaaagattatctgctgattgacgggcagtggcgtgaccatgtactgacggcgctaacgacgccggactggtctgcgggacgttaaggagagaggatgaaatatcagttaactgcgcatgaagcgcgcgtcattggctgcctgctggaaaagcaggtcaccacccccgagcagtatccgctgtcggtaaatgctgtggtgaccgcctgcaatcagaaaaccaaccgcgagccagtgatgtcgctgagcgaaggcgaggtccaggccctgctggatacgctggtgaaacggcactatctgcgcacggtcagcggattcggtaatcgcgtcaccaagtatgaacagcgcttttgcaactccgaatttggcgatctgaagcttagcgccggcgaggtcgcggtggtcacgacgctgctgctgcgcggtgctcagacgccgggcgaattacgcagccgggcgcagcggatgtatgagttcagcgatatggcggaagtggaaagcgtgctggaagggctgacgacgcgcgaagatggccccttcgtcgcccggttgccccgggagccgggaaaacgggaaagccgctatatgcatctgttttgcgacgatatggacacgctgatcaccacagtggaagctctcgcgccgctggacgatgacggcgatctgcgcgccagggttgaagcgctggagggcgaggtggcggagctgaaagcgcgcctcgattcgctgttacaccatctgggagactaaaacgtggggacaagattgcgcattggggtggtcggcttaggcagcattgcgcagaaagcgtggctgccggtgctgggggcggcggaaagctggacgctgcaggcggcctggtcgccgggtaaagagaaggcgctacggatctgcgaaacctggcggatgccatacgctgattccctcgatgccctggcggcacagtgcgatgcggtctttgtccatacctcgacggcttcacattatgaagtagtgaatcacttactgaatgccggggttcatgtttgtgtggataaaccattggcggacaagctgagtgaggcggagacgctggtcgagctggcggcgcgacgtcgactgacgttgatggtcggtttcaatcgccgcttcgcgccgctctatcgggagctgaaggggcggctgggcgaggcggcctcgctgcggatggataaacaccgtagcgatagcgtcggcaacgatctgcgctttacgctgcttgatgactatctgcatgtggtggataccgcgctatggctggccgacggtcaggcgcgtctgcgcggcggcgcgctgaagatcaccccgcagggcgaaatgctctatgccgaacatcagttcagttcgccccggctgcaggtcaccaccagcatgcatcgtcgcgcaggcagccagcgcgagtgggtgcaggcggtcacggatggcgggctatatgccgtcagcgagatgcgcgaatggcaggaggagtgcggtcatggcgtggtccagcgcccggttgccggctggcaaaccacccttgagcagcgcggctttgtcggctgcgcgcgccattttatcgaatgcgtgcaaaatcagacagttcctgaaactgcaggcgaacaggcgctgctggctcagcggatcgttgagaaactgtggcgcgacgccattagcgaataatccattgtaacaactgacagtagtaattcatgttgaacccggtagactatcgccactttccagcgcccgcatttgcgggcgttttactccagggtttggaataacagcgtaatgaaccttttaaaatcactggcggcagtcagttcgatgaccatgttttcgcgcgtgctgggctttgcccgcgatgcgattgtggcgcgtatttttggcgccgggatggcgactgatgccttttttgtcgccttcaaactgcctaacctgctgcggcgtatttttgccgaaggcgccttctcacaggcgtttgtgccgatccttgccgaatataaaagcaagcagggcgaagatgccacccgcgtgtttgtctcatacgtctccgggctgctgaccctggccctggctatcgttaccgttatcgggatgctggcggcgccgtgggtaatcaccattactgcgcccggctttgccgataccgccgataagtttgcgctaaccacccagctgctgcgtattacctttccctatattttgctgatctccctggcttcgctggtgggggcgatcctcaatacctggaaccgcttctcggtgccggcctttgcgccgacgttcctcaacgtcagtatgattggctttgcgctgtttgccgcgccatatttccatccgccggtgctggcgctggcctgggcggtgacggtcggcggcgtgctgcagctggcttaccagctgccgcatctgaagaagattggcatgctggtcctgccgcgaattaatctgaaagatgccggcgcgatgcgggtggtgaagcagatggggccggcgatccttggcgtgtcggtaagccagatctcccttatcatcaataccattttcgcctcattcctcgtgtcgggctcggtgtcgtggatgtattatgccgaccgcctgatggagtttccctccggcgtgctgggcgtggcgctcggcactatcctgctgccatcgctgtcaaaaagcttcgccagcggtaaccatgacgagtattgccggctgatggactggggactgcgtctctgttttctgctggcgctgccgagcgcggtggcgctggggatcctcgccaaaccgctgaccgtggctctgttccagtacggcaaattcagcgcctttgacgcggcgatgacccagcgcgcgctggtggcctattccgtggggctgatgggccttatcgtggtgaaagtgctggcgccgggcttctattcccgtcaggacatcaagaccccggtcaagattgctattatcaccctgattatgacccaggtaatgaacctggcgtttatcggcccgctgaagcatgcgggtctgtcgctgtccatcggcctggcggcctgcctgaacgccgcgctgctctactggcagctgcgtaaacagaaaattttcaccccgcagccaggctggttggccttcctgctgcgtctgattattgcagtgctggttatggccgcggcgctgctgggcgtcatgcatctcatgcctgagtggtcgctggggacgatgccgttccgtctgatgcgtttgctggcggtggttatcgccggggtggtagcctatttcgccacgctgctggtgctgggcttccgcgtgaaagagtttgtccgtcgcacggcgtaagcggttgtgagggtagaaaaaccccgcttcgcctcaggcgaagcggggttttttttatgatgcgctgcgttcggcagcgaggatgcgggcattctccagcaggcggatcgccagggctagcgcgccagtgatcactgccagcgtgaccactccgttccagccggccagcacgtacagcttactgcccagcaccgatcccagcgacatcccgataaacaccacggtgaacagcagggcgttgaggcggccgcgggcctgtggctcaaggccatataccaggttctgatgcgccaccaggcttgactgcaggccaaggtcaaagccaatcgccgacagggcaatcagcgccaactgagcgtgcactggcagcagcggcagcacaaacatcagggcaaaggagagggtgaccagcgccgcacccatctgtgtcaccttaccggcgccaaatttatcggccagaccgccggcaagcggcgcggccagcgccccggcggccccggcgataccgaaaccgcccgctactgcgctgcccatgtgatagtgttcggagagcatcaccgccagcgtcgaccagaaggcgctaaaggcgatagagagcgcgccctgagctagcgcggcgcggcgtaatgccgggtaacgctgccacagatgcgccatcgaggccatcagctgcggatagctcagcgtcgagtgcacagcgaagcgcggcaggacgcgccacattaccaggccaatcagcgcgacgctgaccgccgccgcctgatacatcacccgccagccgaatacggcgcccaccacgccgctgaccgtccgggagagcaggatccccagcagcagcccggtcatcaccgtgcccaccatttttccctgcttgcccgccggggcgaggatcgccgccgccgggacgatatcctgcgccatggtcgccgccataccgatcagcagactgaccaccagcagtgagctgagctggccggggaggctgcacaggagcagcaggagcgccagcagcgcgcttttcaccaggatcagccggcggcgatcgtggcggtcgccgagcgggagcaggaacagaatgccgagcgcataacccgcctgcgtcagggtagggaccagacccataccttctacagtcaggtggagattggcgcccatcaacggcagcagcggctgcgcgtagtaaatagaggcgacgctaaagccggcgccgagtgcgagaatgaagataatccagcctgcgtcgcgggtggaaagggaagtcggtgtcatgttcaatgcctcatagatgcgatggggctatttttccctgaacgcgactggcgcggtagccgggctggtggtaaaacggttatacgtagcacgtataggcaaaaggaaaatgaaaagacaagagcgtatagaccgcattgagctgatgcgcacctatatccgcatcgtagaggccggatcgctctccgccgccgcagggcagatggacactacccaggcgaccgtcagccgccgcctgcagtcccttgaagggctgctgggggttaagctgatcctgcgcaccacccatgcgatgaagctcactgacgatggcgaacgctgttatcgtcacgcccgtcaggtggtggacgcctggctggcgctggaggatgacctgcgtattgccgacgatcggccggtgggcgttctgcgagtgcgggcgccccacgcgtttggccagcagcagctgctggcgccgctggtggcatttctacagcgccatccgcagctgtcggtggagtggatgctaaacgataataccgtcgacttcctcagcgataatatcgactgcgctattcgcgtgggggcggaggtggatccagcaacggtatccgtactgctggcggaagtgccgcgctgcgtagtggcttctcctgagctgctggcgaagtatccgccgttaacctcgctggaggcgttatcgggcctgccatggatcgacattaataccttttatcagcatgaggtacggctcaggcatcaggcaagcgggcagattgtctctacagcgattactccctgtctgagcactgacagtctttacgtcgcgcgcaacaccgcgctggcggggctgggggtggcgatggtgtccagctggacggtcgtggaggatattgccgccggacggctgattgagctgttcccgcagtggcgacccgcctcgctgccggttcatctggtttatccctgggcgcgctattacccgacacgcctgcgtaagttcctcgacctgatgcgggagatcatgccggatctcgccgggatgcagcgtccgcaaagcgcataaaaaaaccggccaaaggccggtttttttattaagcacgcttactcgacgggctgtgggcgagtcggttcagcggtggctttatgggtcgcgctatgaccaccggcggcgcctttaccttcaaaggcgaacggcgggcgcacccaggtgctgtgacgcggtgcttccgggacatagtccggagctggcgcacgggtcattggcgcggtggcatggcgatgacccgccactacgaccggcttgctcaccgggggctcggctttgaccggttcggcaggggccgcttcggtcactggcgcttgctccacggtttctgcggccggggcgatggtttccactggcgctgcaacgacaggcgtcgtttctaccgcttcaggttctaccaccaccggctcggcgtcgagcgtcactggcgcgatagcctgaggcgcttcgacagccggtgcttcggtgaccggctcctgaggcgctggctcgacggctgctggcgcgacaacttccgcagcatcaacgaccagcggctcggcggccgctaccggctcgacgactaccggctcagcggttactggttccatggtagccggctcgacggtgaccggcgcagcggtaacggtttcaacgacggcaaccggggccgctacggcctcgacagttttcgcgacgctggcgtcctgaacctgaacctcttccggctgctgatcctgcggacgaaccaccgggtagcggatccagactttaccggaagccatctccggcgatgcgcaggctacggtcagcggcataggcgactgggtcggatagcgttcgtcacgatagcgacgacgacgctgaccgctgacgcgcaggtgacgcggggagcgacgtgagcgacgcggcataccgttcgcttcacgggattcgccattttcgtcctggtccgccacgctctccacccctgccggcagctcggctttcaccggctcgctttgcggagcgataacttcagccactacggcttctggcacgatctcggcaactggctcgacgacagcggactcaacgcgcactttctgtgccagctggcgcggtttacgacgcggcagagtttgtacacgctcttcctgctccgtctcctgcacaactggctcttcgcgagtctgcgctttggcttcctgctgcgcctgacgtttgtcgtcattgcggcggcgggtgcgttcgcggcgcggctgctgctcgtcacgggatttcgctttctccgcgtcgtcgcctgaggtttggcgaacatcacgggcttccacgttctgcgacggcttctcgcgacggttgcgacggttctcttcacgcgatacgcgcggttcacggccctcggcattgtccgcacgggtgtcgcgattgtcacggttatcgcggttgtcacgattgtcgcggttatcacggcggtcgttgcggtcgcggcggttgttggcgcgcggtttacgacgctcctgctgacgctccggtttttcttccgctttcttctcgacctgaacttcagccggtttggcctcttcggcgccagagaagatattcttcagcgcgctgaagaagcgtgagagcaggccaggctgcgccggtgcggcggccgcgaccggtgccgctgcggcgacaggcgcggcggcaggctcttcgagcatcggggctggcggcgcatctggcatgacaaaagcggccagggccggctgttccggacgtttccgctccgccggctcatcgtcgcctggcagcgccatctcttcttcatgcagcttcggcagcagatagctcagcgttgaggtttcttcacctttgcgcacgcgcaggacggagtagtgcggcgtttgcatttcgtcgtttggcacgataataacgcgcacatcgccctgacgggattcgatagcgctcactgcggcacgtttttcgttcagcagataggaggcgatcggtaccggaacaatggcgtggacttctttggtattctctttcagcgcttcttcttcgatcagacgcagaatagagagcgacagcgattcgttatcacgcacggtgccggtgccggagcagcgcgggcagacgtggtggctggactcgcccagcgacgggctcaggcgctgacgggacatctccagcaggccgaagcgcgaaatatggctgatctgaatgcgcgcccggtcctgacggacggcttcgcgcagacgattctccacggcgcgctggtggcgaaccggggtcatatcgatgaagtcgataacgatcaggccgccgaggtcgcgcagacgcagctggcgggcaatttcgtcagccgcttcgaggttggtattgaaggctgtctcttcgatatcgccgccgcgggtggcgcgggcggagttgatatcgatcgcggtcagcgcttcggtgctatcgataacgatagacccgccggaaggcaggcgcacttcgcgctggaaggcggactcaatttgcgattcgatctgataatggctgaacagcgggatttcaccggtgtacagtttgattttgctgctgaaatccggacgacccagcgcggcgatatgctggcgcgccagctcaagcactttcgggttatcgatcaggatttcgccgatgtcctggcgcaggtagtcacggaaggcgcggacaatgacgttgctttcctggtggatcaggaacggcgccggacggctttccgcggctttctgaatcgcttcccagtgcttcaggcggaagctcaggtcccactgcagggcttcggcggatttgccgacgccagcggtgcgaacgatcaggcccatgccgtccggaagctccaggctcgccagcgcttctttcagttcggtacggtcgtcgccctcgatacggcgggaaattcccccggcgcgcgggttgttcggcatcagtaccagatagctgcccgccaggctgataaaggtggtgagcgcagcgcctttgttgccgcgttcttctttatcaatctgcacgataacttcctgaccttcccgcagtacgtctttgatattaggacgaccatgcgcattgtagttggcggggaagtattcgcgggcgatttctttgagggggaggaaaccatgacgctcggcgccgtaatcaacaaacgcggcttcaaggctgggttcaatgcgggtgattttgcctttgtagatgttcgcttttttctgttcgtgcccggggctttcgatatccaggtcgtacaggcgctgcccatcaacaagggcgacgcgcaactcttcctgctgagttgcgttgattaacattcttttcatcgtaacttactcattattcttacattgacgactaagctgcgggcagagtaatgcctttccgggggaaaaccgatggcctcgtgtctggttcacgtcgccaacctcacggttgtcgcgcgcttaagaggcgcagagtgtcggtcgcctgtgtttcaaacggaaacacagcgcaattattcaggggaacagcctgggatgtatcaccagagaatattccatttatactcgtcgtctttcgcgttgcaggcatggtggcttaacctgctcacctcgatctggcgatccagatgagctcccgggagtcccggagttgacgccttcctgcgacttgaaatccatagagcctgtaccggtaaggactgcaacccgcagcccgctaactgtctgaaagatcacaacgtcttacgccattgctgcgtgggcgatcggtcagacaaaattggtcattccgctaatgtcttgttctaacaagatgcaatacggaaaacggtctcattattccattgctaaccttgttatagcaagttgactttcaccttttatcacccggttactcacagttttatcacctgcccatacagattgttctaataacaaacaaaatggcggtcaggtaaaccgtgaaaacaggataatgataaatataagcatataaaaatgagtggcgctaatgcgtccggctatttagaatcgcgcaccatgaaaactgagaccccaaccgtaaaaatggttgccattgctgctgatgaagcggggcaacgtatcgacaactttttgcgtacgcaattgaaaggcgtaccgaagagcatgatttatcgcatcctgcgtaaaggcgaggtgcgggtaaacaaaaagcgcgtgaagccggagtataagctggaagcgggcgatgaagtccgtatcccgccggtacgcgtggcggagcgtgaagaagaggcggtatcgccgcacctgcagaaagtggccgcgctctctgaggtgatcctctatgaagacgatcatattctggtgctcaataagccttctggtactgcggtacacggcggcagcggcctgagcttcggcgtgattgaagggctccgcgccctgcgcccggaggcgcgcttccttgagctggtgcatcgtctcgaccgggatacctccggcgtgctgctggtggcgaaaaagcgctcagcgctgcgttcgctgcacgagcaactgcgcgataaaggcatgcagaaagattatctggcgctggtgcgcggccagtggcagtcgcataccaaagtggtccaggccccgctgttgaagaatattctgcagagcggggagcgcatcgttcgcgtgagtcaggaaggcaagccgtcggagacgcgctttaaagtggaagagcgttacgaattcgccacgctggtgcgctgcagcccggtcaccggccgcacgcatcagatccgcgttcatacccagtatgccggccatcctatcgcttttgacgaccgctatggcgaccgagagttcgacaagcagctgtccgctaccggcttaaaccgcctgttcctgcacgcggcggcgctgaagtttacccacccggggagcggggaggtgatgcgcgttgaggcgccgctggacaaccagctgaagcactgtttacaggtgctacggaagagcaaataagcgcaacggcggaatcagttccgccgtttttttgcctcagcctaacagcgggttgtagttttcacggcgcaacatctgacagagcgcgattaagggtaaaccgaccagggtgttcgggtcgcggccttccagccgttcgaacagcgtaatgcccaatccttcgctcttgaaactccctgcgcactgcagcgggttctctttgcgcacatagccttctatctctttatcactgagatggcgaaagtgaacgtcaaagggttcgcattcggtttgcagatggccgctggcagagttgtacagcgccagtccggtataaaaggtaatgattgacccgctggcctttcttaactgcctgcgggcattttcctcggtgtgcggtttgccggtgatttcaccgtccagtacgcaaacctgatcggagcctataataaggtgattagggaagcgtgtggccagactttgcgctttggcctgcgccagtcgggtgacaagctgacgtgcggattcatcaggccggggcgtttcgtctacgtcaggcgcggcacattcaaacggtaaacccagtttttccagcagcatgcaccgccagggagaggttgacgcgaggataagatcagacatattttttcatccacatatagcgcttcgcagagcatcatcttaaactatgcgccgcaatgtgtgcgaataaatggcaaaaggcaacctgaggctgcctttttctttgactctatgacattacaaagttaatatgcgcgccctatgcaaaaggtaaaattacccctgacttttgatccggtacgcacggctcaaaaacgccttgattacgaaggcatctatgcccgcgatcaggttgaacgtgtaaccgattctgtagtcagcgtggacagcgatgtggaatgcagcatgtcgttcgctatcgataaccagcgtctcgccgttattactggcgatgcaaaggtaacggtaactctcgaatgccagcgttgcgggaaaccgttctcccatcacgtccacaccacgtattgttttagccccgtcagaaatgacgaacaggccgaagcactaccggaagcgtatgagccgattgaggttaacgaattcggtgaaatcgacctgcaggcaatggtcgaggatgaaattatcctctccctgcccgtagttccggtgcatgattctgaacactgtgaagtgtccgacgcggacatggtctttggcgaactgcctgaagaggcacaaaaaccaaacccatttgccgtattagccagcttaaagcgtaagtaattgaggagtaaggtccatggccgtacaacagaataaaccaacccgttccaaacgtggcatgcgtcgttcccatgacgcgctgaccgcagtcaccagcctgtctgtagacaaaacttctggtgagaaacacctgcgtcaccacatcactgccgacggtttctaccgcggtcgcaaggttatcgctaagtaatcacgcgatactcgcaggatttcccgttgcaggccatggcgggcgtgtgcgtccctggaaactcggttaacccggtcgctgggggcatttatgcccggattgttgcgtctgcagcgtgaatattcgcgggtgccagcgtgatgaagcttagtgaggactccccgggcaactggggaatcaccgaaccgggcagcgacgataccttgacacgtctaaccctggcgttagatgtcatggggggcgatttcggcccatccgtgacggtgcctgcagcactgcaggcactgaactctaattcgcaactcacacttcttttagtcggcgatcccgacgccatcacgccattactcgccaaagctgacttcgaacaacgttcgcgtctgcagattattcctgcgcagtcagttattgccagtgatgcgcgacccgcgcaggctatccgcagcagtcgcggaagctcaatgcgcgtggcgctggagcttgtgaaagaagggcgggcgcaagcctgcgtcagcgctggcaacaccggcgcgctgatgggtctggcgaaactgctgctcaaaccgatcgaaggtattgagcggccggcgctggtgacggttttaccgcaccagcagaagggcaaaaccgtggtgctggatctcggcgccaacgtcgattgcgacagcacgatgctggtgcagttcgcggtaatgggcgcggtgctggcggaagaagtggtcggcattgccaacccccgcgtcgctttgttgaacatcggtgaagaagagatgaaaggcctcggcagcatccgcgatgctgccgcagtgctcaaaacgctgccttccctcaactacatcggctatcttgaagccaatgaactgttgaccggaaaaaccgatgtgctggtttgtgatggattcacgggcaacgtcacattaaaaaccatggaaggtgttgtcagaatgttcctttcactgctgaaatctcagggagagggcaaaaaacggtcgtggtggctgctgttactaaaacgttggttacaaaaaagcctggcgaggcgattcagtcacctcaaccccgaccagtataatggcgcctgtctgttaggattgcgcggttccgtgatcaagagtcatggtgctgccaatcaacgcgcctttagcgtcgcgatagagcaggcagtgcaggcggtgcagcggcagatccctcagcggatcgccgcgcgcctggaatctttatacccagctggtttcgagctgccggaaagcgacagtgacgtgaacgcccgacagcaaagcgggacgaatggccacgattgacgccgcggcggttgaacgaggcgggtatatcacccaagagtgactgagcgtacatgtatacgaagattattggtaccggcagctatctgcccgagcaagtgcgtacaaacgccgacctggaaaaaatggtagaaacctctgacgagtggattgtcacccgcacaggtatccgtgagcgtcgtattgccgcagcgcatgaaacagttgctacgatgggctttgaagccgcaaagcaggcgctggcgatggcgggcgtgtccgcggagcaaattggtctgattatcgttgcgaccacctccggcacgcacgcgtttccgagttctgcatgccagatccagtcaatgctgggcgttaagggttgcccggcgtttgatgtcgccgccgcctgcgccggtttcacctatgcgctaagcgtcgccgatcagtatgtgaagaacggcgcggtagattatgcgctggttgttggcgccgatgtgctggcgcgcacctgcgatccggcggatcgcggaacgattattattttcggcgacggcgccggcgcggttgtactgggcgcctccgaagagccgggcattatctcgacgcatctgcatgccgacggcagctatggcgaactgctgaccctgccgaacgccgatcgcgtcgatccggaaaacccgatctatctgacgatggccggcaacgaagtcttcaaagtggcggtcaccgagctggcgcacatcgttgatgagacgctggcagcgaataatcttgaacgttcagcgctggactggctggtgccgcatcaggctaacctgcgtattatcagcgcgacggcgaagaaactgggtatgtcgatggataacgtcgttgtgaccctcgaccgccatggcaacacctccgcggcgtcagtcccttgcgcgctggatgaggccgtccgcgatggccgtattcagcgcggtcagctgattttgctggaagcctttggtggcggtttcacctggggttccgcgctggttcgtttttagtataaggatttaaacatgacgcaattcgcatttgtgttcccggggcagggctctcaggccgtaggcatgctggccgaaatggctgccgcctggccggtcattgaagagaccttcggtgaagcttccgcagcgttgggttacgatctgtgggcgctgacgcaacagggcccggcagaagaactgaataagacctggcagactcaaccggcgctgctcgccgcctccgtggcgctgtaccgcgtctggcaacagcagggcggcaaagcgccagcgctgctggcgggtcacagcctcggcgaatactccgcgctggtatgcgcgggcggtatcggtttcgctgatgccgttcgcctggttgagctgcgtggtaaattcatgcaggaagccgtaccggaaggtaccggcgccatgtccgcgattatcggtctggacgacgccgctatcgccaaagcctgtgaagagtctgccgaagggcaggtggtctctccggtgaactacaattctccgggccaggtggttatcgccgggcacaaagaggccgttgaacgcgctggcgccgcctgtaaagccgccggcgccaaacgcgcgctgccgctgccggtgagcgtgccgtcccactgcgcgctgatgaagccagccgcagaaaaactggcggtagagctgcagaagatcaccttcaacgcgccgacgattccggtggtgaataacgtcgacgtgaagtgcgaaaccgcgccggacgccattcgcgacgcgctggtgcgccagctgtacagcccggtgcagtggaccaaaaccgttgagtttatggctgccgagggcgtatcgcatctgtatgaggttggcccgggtaaagtcctcaccggcctgaccaaacgtattgttgacaccctgaccgcttccgcgcttaacgagccggcggcgatgtctgcggcgcttgagcaataaaagaggaaaaccatgagttttgaaggaaaaatcgcgctggttaccggtgcaagccgcggtattggccgtgctatcgctgaaacgctcgtcgcccgtggcgcgaaagttatcggtactgcgaccagcgaaagcggcgcgcaggcgatcagcgactatttaggcgccaatggtaaaggtctgatgttgaatgtgaccgacccggcatctattgaatctgttctggaaaatgtgcgcgcagagtttggcgaagtggatatcctggtgaataatgccgggatcactcgcgacaatctgttaatgcgcatgaaagatgacgagtggaacgatattatcgaaaccaacctgtcatcggttttccgtctgtcaaaagcggtaatgcgcgctatgatgaaaaagcgtcatggacgtattatcactatcggttctgtggttggtaccatgggaaatgcgggtcaggccaactacgccgcggcgaaagcgggtctgatcggcttcagtaaatcactggcgcgtgaagttgcgtcccgcggtattactgtaaacgttgttgctccgggctttattgaaacggacatgacgcgtgcgctgaccgatgagcagcgtgcgggtacgctggcggcagttcctgcggggcgccttggcaccccaaatgaaatcgccagcgcggttgcatttttagcctctgacgaagcaagttacatcactggtgaaacgctgcacgtcaacggcggaatgtacatggtctgaccgagatttgtgcaaaacgttcaggaaccgcgcacttcgcacggttctctgtgcggttttgtgcgaaaagatttgcgttcttagggcaaacggcctcaaaatagcgcaaaatcgtggtaagacctgccgggatttagttgcaaatttttcaacattttatacactacgaaaaccatcgcgaaagcgagttttgataggaaatttaagagtatgagcactatcgaagaacgcgttaagaaaattatcggcgagcagctgggcgttaagcaggaagaagttaccaacaatgcttccttcgttgaagacctgggcgctgattctcttgacaccgttgagctggtaatggctctggaagaagagtttgatactgagattccggacgaagaagctgagaaaatcaccaccgttcaggctgccattgattacatcaacggccaccaggcgtaagtgaacatctccaggcggtcattcgaccgcctgagttttatctttttattgtcccacaagaatctattttccctccctggaggacaaacgtgtctaagcgtcgtgtagttgtgaccggactgggcatgttgtctcctgtcggcaataccgtagagtctacctggaaagctctccttgccggtcagagtggcatcagcctgatcgaccatttcgatactagcgcctatgcaacgaaatttgctggcttagtaaaggattttaactgtgatgacattatctcgcgcaaagaacagcgcaagatggatgccttcattcaatatggaattgtcgctggcgttcaggccatgcaggattctggccttgaagtgacggaagagaatgcaacccgtattggcgccgctatcggctccggtattggcggtctcggcttgatcgaagaaaaccacagttcgctggttaacggcggaccgcgcaagatcagcccattcttcgttccttccacaattgttaacatggtggccggacatctgaccatcatgtttggtctgcgtgggccaagcatctctatcgcgaccgcgtgtacttcaggcgtgcacaacatcggccaggccgcgcgcatcatcgcctatggcgatgccgatgcgatggtggcgggcggcgcggaaaaagccagcaccccgcttggcgtgggcggcttcggcgcggcgcgtgcgctctccacgcgcaatgacaacccgcaggcggcgagccgtccgtgggataaagatcgtgacggcttcgtgctgggagacggcgcgggtatggtggtgctggaagagtacgagcatgccaaaaaacgcggcgccaaaatctacgccgagatcgttggcttcggcatgagcagcgatgcttaccacatgacgtcaccgccggaagatggcgcgggcgccgcgctggcaatggtgaatgctattcgcgatgcgggcatcgaaccgggccagatcggctacgtcaacgcccacggcacctcgacgccggctggcgataaagcggaagcgcaggcggttaagtctgtcttcggtgatgcggcgagccgcgtactggtgagctctaccaaatccatgaccgggcatctgctgggtgcggcaggggcggtagagtcgatttactctatcctggcgctgcgcgatcaggcggttccgccgacgatcaacctcgacaacccggatgaaggctgcgacctcgacttcgttccacacgaagcgcgtcaggtttccggtatggagtacaccctgtgcaactccttcggctttggcggcactaacggttcgctgatcttcaaaaaagtgtgacagggcttgccccggtactgctttaacaaaaggcccgttcgtcgggccttttttattcagctttctccccttgttctctgctctgggtcctgacacactgaccgaccagtgaaaaggagtcctttatgttcttgataaacggcgttgtacaggacacgttggcagcgaacgatcgcgccatccagtttggcgacggctgttttaccaccgcccgcatccagcaagggcaggttgcgctactggacgcccatctgcagcgtttacagacaacctgtgaaaaattacatatcccatttaacgactggctgacgctgagcgaagagatgcagcgtctggctcggccgcacgcgcagggcgtgctcaaggtgactctcacccgcggcgttgggggaaggggatacagtacggcaggctgcgtgtcgcccactcgcattctcagcttctctccattcccggcgcattatgcgcgctggcgggaggagggcattactctgacccagagtccggtgcccctggggcgcaactcctggcttgccggcctgaagcaccttaatcgccttgagcaggtactgatccgctctcatcttgagcagacggacgccgatgaggcgctggtccttgacagtgacgggtggcttacggaatgctgtgccgcgaatttattctggcgtcagggacgtgatgtatttactccgcgactcgattatgccggggtcaacggcattatgcggcagcgctgtatcgcgcagctggcaccatcgacgtttcgcgttgtcgaagtgacagcgcgtcccgagacgttgcgggaggccgatgaagtgctgatctgcaatgcgctgatgccgctggtgccggttcgccgctgggaggagaccacctggtcctcgcgtgagctttaccattttttagcccctttgtgtgagctgtctggttagtatgaagaaaatgttacgttttatcctgttgctggtcgtgctgttgggcatcgccgcggcggcaggcatgtggaaggtacgccagctggcggacagcaagctgctgattaaggaagagaccatctttaccctcgaagccggcaccggccggctggcgctgggccaggatctctatcgcgagaaggtgatcaatcgcccgcgcgttttccagtggctgctgcgggtggaacctgagctgtctcacttcaaggccgggacctatcgcttcacgccgcaaatgacggtgcgcgagatgttgcagctgctggccagcggcaaagaggcgcagtttccgctgcgctttgtcgaaggcatgcgcgtcagcgactacctgcgccagctgcgcgatgccccgtacgtgaagcacacgcttgaagacgatagctacgcgacggtggctaaggcattaggtcttgagcatgccgactgggtagagggctggttctggccggatacctggatgtacaccgccaacaccagcgatatcgccatcctcaagcgcgcgcatcagaaaatggtcgccgaagtggcgaaggtctgggaaggacggatggagaatctgccctatgccgatcagaaccagctgttgaccatggcctcgattattgaaaaagagaccgcggtagcggaagagcgcgaccgcgtcgcgtcggtatttatcaaccgcctgcgcatcggtatgcgcttgcagaccgatccgaccgtaatctacgggatgggcgaaggatatactggtaagttaacgcgtaaggatctcgagacgccgaccgcatacaatacttataccatcagcggtttgccgccgggccctatcgcggtgccgggcgaggcctcgctgaaggcggccgcccatccggcgaaaacgccatatctttatttcgtcgccgacgggaaagggggccatacgtttaccacaaacctggtcagtcataaccgtgcggtgcaggattatctgaaagtacttaaggaaaaaaatgcgcagtaactatatcgtcatcgaggggctggagggcgccgggaagaccaccgcacgtcaactgggggtggagacgctgcagtcggcgggtattcacgatatggtgtttacccgcgagccggggggcacaatccttgccgaaaaactgcgtagcctggtgctggatatccagtccacgggcgatgaagtgattaacgataaagcggaagtgctgatgttttacgcggcgcgcgtccagttggtggagaccgtgattaagcccgcgctggcccgcggccagtgggtgatcggcgatcgtcacgatctgtcgacgcaggcctatcagggcggcggccggggaattgaccgcacgatgctggcgacgctgcgcgacgcggtactcggtgattttcgccccaatctgacgctgtatctcgacgtcacgccggaagtggggctgcagcgcgcccgggcccgcggcgagctggatcgcattgagcaggagtccatgaactttttcaaccgtacccgcgcgcgctatcttgagctggccgccgccgatccttctatccgcacggttgacgcaactcagccgctggatgccgtggcgcgcgacattcgcgccacgatcgcccagtggatggcggagcaagcggcatgaaatggtatccgtggctgcgcccctcgttcgagcaactggtcggtagctatcaggccggacgaggccaccacgccttactgttacagtccctgaacgggatgggcggcgaggcgttgatttacgcgctgtgccgcttcctgatgtgccgccagcccgaaggacataaaagctgcggccactgccatagctgtcagctgatgcaggccggcacgcaccccgattactatgcgctcagccccgagaagggcaagagcgcgctgggtattgacgcggtgcgcgatgtcaatgaaaagctctatgaacatgcgcgccttggtggggcaaaagtggtctggattagcgatgctgccttgctgaccgatgccgccgccaacgcgttgctgaaaacgctggaggagcccccggagaatacctggttcttcctcgcctgcgaggagccggcgcgtctgctgaccactctgcgcagccgctgtcgcctgcatcatctggcgccgccgtctgagccttatgctctggcctggctggagcgtgaggtgagcctgccgcaggagtcattgttgaccgcgttacgcctgtgcgccagcgcgccggctgcggcgctcgaactgttacaggaaccgctgtggacggcgcggcagcagttgtgtcaggcgctggcggctaccctggcgagcggtgactggctgacgctgctgccgatactcaatcatgaacaggcggcggttcgcctgcactggctggcgtcgctactggtcgatgcgcaaaaacgacagcaggggattaccctggtgagtaaccctgacgtctggccgctgctggagcagctggcgcacagcctgcccgccgcccggctgcaggcgattgcccatgacgtctgtacctgccgcgagcaattgctcaacgttgtcggtgtcaaccgcgaactgctgcttaccgagcgcctgctgcgctgggaacattacctgcaacccgggacgggtttacccgtctcccacctctgagtgagacattatgtttttagtcgactcccactgccatcttgatggtctggattatcaaactctacacaaaaacgtcgacgacgtgctggcaaaagcggccgcacgcgatgtgaaattttgcctcgccgtcgccacgacgttgcctggctaccgcagtatgcgcgaactggtggggacgcgtgacaacgtcgtcttctcctgtggcgtacacccattaaaccaggacgagccctgggaggtagagaccctgcgcgcgctggcagcggaagagggcgtcgtggcgatgggggagaccggtctggattatttttataccccggaaactaaagcccaacagcaaagctcgttccgcgaccacattcgtatcggccgtgagctcaataagccggtgattgtccatacccgtgacgcacgtgccgatactctggctattttgcgcgaagaaaaggtgacggattgcggtggcgtactacactgtttcactgaggacagggagacagcgggcaagctgctcgatatggggttctatatctcgttttccggtatcgtcacttttcgtaacgccgagcagctgcgtgatgcggcgcgctacgtgccgctggatcgtctgctggttgaaaccgactcgccgtacctggcgccggtcccccaccgcggcaaagagaaccagccggcgctggtccgtgacgttgccgagtatatggcggtactgaagggggtgtcgcttgagcagctggctcagcagaccaccgacaattttgccaccctgttccacatcgaccccgcccgtttgcaacctgcttgatctgcttattattttaaggctcgtaattaatagccaaagcgagtaaagttcaccgccacaaaagtggcggtgaaggttttttagcaacatctggatacaatttatgtaagttgatgtaaatttttaccggaaggctgattgaaacgtgatagccgtcaaacaatcatcccgttaattattttactctgtgtaataaataaagggcgcttagatgtcctgtccacggcacggttctccccccgggccaatgcgtgaaagcgtaaaaaagtaccaaatactcaggagcactctcaattatgtttaagaatgcatttgctaacctgcagaaggtcggtaaatcgctgatgctgccggtatccgtactgcctatcgcaggtatcctgctgggcgtcggttccgctaacttcagctggctgccagccgtggtctcccacgttatggcagaagcaggcggttcagttttcgccaatatgccgctgatcttcgctatcggtgtggccctcggcttcaccaataacgacggtgtatccgcactggctgcagtcgtggcttacggcatcatggtgaaaaccatggcggttgttgcgccgctggtgctgcatttacctgctgacgagattgcggcaaaacaccttgctgataccggcgtgcttggcggtattatctccggtgctatcgccgcctacatgttcaaccgcttctatcgcatcaagctgccagaatatctcggcttctttgcgggcaagcgttttgtgccgattatctctggtctggccgctatcttcaccggcgtgatcctctccttcatttggccgccgatcggctccgcgatccaaaccttctcccagtgggctgcttatcagaacccagtggtggcgtttggtatctacggtttcatcgaacgttgcctggtgccgtttggtctgcatcacatctggaacgttcctttccagatgcagatcggcgaatacaccaacgcggctggtcaggtgttccacggcgatatcccgcgctacatggcaggcgacccgacggcgggcaaactgtctggcggcttcctgttcaaaatgtatggtctgccggcagcggctatcgcgatttggcactctgctaaaccggaaaaccgcgccaaagtgggcggtataatgatctccgccgcgctgacctcgttcctgaccggtatcaccgagccgatcgagttctcgttcatgttcgtggcgccgatcctgtacgttatccatgccattctggcgggcctggcgttcccgatctgtatcctgctgggtatgcgtgacggtacctcgttctctcacggcctgatcgactttatcgtgctgtccggtaacagcagcaaactgtggctgttcccgattgttggtatctgctatgcgatcgtgtactacgtcattttccgtgtgctgattaaagccctggatctgaaaacaccgggtcgtgaagacaccaccgaagagagcaaagctggcgccaccagcgagatggctccggctctggtcgccgctttcggcggtaaagagaacatcaccaacctcgacgcatgtattactcgtctgcgtgttagcgtggcggatgtagcgaaagttgaccaggctggcctgaaaaaactgggcgccgctggcgtggtagtggcaggttctggcgtacaggccatcttcggtaccaagtccgataacctgaaaactgaaatggatgagtacatccgtaacagttaagacgtagtatcggggagactaaggcagccaactggctgccttttttatgcgctaaagtcggtgccccacaagcgataaccctgaaaacagtccgccatatgcttattccctcagcagctaagtctatagttgaataagaaaaagagctttcaggttgaaagagagggagaatgtcgctcatactcttagcggaacctgtgcgtccgcgtttatctgcagaagcaggccagcgcacgggataaaacttataaggaatcagtcatggcagaagaaacgattttcagcaaaatcattcgccgggagatcccgtcggatattgtctatcaggatgagcttgtgaccgcttttcgcgacatctccccgcaggcgcccacccatattctgattgtcccgaatgttctgattcctaccgtaaatgacgtcaccgctgaacatgagctggcgctgggccggatgatgaccgtcgcggcgaagatcgccagcgatgaaggtcttgccgacgatggctatcggttgatcgtcaactgcaaccgccacggcggccaggaagtgtaccatatccatatgcatctgctgggcggtcgtccgcttggcccgatgctggcgcacaaaggctaacgtcatgctcaggacccttttgggcgcgtgtctggcggcggggctactcgccgggtgtagttcacacccggaaatcccggtttctgaccagcaggcgctggtgatggagtcgagcgtgctggcggcggggatcagcgccagcgagcctgccgtcgtggcgacagagattcaggctaccgcctcctcaacgctatataacgagcgccagcagccggttaccgtgcactatcgttttttctggtatgacgcccgagggctggagatgcatccgctggacgcgccgcgcaccatcgtggtaccggcccgctcctcggtcacgttatatggcagcgccaatatcctgggggcgcataaggcccgcctttatctttatctgtaaggggtaattataatgatgaaaatgtgtcgctatgcgttaatcacagcactggcgatattcctcgcaggctgtgcggggttgcgggagcagcccgcgccggtagaagaggccaaaccgcagccgcagcagcctgcgcagccgcagcccacggtgccgaccgtaccggcggtgccctctgtcccggcgcagcctgggccgattgagcatcaggatcagcagtcgggtcagccggcgccgcgcgtgcgtcattatgactggaacggcgcggttcagccgctggtggggcagatgctgcaggcgagtggggtcaatgccggcagtattctgctggtcgacagcgtgaacaaccgcaccaacggttcgctgaatgctggagaagccaccactgcgctacgtagtgcgctggccggtaacggcaaatttaccctggtatcggcgcagcagctggcggtcgccaagcagcagctgggcctgtcgccgcaggacagcctcggcagccgcagcaaagccatgggcattgcccgcaacgtgggcgcgcagtatgtgctttactccaatgccaccggcaacgtcaacgcgcctgagctgaaaatgcagctcatgctggtgcaaaccggtgagattatctggtcaggtaaaggtgctgttcagcaacaataagctaacgcgcgacgagctcttgtcgcgcttctttccccattatcatcctgtcgcctcgctgagccagagtggcctcagcggcggcagtgtgattattagcgacggcgaccggcggcacgtgctgcgtcagccgcacgatccgtctgccgccacttaccattttcgccgtcagtatcacgcactccgccgactgcctgccaggctggcgccaaccccgctgttttactcaccctgctggatggtggtggagtattgcgcaggggaggtgaaaagcgagttaccggcctccccgcagctgtcaggcttattgtatgatttgcatcagcaaccgcggtttggctggcgggttagcctcacaccactgctggcccagtactggcagaggtgcgatccggcgcggcgcaagccgcgttggctgcgctggcatcagcggctgcgccgccagggcgagccccgtcccctgcggctggcgccgctgcacatggacgtccatgccggcaatattattcataatgagtccggcctgaggctgatcgactgggaatatgccggcgatggcgatatcgcgctggagctggccgcggtgtggatcacgcctggcgcgcgccgtcggctggtagaagcgtatgcccggcgggcggccatcgacgcgcagctgctttggcggcaggttgcactctggcgcccgtgggtactgctgctgatggcgggctggtatgaaatgcgctggcggcagagcggggaccggcaatttatcacgctggcagatgaaacatggtgtcagttagacaacgaacgtaaaggataagagaggtcagtgtgggcccagtgatgttggatgtcgaagggtatgagctggatgcagaagagcgagaaattctggcgcatccgctggtgggagggttgatcctctttacccgaaattatcacgatccggcgcagctgcgcgagctggtgcgccagatccgcgacgcctcccggaaccacctggtggtggcggtcgatcaggaaggggggcgggttcagcgtttccgcgaagggtttacccgtttaccggcggcccagtctttcgccgcgctgctggggatggaagaggggggcaaactggccgccgaagccggctggctgatggccagcgaaatgatcgccatggatatcgatattagttttgcgccagtgctggacgtcggccatatcagcgccgcaatcggcgaacgttcttatcatgaagatccgcagaaagcgctgacgatggcgcgtcacttcattgacgggatgcacgccgcgggcatgaaaaccaccggcaaacacttcccgggacacggggcggtgactgccgattcgcacaaagagacgccgttcgatccgcgggcggcatcggttatccgcgaccatgatatggcggtgttcaaaagccttatcgccgagcagcgtctggacgccattatgccggcgcatgtgatttacccggagctcgatccgcgtccggccagcggctcggcgtactggctgaaaacggtgctgcgcggcgaactgggctttgacggggtgattttctccgacgatctgtcgatggaaggggcggcgatcatgggcagctatgccgaacgcggtcaggcatcgctcgacgccggttgcgatatgatcctcgtctgcaataatcgtaaaggcgcggtcagtgtgctggataacctgtcgccgatcaaagcagagcgtgttacgaaattgtatcataaaggttccttttcccgtcaggagttaagggattcagcccgttggaaaacggtgagtgcccagctggagcagcttcatgcgcgctggcaagaggcgaagtccgcgtaacgctctacggggcgttgttgtctggtgaggatgcgatgattatctatttacacggttttgactcgaacagccccggtaaccatgagaaggtgatgcagctgcagtttatcgacccggacgtgcggttgattagctacagcacgcggcatcccaagcacgatatgcagcatttgctgaaagaggtcgataaaatgctgcagctcactgccgatgaccggccgctgatctgcggcgtcggccttggcggctactgggcggagcggattggttttctgtgcgatatccgccaggcggtgttcaatccaaacctgtttccgcatgagaacatggaaggcaaaatcgaccgaccggaagagtatgctgacatcgccaccaagtgcgtgaccaacttccgcgagaagaaccgcgatcgctgcctggtggtgctttcccgccaggacgaggcgttggacagccagcgttccgccgatctcctgcaccactattatgaaattatctgggatgaagagcagacccataagtttaaaaatatctcgccgcatctgcagcggctgaaagcgtttaaaaccctcggctaactgcttttcccttgttcccaaacccgcgtcgggttcaccacgcgggttttttcatgtctacacttattggtttcgctgaaaaaatacgcgacaaaacttgatgcacatcaattttggtatgaccaatgcaccgttcatggtattctcgacagtgctgaatggtttcattaacgtaacttgttgttaaataaaggctatttcaataacttttatttaacaattggttaataattttaggggtacacatgactacgccattgaaaaaaatcgtaattgtgggtggcggcgctggcggactggaactggcaactcagctggggagaaagttagggcgccataagaaagcgaaaatcaccctggtggaccgtaaccacagccatctgtggaagccgctgctgcacgaagtggccaccggttctctggatgaaggcgttgatgcgctgagctatctggcccatgcccgcaaccacggtttccagttccagctgggctcggtggttgatatcaaccgcgaagggaaaaccatcaccctcggcgagctgcgcaatgaaaaaggcgagctgctggtggctgagcgtaaactgccgtacgacacgctggtcatggcgttgggcagtacctcgaatgactttaatacccctggtgtaaaagagaactgcattttcctcgacaacccgcaccaggcgcgtcgcttccatcaggaaatgctcaacctgttccttaaatactctgctaacctcggcgctaacggtaaagtaaatatcgccatcgtcggcggcggcgccaccggcgtggagctctccgctgagttgcacaatgcggtgaaacagctgcacagctacggctacaaagggctgaccaacgaagcgctgaacgtcacgctggtcgaggcgggcgagcgcattctgcctgcgctgccgccgcgcatttccggggcagcgcataatgagctgactaagctgggcgtacgggttctgacgcagaccatggtcaccagcgcggatgcgggcggcctgcacactaaagatggcgaatatattgaggcggatctaatggtctgggcggcggggatcaaagcgccagatttcatgaaagagatcggcggcctcgaaaccaaccgtatcaatcagttggtggtcgagccgacgctgcagactacccgcgatgcggatattttcgccatcggcgactgcgcctcctgcgcccgtccggaaggcggctttgtgcctccgcgggcccaggcggcgcaccagatggctacctgcgcgctgaacaacatcctggcgcagatgaaaggcaaaccgctgaaggcatacacctataaagaccatggctcgctggtgtcgctgtcaaattactccaccgtcggcagcctgatgggtaacctgatgcgcggttcgatgatggtggaagggcgcattgcgcgcttcgtgtacatctccctgtaccgtatgcaccagattgctctgcatggttacttcaagaccggcctgatgatgctggtcgggcgcatcaaccgcatcattcgcccgcgcctgaagctgcactaatcgctgtcgcgacccggaggcgcgctctgagggcgcctccgggcttttctgctgaaaccgcagagatcccgctcggaatcctctgaatccctttgatttgcagcgaattctcgcacttttcatccgctatctgatttgcgccctcccggctccggttgcaaaattgtatcaacagcaacaaaggaggaactcccgtgaataaatctatgttggcgggtatagggataggcgtggctgccgcgctgggcgttgcagctgtcgctggtctcaacgtgttggatcgcggcccgcagtatgcgcaagtggtctccagtacaccgattaaagaaaccgtgaaaacgccgcgtcaggaatgccgcaatgtcacggtgactcatcgtcgtccggtacaggatgaaaaccgcatcgccggttcggtgctgggcgcggtggcgggcggggtgattggccaccagtttggcggcggtcacggacgcagcgtggcgacggtcgtaggtgcgctgggcggcggctatgcaggcaaccagatccagggcgcgatgcaggacaacgatacctacaccaccacccagcagcgctgcaaaacggtgtatgacaaatccgataaaatgctcggctacgatgtgacctataagataggcgatcagcaggggaaaatccgcatggatcacgatcccggcagccagatcccgctggacaacaacggccagctggtcctgaacaacaaaatctaaaaacagatttgtgtagtgattagcccctcaatcgctcaggctgaggggctttttttatcagaaggttaaggcgtagttcagaccaaaggtgcggccacgacctttgtactcatacagcgatgaactgccgtaggttgggctgtagagcagcggcgcgcgctggccccagatagtgacatagtcttcgttaagcaggttttcgatactgaaggtcagtttccccaccggcagcgcgtaactaccgataaaatcgacggtgttatagccttccagcttgttaccggcggcatcgctgaggtcaaatacctgctgactctgcacgcgcaggctccacggatccggcgcccagcccacccaggcggtggctttagacggcgaggcgagggtgacgtcccatttttgccagcggccgtcggtctgcacctgggatttcagcacgttaaagttaccgccgacgctccagtcgctatccggaataaagtaatcgaccgccccctcaacgccgtaaatacgccgtttgtcggactgaacgtcgatggtcatgtcggtgcggttgacgacaatggtcttatccgaggtcgagtagtacgccgccagctgggtgcgcaggttatcgccggtgtagcgccagcccagctcatacgagttaactttgatcccctgcagcggcgagtcatcgacgttgacgctggagatcagcggcagatgaccattcaccgcagcgccatatttaccgatgccatagtatttaccagggtccggtagctcgacaccctgcgagaagttaaaccaggtttgttgacgctcggtcaggtgggccacgatcccggcgttaaacaggaaattgtcataatcggttttgccgcctttgatggcgtcggcggagcgcgctttgccgttggcgatatcctgctgctgggcgtagccgacaaagtcgtcgacccggttttcggtccactggtagcgtaccccgccgctgacggtaaagatatcgttcagatcgtagctggactgcaggaatggcgcgacattggaaatactgtatcccgggtagcggccggttgtgtagatcgattcgttgtgcaacccgccggaggccatcgattgtggcagatcgaagaacatctggttggcattaaaggtctcatgatcggcgtcgagaccccaggtgagatcccaccccgccagcggttgactgttgagggtcagcttggccccatactgatcggtatcctgctgcgacgaggagaagctactgacctgacctttcgtgagcgtcgggaacggatagaaggtgagggactcatcgcgatagtacacctggctcaccagattctggccgaaaaagtcggcatcggagtactggaggctgatcagatggcgttcggtgccggggatacggtcggaattgagcccgtcggtggtatacgctttgccgccgctggtgaccgcggacatgttcttcccgagccagagaccgtagtcatcatcgccctggcttttataatactgggtgaccagctgcagctggcggttatcatcgatctcaatcgtccccgtccccattacgtcgaggcggtcagagtgctggagccccgtttgggtattatcgaggatcagcgcatcgttattgccgtcgtaccagccgccgaaacgctgataggctaccgacaagcggccggatgcgtggtctgttccgccgctgacggccgccgcgacgcgctcatcatgatcgttgctgttcgcaaaaccgctcttgctgcccacctcaagatcgacctgacgatcctgctgcccctttttggtaacgatgttgataagcccgccggtactgcccccgccgtacagcgaggtcgctccggagatcacttcgatatgttcgatgttgaatggatcgatggcgtcgagctggcggctgtcggtgcgtgaggagttgagtcggacgccgtcaatcagcacgacgatcgcgcgcccgcgcatgttcatcccatagttggtccgcccctggctgctgacgtcgatgccggggatcagctgcgccagcacgtctttgaactctttcccgccctggacctgctgctcaatctcctggccctcaatgacccaggtggtttgggccatttcggccacggtgcgatgggtgcggtttgcgctaacgatgatgctgtcttcatcagactgagccgccagcgcaggcagcgtgctggccagcagcagagggtggagcacccagaggcgctttttcatatccattccttttatgagcaagttgctttgtcgttgttatgggccggcgtcggccggtattcgttacaatgcgaaacatctggaaaaactcaaaaaaggattttgcacataatgaatatcgcaatcaatatcatttgcgtttatcttgcgcgagaaaaggtaataaaaatcaatctattttgtggggataaagccaacaggagagcggatccggcggcagaataccgccggaagcagggcgcatcaggactcgaggacctgcggccagagacggagagtggtgtcggtgatttgcatcagcttgtcgaaatccgcgccttcccgggcgctaatcgacatcccctgcagaacgcagttaagaaattgcgccagctgcgcgacatcgcggcccgcgggcagttcgccctgcgcctgccgctgctgcagaaactgggttagcgcctgctcctgcatcgcatggcgggatttgatggtattggcgatatccgtcgaggaggcggccagcgcggcggaggtattgatgataaagcagccggccggcgtctctttgctggtaaagcaggtggcgaccgccgtgaagtagtcacgcaacgcgcgatcgacggattttccctcggcaaacagcacggcttcgtgcttcgcggcaaagcgggaaatgtaacgatccaacactgcgcggaataggccttctttattcacaaattccgcatacagggtgggggcttttgctcctgtcgcctcgaccagatcggcgagcgaggtcgcctcatagccgtgctgccagaagagtgtcatggctttgtccagcgccgcatccctgtcgaacaccttcggtcggccacggctttttttggcgcaactttgaacgtcagttgtcatggtgccgttgtacctatgttggtttggtgaaaggccattataaaaataaacgatcgccggggccagcgctgtcggtttaaaaataaataattcatatatgtatgaaatttaagcattttataaatagttaaacgatcgttataaaaatgcattgacgtgtgacatagatcacattattatttacctatcgatcgttaagttaatgcttgcgaccctactataaaattcatctgcacaggtataataatcatgaaaaccgttaatactctggctattgccgccgttttaagttccctttctttcgccagctttgccgctgtagaggtgcagtccacccctgcaggacagcataaagtaggcaccatctctgcttctgccgggactaacctgggctcgctggaagaccagctggcgcagaaagcggatgagatgggcgccacttcatatcgtattacttcggtaaccggtccgaatacccttcacggtaccgccgttatctacaagtaagcccgatgcgtcgctgcccggcccccttcaccggacagcgatgagtaagaccctgttgtacccctgtttgacccttgccaacaaaaaacccgccatcaggcgggttttttgttttgtgcagcgtaagactacaacgactgcggtcctgagtcagcttgacgggtgacgtcaatcggcatgcccgagcggtaattcatcgcgcgctccatcaccgtcccgtcggtctgcggcgcctgtttgaacgcagtcatggccgcattaagcgtaatgggcagggtctgcgggtcgtcatcgatatgctcagacagcggctgatggacctcaaccagacggcggccatccggctcgaccgacgccttgatcggcgtgttgataatgttcaccttcgtgcccggcgagatagtgttgtacagcgccttgatatcgttatcgcgcagacgaatgcagccggaactgacgcgcataccgatgccgaaatcggcattggtgccgtgcaggagatagactccgccataggcggcgaggcggatggcgtgatggcccatcggattgtcaggaccagcaggcactaccgccggcagctcaatccccatagccttgtagcgcgcgcgaatgttggcggtaggtgtccaggtcggattggcccgtttgtcggacacggttgtgaccatcgtcggtgtgatggtggtcccacccagctggccgatgccgattgggtagacggtcacttcattcttgcccggcgggtaatagtagaggcgcagttcggcgaggttaatcaccagcccttcgcgcggcgcatcgggcagcagcgtctgcagggggatggtcagcacgctgccggcgcgcggaacataggggtcaaccccgggattggcctgcagcagggccaggaagccgacattgtacttcttggcaatcgcttccagcgaaccgccgtcatcctgtaccacatgaaactgattctgacccaccagccggctgcccggcgggggaaggggccaggtgttagcgcgcgcggggagggccagcgcggcgactaacgcgactagcgtcagccaaagcgtcacggggaaacggtttctcattaccataactccaaaatatgtaagtggttatttttatacgaaaagcagatgagattatggcgtgagtctgtgtggggaaatccaggcggattgcaaaatgtttgtaaagattgccagatatgtgggaagggagatacggcagcggggccgtatctcctgccagtcaggcgacggcgttctcttccagctggcgcataaactggcgaacccagtccatccgcgttttacgctcctccaggtcctgcatgaacttcaggcgcgtgggaccgtccaggcggaagtgctggggctgcttttgcagcaggccgatcagccacaccggattgacgttgtttttctcgttaaattcgatcacgccgcctttttcgttgctttccagcttgcggatccctaacttttgcgcctgctgacgcagacgggcgatatccagcaggttgcgggcggcatcgggcaggcggccaaaacgatcgatcagctcgactttgatctcctccagatcctgttcgtttttggcgctggcaatacgcttatagaatgacaggcgcgtattgacgtcagggatgaaatcatcaggcagcagggaaggcatgcgcagttcaacctccgtctgctgactggtgagatcttccagcgagggttcacgcccggctttcagcgcatcgactgcgttctccagcagctccatatacagggagaaaccgatggtttccatctgaccgctctgatcttccccaagcagttccccggccccgcgaatctccagatcgtgggttgccagcgcaaagccggcgccgagatcttccagcgacgcaatggcctcgaggcgcttttgcgcatcggtggtcatcgctttcggatgcggcgtcagcagccaggcataggcctggtgatgcgaacggccaacgcggccgcgcagctggtgcagctgggcgaggccaaaatggtcggcgcgttcgatgatgatggtgttggcggtgggaatgtcgatcccggtttcgatgatggtggtgcacaccagcacattgaagcgttgatgatggaagtcattcatcacccgctccagttcgcgctccctcatctgaccgtgaccgatggcgatccgcgcctccggcaccagctccgccaacttgtcggcggctttctggatgttctcaacgtcattaaacagatagtagacctggccgccgcgcagcgtttcgcgcaggatcgcctcgcgcaccaccagggcgtcatattcgcgaacgaaggtcttcaccgccaggcgtcgcgccggcggcgtggcgatgatcgacagatcgcgcatcccgctcatcgccatgttcagcgtccgcgggatcggcgtggcggtgagggtcaggatatcgacatcggcgcgcatcgctttgatgcgctctttatgccgcacgccaaaccggtgctcttcgtcgacgatcagcagcccgagatcgcgcagcttcacctcgctctgcagcagcttgtgggtgccgatcaagatatcgattttgccttccgcggcctgctcgaggatctgcgcctgctctttagcgctgcggaagcgggagagcatttcgatgcgtaccggccagttggcgaaacgatcgcggaaattgtcatagtgctgctgagccagcagggtggtcggcaccagcaccgccacctgcttgtggttctccacggcgaggaaggcggcgcgcatggccacttcggtcttgccgaagcccacatcgccgcacaccaggcggtccatagccagcggctggcacatatcgctgaggacggcgttgatcgcctgcgcctgatccggcgtggtttcaaatgggaagccgtcgcagaatagctgatactgttcgcggtcgtgtttaaaggcaaaacccgccttcgccgcgcgctgggcatagatatccagcagctcggccgccacgtcgcgtactttctcagccgctttttgtcgcgcccgggtccaggcatcgccgcccagcttgtgcaggggggcgttttcttccgccccgccggcgtagcggctgataagatgcagggacgataccggaacgtatagcttggcatcgttggcgtaggtcagcatcagatattcgccggtgatgccgccggcttccagggtagtcatgcccgcgtagcggcccacgccgtgttccaggtgaacgaccggctggccgatatgcagttcggcgaggttgcgaatcagagtgtcagggttaatggtgcgtcgcgaatcctgacgacggcgcgccacccgctcgccgagcaggtcgctctcgcaaatcagtgccaggccgcgctggctgtcgataaacccgtgctcggcggcgccaatcatcagatagcggccgttgccggtggcttcctccagacgcagcacatgttttggcgcaactttaatccgcgccagcatttcgctcagcgcttcacggcggccttcgctttccaccgagaagatcaccggaccggtaaaggactcgaggaagcggcgcagattatccagcggcgctttgttctgcgcctggacggcgaggtccggcagcgtctggtagcccagattagtatttgccgctttgtccgccagacgttcggttttcagctgcacgcgcggccattttttcagttcgctgaatagctcatcgctgcgcagccacagcagctcaggcggcaggagcgggcgcatcgggtcgacgccgcggttttcaaagcgggcgcgggcttcattctggaatcgttccgcgctggcctcgagatcgccggtgttgacgatcagcgtgctggccgggaaatagctgaataacggcggcagcggctcgctgaagaacagcggttgccagtattcgataccggcaggtagcgtccctttactgacctgctgatagatgtgttcggcatcgcgcttcacctcaaagcggtcgcgccactggctgcggaacagctcaatagcggtctggtcggtggggaactcgtgcgccggcagcaggttaatggccgccacttcctccagcgtgcgctggctgtcaacgtcgaacaggcgcaggctgtcgatttcatcgtcaaagaaatcaaggcggtagggctgatcgctacccatcgggaacaggtcgagcagcgcgccgcgggtagcatattcgccgtgctccatcacctgatcgacatggcggtagccggccccctccaactgatcgcgcagcgcatcgcgcgacaggcgctggccctttttcatcaccagcgcgtggccgtgaaggaagctgtgcggacagacgcgctgcatcagggtgctgaccgggacgatcagtacgccgcgctgcatggtgggtaactggtaaagggtggcaagacgggaggagatgatgtcctgatgcggcgagaagctgtcgtaagggagcgtttcccagtccgccagccccatcaccatgctgtcggtaaactgcctgatctcgtcgttcagacgcagcgcgttttgcatgtcaggcgccaccagcaccaccgggccgctgtggcgttcggccatctccgccaccagggtggcgcaggctgcgccggtcaactcgccaagctggcgctgatcgccggctttgaccggcaatgagtatcgatattgttcaggcatagacggtttcatgatctcttagggattcgctctgccgatatggagggcaactcgctgatattcaatagtgagattatccgcgattggtctggattcgccaacccgaattgccatcgcgtattgggtgaagaaaggtcagcgctgtcgataagcgtaaagataaataagtaagtacttatctatccgtttgtatttacttggtttttaggattattgctaataaagtcgtcatgtatcagtcgtttacgctgcctctaatcgcttatatactcgggcatcggctatcagcaaccagatggatgacatgtaccaacctgccgcactctttatcggcctacgctatatgcgcgggcgcgcagccgaccgcttcggtcgtttcgtctcctggctctcaactatcggtattacgcttggcgtaatggcgctggtgacagtcctgtcggtgatgaacggctttgaacgcgagctgcaaaacaacatcctggggctgatgccacaggccattcttagcgccaaacagggttcggtgaaccctcagcaactgccggagcgcgaagcgaaacttaatggggtaacccgcgtagcgccgatcaccaccggcgacgtggtgctgcagagcgcgcgcagcgtggcggtcggggttatgctgggcattgatccggcgcagaacgatcccctgactccatacctggtgaacgtcaaacagagcgatctgcaggcgggcaaatataacgttattctcggcgagcagttggcgggccagctgggggttaatcgcggcgataaaattcgcgtgatggttccttccgcgagtcagtttacgccgatgggccgcgtgccgagccagcgtctgttcacggtcatcggcaccttcgccgccaacagcgaagtcgatggctatcagatgctgaccaacatcgacgacgcctcccgtctgatgcgctatccgctggggaatatcaccggctggcgcctgtggctggataaaccgctgcaggtcgacaccctgagtcaacagacgctgccgccgggaactcagtggcaggactggcgcgagcgcaagggcgaactgttccaggcggtgcgcatggagaaaaatatgatgggcctgctgctgagcctgatcgtcgccgtcgcggccttcaacattattacctcgctggggatgatggtgatggagaagcagggcgaagtggcgatcctccagacccaggggctgacgccgcggcagattatggccgtctttatggtgcagggggccagcgccgggatcgtcggcgcgctgctgggagcggtgcttggcgccctgttggccagccagctgaataatttaatgccgatcatcggcgccttccttgacggcgcggcgctgccggtggcgattgagccgctgcaggtcattgttatcgccctggtggcgatggtgctggccctgttgtctacgttgtacccttcctggcgcgctgccgccacccaacccgctgaggctttacgttatgaataagatcctgctgcaatgcgacaacctgtgcaaacgctatcaggaaggcaatgtgcaaaccgatgtcctgcacaatgtcagcttcagcattggtgaaggcgagatgatggctatcgtcggcacctccggctctggcaaaagtacgctgctgcatctgctcggcggcctggatacgcccacctctggcgacgtgattttctccggtcagccgatgagcaagctatccaccgccgcgcgcgccgacctgcgtaaccgcgagctgggctttatctatcagttccaccatctgctgccggactttagcgcactggaaaacgtggcgatgccgctgctgattggcaaaaagaagccggcggatattgaacgccaggcgaaagcgatgctgcaggcggtcgggcttgaacaccgcagccatcaccgtccgtcggagctctccggcggcgagcgccagcgggtggcgattgcccgcgcgctggtgaataaaccgcggctggtgctggcggacgagccaaccggtaacctcgacgctcgcaacgccgacagcatcttccagctgctgggcgaactgaacgtcgcgcagcgcaccgcgtttctggtggtgacccacgacctgcagctggcgaagcgcatgagccgccagctggagatgcgcgatggccgtctgaccgccgacctgaccctgatgggggccgagtaatggcgtctccgttatcgttactgattgcattgcgtttcagccgcggccggcggcgcggcggcatggtgtcgctgatctcggtgatctccaccatcggcattgcgctgggggtggcggtgctgatcgtcggcctcagcgcgatgaacggctttgagcgcgagctgaataaccgcgtgctggcggtggtaccgcacggcgaaatcgaacccgtgaatcagccgtggaataactggcaggaagcgctggcgaaggtgcagaaggtgaaggggattgtcgcggcagcgccctatattaacttcaccggcctggtggagagcggcagcaatatgcgcgccatccaggtgaaaggcgtcgacccgcagcaggagagccagctcagcgcgctgcctacctttgtgcagaataacgcgtgggccggattcaaggctggcgaacagcaagtgatcctgggcaaaggggtcgccgatgccctgcacgtgaagcagggggactgggtgtcgatcatgatccctaatgccgacgccgaccatcagctgctgcagccaaaacgcgtcaggctgcatgtaaccggaattttacagctgagtggccagctcgatcatagttttgccatgatcccgatgcaggatgcgcagcagtatctggagatgggcagcagcgtgaccggcatcgccatcaaggtcaccgacgttttccatgctaacaagctggtacgcgacgccggcgaggtgaccaacagctacgtctacatcaagagctggatcggcacctatggctatatgtatcgcgacatccagatgatccgcgccattatgtacctggcgatggtgctggtgatcggcgtggcctgctttaacatcgtctcgacgctggtgatggcggtcaaagacaaaagcggcgatattgcggtgctgcgcacgcttggcgcaaaagacggcttaattcgcgcgattttcgtgtggtatggtttattagccggatcggtaggcagcctgtttggggtggtgatcggcgtgatctgcgcgttgaacctgacgtcgatcatcaacggcatcgaatacctgattgggcataaattcctctccggcgacatctattttattgacttcctgccgtcagaattgcactggctggacgtcttttatgtgctggtgacagcactgttgctgagtttgctggccagctggtatcccgcccgccgcgccagccgcatcgacccggcgagggtgctgagtggccagtaatttatcgtcatcgtcggcctggctgacgacacaagaggaattgctgaaatgtattatggatttgacattggcggcagcaagatagcgctgggcgtatttaatcaggagcggcgactgcagtgggaaaaacgcgtcgctacgccgaaaagtagttatgaggattttctccaggcggtagaggcgctggtccgcgaggccgatgagcgcttcgaccagcagggttcggtcgggatcggtattccgggaatgccggaaacggcggacggcacgctgtatgccgctaacgtgccagccgccagcggccggccgctgcgcgctgacctcagcgcgcggttggggcgcgatgtgcgtctcgataatgacgccaactgtttcgcgctgtcggaagcgtgggacgatgagtttacgcaatacccgctggtgatgggattgatcctcggcaccggcgtgggcggcggcctggtgttgaacggtaaatcgattaccggacatagctatatcaccggcgagttcggtcatattcgcctgccggtggatgccctggaggtggttgggcgcgattttccgctgctgcgctgcggctgcggccagctgggctgtattgaaaattatctctccggtcgcggtttcgcctggctgtacgaacatttttatcagcaaccgctctcctcgccggagattgtggcgcagtggcagcagcacgatccgcgcgcgcaggcgcacgttgagcgctatctcgatctgctggcggtgtgtctggggaatatactgaccattgtcgacccggatttgctggtgctcggcggtggattatctaactttacggccattagcgaagggctggcgcaacgattgccgcgccatcttctgccggtcgccagggttccgcgcattgagcgcgcgcgccacggcgatgccgggggaatgcgcggtgcggccttccttcacctgacccattaatcacagaggtagctatgcagtcgcgccgtttacatcgattgagccgttttcgtcgcaataaacgtcggttgcgtgaccgtctgcgtcagcggattttctttagggaggacaggatgaagcctgaagcgatggcaaaaccgagagtggtggtgttaaccggcgcgggcatctcggcagagtcggggatcaaaaccttccgcgcggccgatggcctgtgggaagagcatcgggtggaagatgtggcgacgccggaaggcttcgcccgcgatccggcgctggtgcaggcgttctacaacgcccgtcgtcgtcagctgcagagtccggaaatcaagccgaacgcggcgcatctggcgctggcgcgtctggaggatctgctgggcgaccattttctgctggtcacccagaatattgataatctgcacgagcgcgccggcaaccgccgggtgatccatatgcacggcgagctgctaaaggtgcgctgttcgtggagcggccaggtgctggagtggaccggcgacgtcaccgccgaggacaagtgccactgctgccagttcccggcggcgctgcgtccgcacgtggtctggtttggcgaaatgccgctggggatggatgagatctacagcgcgctggccgacgcagatatttttatcgccatcggcacctccggccatgtctatccggcggctggctttgtgcacgaggcgcgactgcacggcgcccataccgttgaactgaacctggagcccagccaggtgggcagcgagtttgccgagaagcactacgggctggcaagcgaagtggtgcctgcctttatcgataagctgctgcaggaaaacgcgctgtaaactgaagccgcctgccggtagctagggcgcagcccacggccgccggcagcgctgctgacaaggatgtcacgtcatgacaggagtcagaccatgcataatccgctggttatcgaagcgatcatgttgatcgcggccattatcgttggcgtctggagccagcgcgctttaccgctacacgccgatagccgaccgatcctcttcctgctatgtctgttcctcggcactggcagcgcgttgtgcctgctgctggatatcttagctctgctgttgaccggtcaggtcgcgacgggcggtgtgcgaatatacggcccgttgctgctgctggtggtgctgtggaaacctctcaactgggttgtcggcatcattgaagattttgtgcagcggcgagccgaaaaagggaagggcaaaggccagcacgacggcggtcaacgctgatccgccgcctgcgccgcggcttatttatagcgccttttgcatattaatgaccgaacgggcgttcgaggcgctggtagccagcacatcgataaccccggtgcgtaatgcccccaggatcgccgtcgctttcgtactttcggaggcgatagcgatgacgcagggaatggcccgcagctgttcgagacttaagccaatgacccggtcattcatcaccgtatcgacgggtttgccctgaatattgaaaaagctgtaccccgccagatcgcccaccaccccctgttcctgacgcgcggtggcaatttcctgcggcgtaaaccagccgagctgcaccataaagctgttttcattcatatcgccgaggccgatgatcgccacgtcagctttgctggcctgttcgagcgtggccttaatcaggcggttttgcataaaggccgcgcgcagctccggggtttccacatatgccggggcataaagcgtttcactgaagccgttaaatttgcgcgccagattccggctgatgtggtcggcgtcaatcagctgattgtcacgcttggttccgccgatgccgcagataaagcggcagtggcgctcaggaaacacgccaacgtgattcgccaccgcggccacattgcgcccctgaccaacggtgacggtcatatcgttttttaacaccccggcaaggtagttactgaccagggccgccacctgctggcgctgttcatcttcatcatggtgatccagggcaattagcgcgcgcttaatgccaaagtgcgaaataaactgctgctcaatctgggagctgaagaccggatggtatttgacgctgatctcaacaatcccttcctggcgcgcttttttcagcaggcgcccgactttgatacgcgaaatgccgaatcgtttggcgatctcttcctgcgtttgttcctgatcgtaataagccaccgcaatttcagtgagcagggcgtaatctgagtcttgttcaatcatggcctggaatttccatctctggtgtcccttttatattactgcgcctgcaaaataaattcctgtgtaacgcgttgaacaatgtcgcaatagccttgcgcgtcccaggccgcgcggccgataaacaagccattgatctcctgctggcgcagcaattccaccgcgttttgcagcgttacgctgccgccatagagcagcgggatacgggttcccgtctcgtgaccaaaccgctcgcaaagcgcctgacgtagcgcctgatgaatgacgcccgcctcctgcggtgaggcgggcgtaccatgttcgccaatggcccacaccggttcatacgcaatcagggtccgcagcgcctgctggtggctcaggccatacagggcgatcttcatctgccgcaccacgctttcacgcgacacctgccagcgtttctcctcggcgctatcgccaatacagatcagcgggcgcaggccatgacctaaggcgctatgcacttttcgattaatcgcggcatcgctttcattaaaggcggcacgtcgttctgaatgtcccagctcaacaagcgtggcgccggtttctgccaacatggccgccgagatttccccggtccaggcgccctgatccgcttcatgcatattctgcgcgccggtcagaagcggtaactgatgcgtttgcagaaaatggctgacgggttggatcgcggtgaaggggggaatgacgaagggctgaatagcggggtgacagccctccggcatccgcgctgccagcgtttcgcaccaggccatggcctgggacagcggcttgttcattttccagctggttcctaaccatatcggggtcatcattgcttctcctcttaataaaatcaaatacttgccaggaacggggccataccctgtattgaggttgaactttttatcactgcatgaacatatgttagatcacatttttcgatgaaaaaaatctatgaatttttttatgtgatcttcatcactcatggcggctcattcatcaggtaatgttttgagcatatgatttgatagtgaacatatgaacagtcaactgaaaaaatgagaggcgcatgatgtcagcagagaaaaaacccgttgtggcgattaccattggcgatccggcagggatcggcccggagatcaccgtggccaccatgatggacaaaagcgtgtatgacgagtgcaaaccgttcctgatcggctcggtaccgattatcagccgggcgatgaaaatcatgggctgcgattttgctatccataaaattgcccatccgcaggaggcccgttttagctgggggacgttggatgttctggaaactggcgactacgattgcgacagtatcgaatggggcaaggtgcagaaactggcggggcaaatgtcgctggactatgtgatgaagtcgatcgagctgggcaaagcggggctgatcgacgtggtctctactgcaccaattcataaggaagccatcaagctggcaggatgtaagctcccgggccataccgaaatctatcaggtggaaacccaatctgattacggtctgaccatgttccacgtccacaacctgcgcgtcttcttcgtgagccgtcatatggcgctaaaagcagcctgtgactatgccaacaaagcgcgagtgctggcctgcgttcagcagatccaccatgaatttaccgccctgaacatcaaaaatccgcgcattgccgtggccgccctgaacccgcatggttccgacaatggtctgtttggtcacgaagaggctgacaatctgatcccggcggtgaaagcggcccaggagatggggatcaacgctatcgggccggttccggccgattccgtgttccatctcggcaaacaggggcgctacgacgccattctctcgctgtatcacgatcaggggcatattgcctgcaaaaccctcgactttgaacgttcgatcaccattaccttcggcctgccgtttatgcgcagctccgtcgaccatgggacggcgtttgatatcgccggtaccggtaaggcgggtaccgtcagtatgctggagtcgacgctggtggcggcccgttactggaaaatgaagcatcaataatcgctgaggttcatgcgaatcacgaggacagagaaatggaaaaacatctgttgattagcaagggctgtaagggctggggcgggccgctgactatcacgccaggtcaggggaaaaagattgcgtacatcaccggggggatccgtcccccggtcgtcgaccgcctgagcgaactgaccggctggccttccattgatgtattcaagaatggcgaaccgccggcggaagagattggtttaatggtcatcgactgcggcggcacgttgcgctgcggactctatccgaagcggggaattcccaccattaacctgcatcccaccggtaaaagcggcccgctggcggaatttatacacgaagggatctacgtctccggcgtgacgccagcctgcattgagatggtctggccgcaaggggaaggcggaaagcttgggatcgtggctgacgatctgaccggggcaactaccgtcggggtgctgctggcacgcagtggtttaaaaaccgccgcgtttttcgataccgaatccttcgcccgcaatgaggtagagtatccggcgatggtggtcagcagcgacagccgcccattgccgaaagcggaggcccagcacaaagtgagcgctgcggtgaaacagctgcaggctcgcggcgcgcattacttcaccaagcggattgataccacgctgcgcggcggcatcggatttgaaatcgacgccatgctggaacaactgccgcaggagacggtggcggttgtggtgccggcgatgccgcagtcacggcgtattctcgtcggcggttactcggtgattgattcggtagccctgtcgcggaccgatgtggctcgcgatgtacgtaccccggtcaccgagtcgtgggtgccgggactgttggcggcgcagacccatcatcaggtcgggcatatcgcgctgacatcggtgatgaaaggcgaagggcaaatccagcaggatttacaggaacaacaacagcgcggcgtgcgggtgatagtggtcgatgcgataaccgtcgacgatgtcgatgccatcgccggggcggtagtggccctgaactggaacgtgctggccgtcgatccggggccctttaccgaacggctggcggttcgtcgcggcctgatgcgcgaagcgcggagcagcgcgcccgcgagcctgacagcggacggccagcgcggctcgattttgatcgttgccggcagcgcaacgccagtaaccaaaaaacagctccagtatttgatcgctaatgatgcccgggtctgccatatcccggtggatgccgagctgttggttgaccggaaaaacgccgctgagattgaagtcaatcgcgtggtgcagcatgcccgacagtgtgttccggcgcagcacaacgcgctctttgtttttgagtccgccttgaccgggcggttgctaaaccttcaggaagaggagcagcgatttggtctggcccacggtgaggctgcgcaaaatattaaccacggattgggcagtattgtgcgcgaggtgcttaactgtgcgtcgggtgaaattaaaggattgtatatgaccggtggtgacaccatggtcaatgtactaaaagagctgggcgccaccggaatagaaatgattgactatgtcatcccgcaaaccgatatggtgcggatcattggcggcgattatgccggcttaatttgcgtcgggaaaggagggctaaccggaccggaagatattattagcatcattgttgaccgaatttatcaggaagcacagcaataacccagtaatctaataactaataaacgacgtaatggtcgtcagggtagtattgcgtcgttatctctgttaaatcttaatttaagagttaccctatgaatattaatatacttgaaaaaatgaataaggtgcccggtgggttaattattattccactgctggtggctatattaattaatactttcgcgccccaggtgctcagcattggcgggccgaccaccgccttatttaaagtcggttccagcgccatgatgggcatatttttgctcatttgcggaacctcgatcaatatccgtcaggccgggttgccgctctataaaggcgccgtgctgctgtttctcaaatgtctggccggggcactggcggtatgggttgcgggaacgttgtttggcccgagcggttttctcggaatatcgaccctggcgctgattgcctgcctgaccagctcgaacagctccctctatatcgcattgtgcagcaactatggcgatgccagtgatgccggggcgatctccgtattctgcatcaaggatggtccgtttgttaccatgatggtgctgggcgtcagcggcctggccaatattcccttcgccgcgctgctgtcgatgctgatcccactgctgattggcatgctgtggggcaatctggacgaacgctttaaacagttatgcgctgcggcgcagccgctggtgatcattattatgtcgttcgccatcggcgccaactccagtatcaatacggtgttcaccgccgggctgtccgggatcctgttggggattatctccgcgctaaccgggattgtgttctactttatctacaacctgtttttgaagaagaaaagcgcgctgggcgccgcgctgggaaccaccgccgccagctcggcgctgacgccggcgatggttgcccaggcggatccttcgctggcgatgtacgtggatgccgccaccgcgcagctggcgacggcgagcattatcaccatgatcaccgcgccgatactggtcgcctggtttgataaacggctgaaaaagcgtgcgccagccgctgaaccgctgaaagaggtgaaaagtgaagagagcgtgacattatcttcccctgccgccaaaggacacaaatagtatgagcgtgccgttgtattcattacggattaccgccgtcggggaatatgttgagtactctctgcaggagctgcggcttattttattctccgatgccgttcccgacgatattgcgagttattgcgctgtacaccaggccagcgaactgaccgccgagttatcgcctggtcagcaaatgaaattaaatgataaaaattatcgggtgaccgcggtaggccgtgtggcaacggcaaatttacgacagcttggccatatcacgctaaattttgatggcgcagatatcgctgaattacccgggacggtacacctttacggcgaaccaccacaaattattcagcctggcgaccaaatttcgttttacccgaattgtcattaagacgtactgttaaattaaggaaataaccatgaaaacaatcgctattggtgcggatgatgccgcctatgcttttcgcgattccatcgtcgcttatttgaatgggttgggaattaacgtcgcggattacagcagcgataaacgccaggggagtaccgtttatccggatgttgcccatgcggtggcgatgtcgattaaacagggcgaacacgagcgtgggatcctgatctgcggtaccggcattgggatgagtattgtggccaataaagtccccggggtccgcgccgcacagtgtcacgataccttctccgccgagcgagcgcgtaaaagtaacaacgcgcagattattacccttggcgcgcgggtgattggcgctgagctgggcaaaaaaattattcaggcgtggcttgagtccgaatatgaaggcggcggatccgcgcccaaagtggaacgtattgattattacgaacaccagcatgccagagattaatctccgcagtcgtaagataaggaacagatgatgagccagttagacgaactaaaaaaatacaccacggttgttgctgataccggcgatattgaatcgattaaaaagtttgcaccccaggatgcgaccaccaacccctcgctggtgctgaaggccgcgcagctgccgcagtatcagccgctgattgccgatgcgattggcaaggcacgccgccagggaggcagcgcagaaacgcaattgattaacgcctgcgatcaggtggcagtggatatcggcagcgaggtgctgcgccatgtgcccgggcgtatctccaccgaagtggatgcccgctttgcctgggatcgcgggatgtgcgtcgcgaaggcgcgcaagctcatccagttatatgagaaaaatggcattggtcccgagcggattttaattaagctcgccgccacctgggagggcattcgcgctgccgaagagctggagcagagcggtataaactgcaacctgacgctgctgttctctttcgctcaggcccgggcgtgcgccgaagcgggcgtctttctcatctcgccctttgtgggccgcatctacgactggtatcagaagcaccagccgcagtcagcctatcaggtggacagcgatccgggcgtggtctctgtgcgccagatttatcagtattacaaatcccatggctatgacacggtggtaatgggtgccagcttccgtcgaattgagcagatccaggcgctggcgggctgcgatcgcctgaccatctctccggcactgctggacgagctggcggccagcgaaggagtgctgacccgccagttgactcccggctgcgtgacggaaacccgtcccagcccgatgacgcaggcggagttcctctggcagcatcatcaggatcccatggcagtggaaaaactagcggaagggatccgactgtttgctgtcgatcaggtgaaactggaacaacagattcagcagatgttgtaatccgcggggataaagactgatgaaaacgacaaataccactcgccgccaatgcgccaacgcgctgcgcgccctgagcatggacgctgtacagaaagccaaatccggccacccgggggccccgatgggtatggctgacattgccgaagtgctgtggcgtgatttcctgaaccataacccgaacaatccggcctgggctg

SEQ ID NO: 78 - DNA, 63360 bp, Unknown
  source: /note="Description of Unknown: MKP2_coc_1 Mutant Bacteria sequence"
atggcggtcagcccgcaggacgtgatggtggttatccagtttaaccaactggaggactggagttttagcgcagggaagatggcggatgaatgagacaggcggcgccgcaagaggcgccgcgtttcagatgatataatttactaccacgcgagatgatgcaccagcgagagatcccaggccgttgccaatagcgaaagaaacataatcacattgaccactgtttcaagacgtttttccatcgttgcttctcctgagcctgtttcccctgttatagcgggaaaagcttaacaacctcttaccgcttcaggactcaagcgtgatcctgtagcgtacgtaatcgtcagccggggtaaactcatcatacagatgacgggcgggattatcacggcgcgtatgccagtacagccgcgaccagcctttgtccgccccttcgctttgcagcgacttaatcatggttctggcaataccctgtccacggaaggcgggatcgacaaacagatcctccagatagcagatcggcgtggtaacccaggttccctcatgaagaacacagatagcgaagccgaccactgcatcatccaccaccgcgactctacccaatacagacgagtttacatccagcatccgctgccaggtgcattcggtcacctcttccggctgcgggctaccgtaaaaacgagtgtagccttgccaaagctgaagccattcggctttgtcgtggggccgtacttcccggatatcgatgaccatgagagtttccttacagatgaatgcattagcctgcgaatattggcaggagatatgagttgaggtcattattttcctgcgcagatatttgttcaagcgcttcggccataattctcctgctgttcggaacgatttggcactaaaaagccgtatgcagaggagccactgaccggctgttacaggttagtataatagtatgttgtaactaataaaaatcctgcacaacccggccgcagccgggtgtatagatggactatcagcaaagaggtttgacggcgtcgcgcataccgcaggtcaggatagcgtcaaggtcggcagtcaccagctccaccaatcccgggatctggctcagatcctgctgccagtgatccgccacgctgagcacggcggtgaccagctcgcgagtgctcatctggccatcgcgatggcgggcccacagcgtttgatagcgcgatatccagtcggcgtcatcctgtactggatagctctcaccatcccgctctccccggtaaaaggcgatcagcgccgccagggcaaaggtcagacgcggcggcagcgcgccatgcgctttctgccccgccagcagctgcggcagaatacgggtgcggtacttggtcatgccgttgagcgcaatcgagagcagctgatgtttaatatagggattacggaagcgccctgtcacggcgctggcgaatgacaccagctcatcgcgcggcagatccagcaccggaataatttcgtcataaatcgctttttcgacaaacgcgcaaatctccgcatcgttcatcgcctcacccacggtgtcgatcccggcctggaaggccactggcaccagcgcggtgtgcgccccgttaaggatcgccactttgcgttctttatacggcttgatatcgtccacaatgcgcacattcagcggcagtttatcgagacgcagctcggcctccagcgaggcaggtccctggataacgaacaggtagaaatgctcagcggtatcaaggaaagcatctttatagccggtctgcgcctcgagagccgccacttcatcacgcggatagccggtcacaatgcgatccaccagcgtcgaacagaaggtattcgctgaggtcagccaggtgataaatgcctgcggcagttcccattcgctagcatagcgcagcaccagcgcctgcagcgcctcgccgttataatcgatcagctcgcagggaataatcacccatcccttgtcggccgcaccggcgaaatgctggtaacgctcaaacaacagacgggtcagtttcgccggataactgaccggcggcgcgtcgtcaaaccgatccccggcatggtagctgatgcccgcctcggtggtgttggagaagacaaaccgcatctccgggttatgcgccaggcgtaaaaaagcgtcgaagtctgcgtaagcgctgatctcccggttgaccgagcggataagacgcgcgtcgctgaccgcttcgccctgctcgttcaggccgcgaataatagtcgtgtacaggccatcctgggtgttcagcgaaggcggaaaatctgtggcgataggccgcacgaccacgatgcccgcattcaggtcggtatgctcgttgagcaggtcgatctgccagtcaacgaatgcgcgcaggaagttaccttccccaaactggatgatacggtcagggtactgcgcgccggggaaatcacgacggtttaaagttttcacaatgggttccctctaatagtagtcatacaacctgagtaattggtccaataagttatcaggtttttctaccagtgaaaccctgttttgatcaaagcaatctgcaatagcggccgtcagggcagaaacttatagaatagtgaggtggcagtcatttcgccgtcgggcatcagcgcatagcgcggaatttcccccactttttcccagccgcagcgggcatagaactgttccgccccgctgccggtcgccgtgtccagcaccagcaccgtcttcctttcccgccgggcaatgcgctccagctcgctcatcaacgcctgggcgatccccttgcggcggacattttggtgaaccaataatttggcgacatccgctcgatggggctggttttccggttgactggtgataagttgcacggtgccaacgggacgttcctccgcgtcgaaggcggccagcacaatgcgctccccggccgccacgctgtcggcagtgcgttgccagaacgttatcgccgtttgcggcgcgaaaggcagcataaagctcaccgaggcgccgccgttgacgcagcttgccaggatctcgcttaatgccgggaggtgatggagaatatcgtcacgcgagagcgtgcgcagtgaaaaggatgtggtcataaaagctccctgttatcgaccacatcactatgtttttaaccaaaaattagcacaagtaggatcccgataggattttcttatggcgcgctttcggtcagcgtcggcatacaaatttggttacgaccgctctgtttggctttcaccatctcatcgtccgccgccaacagcagctggttaaacagctcggtgatgcgggcgtggcctacctcgcgcgtctccagtcccagactgatggtcaggtggatcgggttctggcccaggccgaaaggctgcgactccaccccgtgacggatcttttccgccagcaaatagccctgctgggcgctgtcgacgacggcggccaccgcaaactcttcgccgccgatacgggccaccatcccctgctcacccaccagctgtcgaacctgctgggcaaactgggtcagcacgcaatcgccgccttcatggcccagagcatcattcacccgtttgaagccatcgatatccagcaccatcaccgtcagcagcttatccgccggcagcgtctgacgcttcaacgcttcgctcagtccggaacgggaatagacgcgggtctgaaagtcaaaatcggcgcgcagggccagctgcttcaccagcgtgttaatcgcttcgacactggatgcgacaatcaccgggctaatcagcatggcggcaattccgaggcgggtggagaacagctgccacggctgcattcgcgcatctggcgaaaagtgaattaacgaattagcgaccagcagtatttcgccgatgccagtgagaaaagtcagcagacaggtcagcggcagcggatagcgtacagcgcaccagatcaaagccggtaacgggaaggtaatgctgcccgcgccgcctaccgccacgccaagcgcaattgacaggaccagcgccagcaccggcagcagctggcgaaagcgaaaaccgcttaatgccgaaggcagcgtcagggtcagaataaagggcaggattaataccgccgttgagaactgttcgctaaaccagtccgccagctggggaacgaaggtggcgcgttcaacatccaccgaccccagcgcgccgaccgctgcgcacagtaaggcggctaacaggcagaaacagaataaattaagcgcgtttatcgggcccggcatggagtcggcgcgacgtttatcccacagcaccagctgcgctagcgtcacaataaagacaatattggaaaagttaatcagcaatgaggcaaagcccataccccagcgcgaggttaatccatcatagaccagcattgccgcaaaacagacggcataaaaatagctgcggttaagccatacatagcgtgcaaaaatcccggccatcactgcattgagcggccagaagaaagagagctcctgcaccagacgcagcatagcgccaagaaaatgcagcagtagcgttaacgtaaataagaccaatgcatcgcgcacgggttgttcttcacgaaacagcgtaaatgaccgaatcgacagtgaagacattcagtaattatccgtctaattgtttcaggaaattattatgttaatagttagttagcggattatcataacatgagaatatttatcaggcatactccggcgccgatcaaatgcaaattagcgcacagacggcgcattcatttgtagcaccagccagcggtggatgacctgcacgatatagtcctgctccggctcgctcagcgcgcggccgtggggaatggcatgccatttttccaggcagccgcgacagcaggtagcggtcgcgtgctgggcgataaacaccgggtgaccgcgcatcggcgtctgcttgccatcattgatcggcgcagcgggcgccagccgctggcgaataaagtctgcggcatgccgatcaatgacctccggtcccttatcgagacaatattgccgctctttcccccccagacggaagcgtgagcgaaacgtcgagcgcgccaggcgcgcaaacaagcgatcctgatcgaccatcagaacaccgacctccccatccgctgagtcagtttttccagcatcgccacgccggccagcgagttcccggcgtcgtcaagctccgggctccacacggcgatcgccatctcctgcgggacaatcgccacgatcccgccgccgacgcccgatttcgccggcaggccaacgcgccaggcgaattcaccggcgttctggtacatgccgctggtcatcatcagggcattcacctggcgggactggatgggcgcaataaccggcgcgtcgagatgcggggcaatgccgcggtcggcgagaaacagaaaggttcgcgccagctcaacgcagctcatctccagcgaacagtagtggaaatagttctgcagcacggtggcgacgtcgttatggaagttaccaaaggatttcatcagccaggcgatggcggcgttgcgcgccgaatgctcaaactctgagcgagccaccaccggatcgtaggcgatatcggccacgccgctcagacggcggacaatctccagcatccgctgacgcggggcgctgagccggctctgcagcatgtcgcagaccaccagtgccccggcgttgataaacgggttgcgcggtttgccctgctcgatctccagctgcagaagcgagttaaagggctggccggaaggatctttccccacccgctgccagatctcctcctcctgatagtggttcatggccaccaccaggctcaataccttggagattgactggatggaaaaacgttcatgggcatcgccagcggcaaagtgctgaccgtccaccgtactgatcgcgataccaagcttgtcgccgctgacgctggccagcgccggaatataatccgccacttttccgcggccaatcagcggcctgatttctgccagaatggcttccagcattgcattattgattaccgtcgccacacgcggctccttgcccaccatcaaaattcggtgggcgagtatagcagacgtggacgacggtcgtcaggggctaacgttgattagcgacggtctttccagacggtctgcgcattacagaactcgtgcaggccaaaatgcgacagctcgcggccaaaaccgctcttcttcacgccgccgaaggccacgcgggcgtcgctggcgcagtagccattgaggaagacgccgccgcactccagctcgcgggcaaagcgctgggcctgcgcctcgtcggtggtatagaccgtggcggacaggccaaactcgctgtcgttggcgagggccagtgcatggtcagcgtcgcgagcggtggtcagggttgctaccggaccaaacagctcctgacgaaagccggtcatcccggcggtgacgttgcccagcaccgttggcgcatagtagttgcccgccccttcgattttttccgcgcccagcagcagagtcgctccttcatcaagggtcgccgttacctgctggtgcagttcatcgcgtaaatcgaaccgcgccatcggtccgacgtagttttgctcgtcgcgcgggtcgcccatcttcagcgctgccacggcgtcgacaaatttgcgggtgaaggcctcggcaatgccggcttcgagaataaagcgtttcgacgccgcacacacctggccgctgttctgatagcggccggtgacggcggctttcaccgcgtcatcgagatcggcatcgttgagcacgataaagggatcggatcctcccagctcaagcacgcatttcttcagcgccgcgcccgcctgggcgccaatcgccttcccggcgcggacgctgccggtgacggtcaccgccgcgatgcggtcgtcattgataatctgcgaaacgccgtcattggtggcgttcacccaaccaaatacaccatccggcaggccggcggcggcaaaaatttcgcccagcagacgggcgctgcccatcacgttcggggcatgcttcagcagatagctgttgccggccagcaggatcggcaccgcgccgcgcatcacctgccagaccgggaagttccacggcatgaccgccagtatggcgcccagtggacgatactcaattaccgcctggttattttccaccagggtagcttccgtcgccagcatcgccgggccgtgttcagcgtaccagtcgcagaggttggccgatttcgccacctcgccgcgcgcctgagcgatcggcttgcccatctcaagggtgatcatctgggccacctcttcaccgcgggcgcgcagcgcggccccgatgcggcgcagggcgtcggcgcggtcggcaagcggcgtctgacgccactggcgatagcccgccgcggcgagcgcgatggccgcgtcgacctcgcgttcgctggcccacggcagcgaggagaccacctcaccggtagtcggattgacggagacggcgtgcgttgcagataaattcatcattattctctctcgttgcttgcgaagtgtccgtattctggcttacctttccattcattgaaaatgaataatattaagcaacacattcacaaaagaagaatatcatggacctgactcagctagagatgtttaacgctgtcgccagcaccggcagcattacccaggcggcgcagaaagtgcatcgcgtgccgtccaacctcaccacccgcatccgccagctggaggccgacctcggcgttgagctgtttatccgcgagaaccagcgcctgcgcctgtcgcctgcgggacacagctttttgcgctatagccagcagatcctcgccctggtggacgaggcgcgaatggtggtggcgggcgacgaaccccaggggctgttttcacttggttcgctggagagcaccgcggcggtacggatccccagcactctggcccactttaatcagcgctacccgaaaattcatctggcgctctcaaccggcccttccgggacgatgatcgacggcgtactggaaggcgccctgagcgccgcgtttgtcgacggcccgctggtgcatccgggcctggaggggctgccggtgttccctgaagagatgatgatcgtcgccccctacggccacgcacccatcacccgcgccagcgaagtgaacggggccaacgtctacgcctttcgcgccaactgttcctatcgccggcattttgagagctggtttcatgccgacagagcgaccccgggcaggatccacgagatggagtcttaccacgggatgctggcctgcgtcatcgccggcgccggcctggcgttgatcccgcgcagcatgctggagagtatgcccggccatcagcaggtttccgcctggccgctggccgaagagtggcgctggctcaccacctggctggtgtggcgccggggcgccaaaacccgccagctggaggcgtttatagcgctgctgaacgaagatcggcaaacagtggtttctccataaacacgctgagcggatcgggttgatacggcgcaaacgcgcagcgggtctggtagccgttgcgcgtgtagagggcgatggccgcatgctgatggataccggtctccaggcgcagggtatggcagtcgcgctgacgcgctttcgcttccagcgccgccagcagcttttctcccaactgctggccgcggtgctggggatcgatatagactcgcttcatctcgccaaagccttcctcactgaggacaatagccccgcagccaacggcctcgccctgcgggctgcggatcgccagggcgatgaccgtctgcgacggcagctggctaaggtccagcaggtggttgctctccgccgggtagagggtctcctgccaggcgtcgagggcggcaatcagggcgataaattcggcgtcagtaggggcgatgtcggtgatggtgtacataggtgagctccttttttaccccactgtagcgcggccggcggcttttcccgacatagcattaacttatattgccgcccgcctattgcgctaacccactgaaacacagtaattttatcccctgccgttcgtacttgagatctgaatatgcacaccaaagcccgtaaagtgatgattattggcgccggcaatgtcggcgcgtcggcggcctacgccctgctcaaccagagcatttgcgaggagctgatcctcgtcgaccttaaccaacagagcgctgaggcccacgctcaggacctgagcgacgccgcggcctacctgccggggatgatgaccatctccacccgcgaggccagcgactgcgccgatgtcgatatcgcggtgatcaccgtctccggcggcgcgctgcgccccggccagagccggctggatgaactgacctccaccgcgaagattgtgaagagcattgtgccgacgatgatggccaacggatttaacggcatctttctggtggccaccaacccctgcgacatcatcacctggcaggtatggcagctttccggcctgccgcgcagccaggtgctgggcaccggcgtctggctggataccacccgtctgcgtcgcctgctggcgcaggaactggagattggcgcccagagcatcgacgcctttatcctcggcgagcatggcgatacccagtttccggtgtggtcgcactcctcggtatatggcacgccaatcgccgacctctaccagcagcgcaccggcctgccgctcgatcgcgaggcgatggctgacaaagtgcgcaagctgggatttgagatctacgcgggtaaaggctgcaccgaatatggcgtggcagggaccatcgccgagatatgccgcaatatcttcaccggcagccaccgcgcgctggcggtctcctgcattcttgacggcgagtacggggtcagcggcgcggcggctggggtgccggcggtgctggcccagggtggcgtgaagcagatcattgaactgcagctggccggcgaagagcaggcgaagttcagccagtcgatcgcggtgatcaaggccaatatcgcccgtctgccctgacggcagcctgcgagtcagtcggcaatgatcagctgcggggaaagggtctccagcgcctcgcgggttatatccggcaggtgggcgtcggtcacgatatcggtcaacgtcgtggcccccggcgcaaccgatacgccgatgcttcatcagccaggcagagaaagttccccgccgcggcttccgccgcttgggcgactgattactccgcaggaagtggtctctctggtgagctggttgctgagcgagggcgcatcggcgatgaccggacaggagctggtgatgtgtggcggcgcatcgctgggctgatgctatgtcgcacccggggagcggaagtagattaccgctccccggggcgacgcgggggcgatgattaacgcaggtaaaccgttccgcgcatataggtggtggcctggccgctaatcagcacacggtcgccctgccactggcagcgcaggtcgccgccgcgagcggagacctggcgcgccatcatggtggttttccccagcttttcgccccaccaggggatcagcatgctatgggcggagccggtgaccggatcttccggcaccccttctcccgggcagaagaagcggctgacaaagtcatactcttcatccggcgcgctgacgcagatcattttgccaagcgttcgcagccgcgccatatccggtcgcaccgcttcaacctgctggcgatccgccagcaccaccagataatcgcgcccttcccgaacttcaacggcggcctcgagtcccaacccggtcagcagatccgccggcgggttttccaccggggaggtcgaccacgccggaaaatcgagcgtcagccagtcgccattacgggtgacccgcagctcaccaacaaaacgggtgctaaagagaatcgtcgccgaaggatggtcgagatattcgaaaataacgtgcgcagcggcgagggtcgcgtggccgcagagattgatctcagcgagtgtggtaaaccagcgcagctcatagccctcgtcggtacggacaaagaaagccgtttcggattgattatgctgctgggccattttcaggagcacatcgtcggctaaccactcgctgagcgggcagacggccgcggcattgccgccaaagtttttatcgctgaaagcatcgaccagataaaattgaatttcctgcataccctgtccttactttttttactttccttcaacatgacataaaagcgcccccttgacactatccatagcaaaattaatcgcttaaccgcggccagccccttgcgatgaaatgagacgcagatcacaaaatgattgtcttttcgccaacaatcgttttaagatcagcgtcacatctttccctgaatcaccagtccagagcttatgactacgaatacggtctcacgcaaggtagcgtggctacgtgtcgtgacgttggccatcgccgcgtttatttttaacaccacagagtttgccccggtcggtctgttgtcggatattgccgacagcttcggcatggaaaccgcccaggtgggcatgatgctgaccatctacgcatgggtggtggcgttaatgtcgctgccgtttatgctgctgaccagcaaagtggagcgccggcgcctgcttatcggcctgtttattctgtttatcgccagccacgtcctgtcgttttttgcctggaattttgacgtgctggtgatcagccgcattggtatcgcctttgcgcatgcagtgttctggtcgataacgtcggcactggccatccgcatggccccgccgggcaaacgggcgcaggcgctgagcctgatcgccaccggtaccgcgctggcgatggtgtttggtattccgatcgggcgcattatcggccagtactttggctggcggatgaccttcctggcgatcggcctcggcgcgttagccaccctggcctgcctcgtaaaactgctgccgaccctgccgagcgaacattctggctcgctgaaaagcctgccggtgctgttccgccgtccggcgctggtcagcgtgtacattctgaccgtggtggtggtgaccgctcattataccgcctacagctatatcgagccctttgtccagacggtagcgggcctgagcggcaactttgccaccgtactgctgctgatccttggcggggccggtattatcggcagcattctgttcggtaaactcggtaaccagcacgcgtcggggctgataagcctggcgattgccctgctgctcgcctgcctgctgctgctgctgccggcctcgcataacccgcagcacctgatgctgctcagcatcttctggggggtggcgatcatgattatcggtctcggcatgcaggtgaaagtgctggcctccgctccggatgccaccgacgtcgccatgtctctgttctcgggcatctttaatatcggcataggcgccggggcgctggtcggcagccaggtgagtctgcatctttccatggcctccgtcggctacgtcggcgccattccggcgctggtcgcgctggtctggtcgctgatgatattccgtcgctggccggtatcgctggaagaccatcagccgcaccactcctgaatccgtcgcacaaaaaagcccgccggtatcgcgccggcgggctttttttctctgcgcatcgcgggcggtcagggatgccaggtcgaaatgatctccagcacgccattaataataaactgcacgcccatgcagaccagcagaaagcccatcagtcgcgagatggcctcgatgccgcctttgccaaccagacgcataatcgcgccggaactgcgcagacaagcccacagaatcacccctaacagcaaaaagatgatcggcggcgccgccagcaccacccactcagggaagtccacgccgtgcttaacggtcgaggcggagctaataatcatcgcgatggtgcccggaccggcggtgcttggcatcgccagcggcacaaaggcgatattggcggtcggttcatcctgcagttcttccgatttgatcttcgcttccatcgaatcgtgggctttttgctggggaaacagcatgcggaaaccgataaaggccacaatcaatccgccggcgatacgcagcccaggtattgatatgccgaatgtattcatcaccacctgaccggcataccacgacaccatcaggatggcgaagacatacaccgatgccattaacgcctgtttattacgctcggcgttgttcatattaccggccaggccaaggaacagcgccacggttgtgagtggattcgccagcggtaaaagcaccgccaggccgagccctattgctttaaacaaatcgaacatagttaattaaagtcccgttaatattcattttttaagaatggtttcattccgtgagtatatcggcttcaacaaatttgacgccagcctgctgataaatcacttctgcaaaaaaataacaagcgttagaaaaatcataaagagtgacccacatcgtacttttccattttagcaaatcgtggcatcggccaattcataatgttgacttatgattgcctgggcaatagtatcacctgcaactaattacttgcctgggcaaccattatgaaaagtaccagcgacctgtttaatgaaatgatcccgctgggccgcttgatccagatggttaaccagaaaaaagatcgcctgctcaatgactacctctcacctatggatattaccgcgacccagtttcgcgtgctctgctccattcgttgcgaagtatgtattacccccgttgagctgaaaaccgtgctttccgtcgatccgggcgcgatgacgcgcatgctcgaccgcctggcgtgcaaaggctggattgaacggttacccaaccccgctgacaagcgcggcgtgctggtgcagttgacgccggacggcgcagccctttgcgagcagtgtcatcaggttgtgggtcagaagttacaccaggagttaacgaaaaatctgtcggcggacgaagtcgccatgcttgagcaactgctcaagaaggtcctgccgtaaaaataagaagaggtaagatgatgtccagacgtaataatgacgccatcactatccatagtattttgtcgtggatcgaggataacctggaatcgcccctgtcgctggaaaaagtgtctgagcgctccggttactctaagtggcacctgcaacgtatgtttaagaaagagaccggccattccctcggccagtacatccgcagccgcaagctgacggagattgcgcagaagctcaagcagagcaatgagccaatcctgtacctggcggaacgctatggtttcgagtcgcagcagaccctgacgcgaacgttcaagaactatttcgatgttccgccccacaagtatcgcataacgaatgtacctggcgaatcccgctatctacatccgctaaataactgatgttaatcgcctgcactataaaagacgtattgaggaaatcatgaaactattcgctgccgcagctatcgtactcttgtcgctggcctccagcctcagctatgcggagcaaaacaccacgccggtgcgtcaaaaccagcgtgatacaatgattatcccttcagaacataatgattcgccgtttgatttcaatcatatggcggctggtaatgataaatctgacgaacttggcgtgccgtactaccagcagcacgacctgtgatgccattacacgcataattgtgtatagccccgtctccggggcttttttttatccgcgcgccatgccaggccgcaccaaccgtaagccaaagacattaatgtagagcccggccataatcagcaccgccccggtgagctgcagtccgctcagcgtctccccgagcagcagcgcagcgctggccattcccaccaccggcaccagcagcgacagcggcgccacccgccaggtttcataccgccccagcagcgatccccagatgccatagccgacgatagtggcgataaacgccagataaagcagcgacagtatcgttagcagatcgatgtgttgcagactcgccagcatggtctgcggaccatcgatcaacaatgaggccagcataaacggcagcaccgggatcagcgcgctccagaccaccagcgacatgattggcggccggctcgcctgggacatgattttcttgttgaaaatattgccgcaggcccagctgagcgccgccgcgagggtcagcataaagcccaccagcggcacatgctccccgccaaggctgccctccaccagcaccagcacgccaaagatcgccagggcgatccccgccagctgcttgccctgcagacgttcgccaaagacgaaggcgccaaggatgatggtgaagaaggcttgcgcctgcagcacaagggaggccagcccggccggcatacccaggccgatagcgcagaacagaaaggcgaactgaccgaaacttatggtcaggccatagcccagcagcaggcgcagcggaatagctggccgggcgacaaacagcagcgccgggaaggcgaccagcataaagcgcagccccgccagcatcagcggcggcatattgtgcaaccccagcttaatcaccacaaagttaagcccccacaccaccactaccagcagcgccagtagtccatctttcctcgtcatacccctgcctctgtcgttattggaatttttgtgaacaaaatcaaagtagcgaaaaagcggccgccgggatagatcattatttttggcaggcccggaagtgcgcccgtcgaccgcgatgacctgtacaaggcgtaatggccgtgttatttgtgatcgaagacataaaattataacaacatgacaggcaaggaaatcatgatcaccactctccggcgctccaccatcgcgctgctggcatcgtcgttactgttgactatcggccgcggggccacactgccgtttatgaccatctatctcacccgacgctttcagctggaggtggatgtgattggctatgccctgtcgctggcgctggtggttggggtgttgttcagcatgggttttggcatcctcgctgacaggttcgataaaaagcgctatatggtgtggtcagtgctggtatttattctcggcttcagcgcaataccgctggtcaataacgccctcctggtggtgatcttctttgcgctgatcaactgcgcctactcggtcttttccaccgtcctgaaagcttggttcgccgatcggctgacggcagagaaaaaagcgcgcatcttctcgctgaactacaccatcctcaacatcggctggaccgttgggccgcccatcggcaccctgctggtaatgcacagtatcaatttgccgttctggctggcggccgcctgcgccgcctttccgctggtgtttattcagctgtttcttcagcgggatggcgccgccgcggcccagccgggcgcagcgccctggtcgccttcggtgttgctgcgcgaccgggcgctgctgtggtttacctgctccgggctgctggcctccttcgtcggcggcgccttcgcctcctgtctctcgcagtatgtgctggtggtcgccagcagcgatttcgccgagaaagtggtggccgtggtgctgccggtcaacgccgcggtggtggttgctctgcagtacgcggttggccggcggctgagcgcgagaaatatccgcccgctaatgaccttcggcaccgtctgctttgtgatcggccttgtgggctttatgttctctggcgccagcctgtgggcgtgggggatctcggcggcgatcttcaccctcggggaagtgatttatgcccccggggagtatatgctgattgaccatattgccccgccggggatgaaggccagctacttctccgcccagtcgctggggtggctgggggcggcattcaacccgatgctgacggggttgatcctcacccatctgccgcactggtcgctttttgtcattcttatcgtggcgattgtcgccgcctggctgatgattttccgcgggatcaatgcccgtccctggcaaccggattctccgctggccaacgcctgacgccagctggcatgcggctgtcaggttgctgtcgggccgttgtcgggtcgctgtcgtggtggctggcggcccggttcaccatactccatcacaggtttacatccgcagaacgttatggagcatacgaatatgaacagcaacaatcaggtcaaacaattacggctgcagcgcgcctggtcccaggagcagctggccgaaatggcgggtctcagcgtccgtacgatccagcgcattgagaatggcgaacgcccggggctggagaccctcagcgccctcgccgcggtctttgaggtgacggtggccgagatcggcggcgaagcccggcgggaagacgcgccgggccaggaagcctcactggatttgcgcatagaggaagccaaagcgcgggtgcatcaggagagccgctttttccgttcgctgtcggtggcgctggtggtttgcgtgctgctggcggtgcttaaccgcttcactaatccacagtactactggtccggctgggtcgccctgatctggggcgccctgctggtggtgagaggattacgcctgttcgtgttcggcgaatggattaaaaactggcgccaggcgcgcctgcagcggctgctgcgcaaataggccgcaaaccggcggcgcgaccgccgccggcctggtcagatggtcaccatggcgcgcacgccgtcgctctccatatcaccacccttgccttgctggacgatggcgccgcgcgacatcaccaggtagtggtccgccagcccggcggcaaagtcatagaactgctccaccagcaggatcgccatgtctccgcggctcgccagctggcggatcacctcgccaatctctttgatgaccgagggctggatcccctcggtgggttcatcaaggatcagcagctgtgggcggctggccagcgcgcggccaatcgccagctgctgctgctggccgccggataagtcaccgcctcgccgctgcttcatggtcctgagcaccgggaaaagctggtagatctcctccggcacctgctgcgcttcgcgggcgggaaagcgcgacagccccatcagcaggttttcttccaccgtcaggcgcggaaatatctcgcgcccctgggggacgtaggcgaccccggcctgcacccgctggtgcggtttgcgatgggtgatgttctgatcctgccagcgtacctcaccgctgcgcgccgggatcagccccatcaggcatttcagcagcgtggtcttaccgacgccattgcgccccagcaggcaggtgacttcgccctggcgggcggaaaaatccaccccgcgtaaaatatggctgccgccgtagtattgatgtagctgactcacctgtaacattggcgctccttaacgtcccagataaacttcaatgacctgctcattggcctgtacctcccgcagcgatccctccgccagcacctggccctgatgcaggaccgtcacccggtcggcgatggtctcgacaaatcccatgtcgtgctccaccaccatcagggagtgctgtccggccagcgtgcgaaacagctccgccgtatactccgtttccgcatcggtcatgccggccgccggctcatcaagcagcagcagatgcggctcctgcaccagcagcatgccgatctcaagaaactgtttctgaccatgggacagcagaccggcctggcggtagcgctcgccgtcaagacgcagcaggcgcagcacctcattcagccgatcgtcctgttcgctgctcatccgggcgcgcaggctggcccacaccgatttatcccccttcatcgccagggcgagattttccgccaccgtcagcgcttcgaagaccgtcggcttctgaaacttgcgcccgatgccctggcgggcgatggccaccgggtcaagagtggtcagatccaccgactggtcatagagcgctttgccgctctgcggccgggtcttgccggtgatcacgtccatcagggtggtcttgcccgccccgttggggccgatcacacagcgcagttcgccgacgcctatcgccagcgacagatccgtcagcgcccggaaaccgtcaaagctgacgttgatgttctccagctgcagcaccggatcggtttgttcgcgaaagcgatcgccgggcagctggcgggtaaacagtccttcatccggttgcattagcggtctcctcgacgcagcaggcccatcaccccgcggggtaaaaacagggtcacaatgatgaagatgaggccgagaaacagctgccagtactctggcatcgccacggtgaaaatgcttttcgcaccgttgaccaatccggcgccaagcaccgggccaatcagggtgccgcgcccgccgagcgccacccagatggcggcctcgatggagttggtcggcgacatttcgctggggttgatgatccccacctgcgggacatataacgcccccgccagaccgcagagcaccgccgacagcgtccacaccagcagcttgaagccgcgcgggtcgtacccgcagaacatcagccggttttcggcgtcacgcaccgcggtgaggatccggccaaacttactctgcgccagcgccgagcccagccacagggtcagcaacagcagcaaaaccgtggccataaacaggctggcgcgggtgccggcggcggtgacaggaaagcccagcagcgtggtaaaaccggtgaagccgttattcccgccaaacccggtctcgttgcgaaagaacagcagcataccggcataggtcagggcctgggtcatgatcgagaaatagacccctttgatcttcgagcgaaaggcaaaccagccgaaaaccagggccagcagaccgggaaccagcaccaccagcgccatcgcccaggcgaaatgctgcgtgccccaccagaaccagggcagctcgctccaggagagaaaagacataaacgccggcagaccgtcgcccgccgcctggcgcatcaggtacatccccatggcgtacccgccgagggcaaagaagatcccgtgccccagcgacagcatgcccgcatagccccagaccagatccagcgccaccgccacaatggcgtagcagaggattttgccgctcagcgtcagcagccagctcggcaccgccagcggatgggaggccggcagcagcgccaggaatggcatacacagcagccccagcaccagcaggatccccagccagcgcagaggccgcggcgcgcgctgcgccagcgttaaggtgattggttggctcattagtcaataaccctccctttcagcgcgaacagaccctgcgggcgtttctgaataaacagaataatcatcaccaggatcaggattttgcccagcaccgcgcccatttgcggttcgagaattttgttgaaaatgcccagcccaaaggccgccgccacgctgccggccagctggccgacgccgcccagcaccaccaccagaaacgagtcgatgatgtatccctgacccagttcaggcccgacgttgccaagctgcgacagcgccacgccgcccagcccggcaataccggagccgaggccaaaggccagcatatccacccgcccggtaggcacgccgcagcaggcggccatcgcccggttctgcgtcacggcgcggacgttcatccccagacgggtgcggttcaggatgagccaggtaaagcacagcaccagcaggacgaacgccagcaccgccagccggttccacggcaggatcaggttcggcaggacctgcacgccgccggagagccaggccgggtttgccacctccacgttctgcgcgccaaacaacatcctcaccagctggataagcatcaggctgatcccccaggtggcgagcagcgtttccagcggccgaccatacagatgacgaataatggtgcgctccagcgccatgccgatcccggcggtcaccagaaacgccaccggcagcgcgaccagcggataaaaggccagccattgcggcgcgagctgcgccagcgcctgctgtaccagccagcagctgtaggcgccgatcattaacatctcgccatgggccatgttaatcacccccagcaggccataggtgatcgccagccccagcgcggccagcagcagcaccgagcccagcgacagccccataaaggcctggcccagcagatcgccgagcagcagacgatgtttgatcttttgcaggctatcgctggccgcctcgcgcaccgccgcatccggctcatgctgggcatcggtaaaggggatcagcagcgcctgggtttccgggtccgcggaatggccgagcagcgtcacggcggccagccgcgcgctggcctcaggctgagcgagctgcaggcgcgccagcgccacctccagcagaccccgcacattatcatcggtttccgcctgcagccgctgttgcagcagcgcggccatggccggagtcgcttcccgctgtagcgttcgtgcggcggaagctctctccgtgacattgtcacttaaaataaggtggctggccagcgcgccggcagccagattgcgcagccggttggtcagacggaccggccgggtttcgccctgcggcgcggcgacagcgcccaatggctgtaatccgccctgtcgggtgcggaaagcatgttttccgtcgtccatcaccaggctctcggtggtcaacgcccgcagcagcggcagacgatccgcctgcggcgctgccgcccactgggtcaacagctgcgcctgctggctgcgactggcggcaacgaagtcgtccgcctccgcggcctgcgcccgccatggcagcaaggtcagcaatagcgccaacacactcatgagacccaatgcgttcatgtcgttctcctctggtcagcggccgacgggcgcgacgctcccgccccgtcggccgtggcgcttactggctgacggttttcaccggatggtcaggtttcttatcattaccggggatccacggactccacggctgcgcgcgaacgggctcatcggtctgccagaccacgttgaactggccgttgccttcaatttcaccgatcatcaccggcttatgcagatggtggttggtggcatccatggtcagggtaaatccggacggcgcgttgaaggtctgcccggccatcgcctcgcgtactttgtcaacatcggtggtgcccgctttggtcaccgcctgcgcccacatatgcaggcccacccaggtcgcttccatcggatcgttggtcaccaccgtatcggcattcggcagcttgtgcgctttggcatacgcgcgataatcggcgacaaaggctttgttggtcggattatcgagggactcaaagtagttccatgccgcgaggttgccgaccagcggtttggtatcgatgccgcgcagctcctcttcccccaccgagaacgccaccaccggtacatcggtcgctttcagaccctggttagccagctctttgtagaacggtacgttggaatcgccattgatggtggagaccactgccgttttgccaccggcggcgaattttttgatattggcgacgatggtctggtaatcgctgtagccgaacggggtgtagacctcctcgatatctttgtcctggatccctttggcatgcagaaaggcgcggaggatcttgttggtggtgcgcggatagacgtagtccgtccccagcagaaagaaacgtttagcgccgccgccgtcctcgctcagcaggtattccactgccgggatagcctgctggttaggcgccgcgccggtatagaagacgttgggggacatctcttccccttcgtactgcaccgggtagaacagcaggccgttcagttcctcaaccaccggcaggaccgatttacgcgagaccgacgtccagcagccaaacaccaccgccactttatcctgggccagcagctggcgcgccttctcggcaaacagcggccagttggaggccgggtcgaccaccaccggctccagtttcttgcccagcaccccgcctttggcgttgatgtcgtcgatggccatcagcgcgacgtctttcagcggcgtttcggaaatcgccatcgtcccggagagcgaatgcatgatcccgactttgatggtgtcggcggcataggcctggaaggagagacccatagccataacagaggcggagagtgcaaaagcttttaataacgttctacgttgcatgattcactcctgagtagcgcaaaaaataaagaattaacagctaaccagaggtgataaggcataaaaggtgccaggttgtgaaaacagcaggatgcggcgcaggtgggcgatagtggcgaagaggatggcagcgttgcctcatcacggtgcaacgctgcgctaagaaagcaattaccagacgtcggcggcgatggaggtcaccagacggaccttttgccattgctggtcttcgctgagggcattcccctcttcagtggaggcgaaaccgcactgcggactgaggcagatctgctcgagcggcacgtactgcgcggcctcggcgagacgcgcttttaccccctgcggattctccagctcgccgtttttggtggtgatcagcccgaggaccacctgctgatggccgggacgaataaagcgcagcggcgcgaaatccccggagcggtcgttgtcgtactccaggaagaaggcatcgacattaacgccgccaaacagcacctcggcaaccggctcgtaaccgccttccgagatccaggttgaacggaagttaccccggcagacgtgcaggcccaccgtcagatcggccggcttaccctccagcgcctggttcagcacccgggcataaatacgcgccagcgcatccggatcctcgccgcgctcgcgtacctgctggcgctgggcatcggagcacagataggcccacacggtatcgtccagctgcagatagcggcagccggcgtcataaaacgcgcggatggcgtcgcgccaggtggtggccagatcgtcgaagtagtcgctaagatccgggtagaccgtggcatcgatatctttccgcccgccgcggaagtgcagcacgctcgggctgggaatggtcatcttcggctgcgcgtcgccgctgatgcttttcagatagcggaaatcctccagcatcgggtggtcgccaaacgccagcttgccggtgacgcgaacgccgtgcgctttggtctgcacgccgttgaactggatcccctgctcggcatcgtaacgttcaacgccctgcaggccatcgaagaaatcgaaatgccaccatgcgcgacgaaactcaccgtcggtgaccacatgcaggccgcagtcgcattgctgctgaaccagatgacggatcgcgttattctcaatctcgcgtagctgagcggcgtcgataatcccctcagccagctgctgacgcgcctgtttaatgctgtccgggcgcaaaaaactgccgacgatgtctgcgcggaacggggcctgttgacgttgcatgctgtctccttagcggtgggcgcgttagttgcccaccgtgatagttcattatttgaattttagacttctggatggctatatgtccagatactggcatgcagagtggtgggtcgcaaacgagaatatttcatggtacatgaaaaattttcatttaccggaaacaaacgcatagccctcatcttcccagccggtgagtccgccgagcatcattttcaccggccgccccagctcggccagcttcagcgcggcaacgtcagcaccgttgcagtgcggcccggcgcagtagaccacaaagagggtctccgccggccaggccgccattcgctcggcggtgatctggctgtgcgggagatgctgcgcgcctggcaggtgacgtctggcgaaggcttcctcgctgccgaccacgtgcagcaggacaaagtcgacctcgccggcacgctgggcgctgtgcacatcggcgcagtcggtctcaagatgcagcttatggctgaaccagcggatagcctcagcggaggtggcgggggtaaattgggttactacactcatggcgtcttctccttgtctgtgataacactactttactgacgcccatcaccctgatctgccgacaaccatgacagaaaacgctaacatcctgacaaccccttctgtgacaccgtcacgtcatcaggtggtcgccctcgcctacgatggcctgtgcacctttgagtttggcgtagccgtggagatcttcggcctgccgcgcccggaaatgggcgacaactggtatcagttcgccgtcgccgccgtcgatgaagggccgctgtgcgctaccggcggcatccgcctgatgaccgacggcggtcctgaacttctcgcccaggcggatacgattgtggtccccggctggcgcggcgtcgacgccccggtccccgaggcgctgtgcgccgcgctggcttccgcccacgcccgcggatgtcggattatttctatctgttccggggtgttcgttctcgccgccgccgggctgctcaatggccgccaggcgacaacccactggcgctacactgcggcgctgcagtcccgttttccgcagatccaggtggtggaggacgtcctttacgtgggcgatgctttgctgatgacttccgccggcagcgcggcggggatcgacctttgtctgcatctggtgcgcgaagatttcggcagcgaagccgccaacgtcgtcgcccgccgcctggtcgtctctccccatcgcgacggcggtcaggcgcagcaggtcctgcgcccggtagcccgcagccgggagagcctgcgcctcggtcagctgtttgactatctgcaccagcatcttgccgccagccataccgtcgcttccctcgcccagcgcgccggcatggggacgcgcacctttttgcgccgctttgaggaggccaccggtaaaacgcccgcccgctggctgctggaggaacgactgctgcgcgcccgccagcacctgacggagagcacgatgggcatcgatcagatcgctgagcgctgcgggtttgccagcgccggcaccctgcgccaccattttcgccagcacttcgcgctcagcccgctgcagtaccgtaaacagtttacgccttctccgattgcaaaatcgtcgcagccacggacaatagacggccacagtaaaccggtcgccaggagggtcgatgatgaagaaagagtgtcgggtagtgatctataaagaggggctgctgggcagtctgttttttggcgaagccaaggccgaccctgacaaaatgagccagtttctcagcagctatacccgtgagggatgggaagtgaaaaccatgtcggtggagcgccgccgtaccgccctgttctggtcgcgggaagcgtatcttttcgtgctcgaacgccccctctgacagcctgcgcctggtttacacgtttaagccaggcgtttctaagcgtcacctttcagggctgacggatatagccctgctcctgcattttctgcatgccttcctcgctggcgcagaccatgccggtagtcaacatggcaaagccaaagcgctgataaaacgtaattttatcggccaccgcatagataaatattttgccaaagggcaggagttgctcccggatggccagcatcagctgttgcccgtagccctgtccctgacgagcggggacgatcgccacatccgccagatagctgctccaggtgcagtcgctgatggctcgcgccacggcaatcagctgaccgttctcatagccaaaccagcagaaggtgctctggcggaacgcctgctccagttgctgaacatcacgctcattcagcccggcctcggcgatgatcgttcgcactcgctgccagtccacccgcacgatcgcctctttaccctcaatcaccatcatgaccttgtctcccgtcgtctcccggaagcaagatctagcatgccgcggcaggatatgccagatggaaagccggactgaagcagtcggtacagggtggaaggggcaaaaaaaaaccgccatatgactggcggtaaatcaatgcttgcatggatagattgtgttttgcatttttcgcagacagataagctttacctctctacgtttgctgccgaagttagcatgctcaacttcaataaagcctcaacgaccagcagctaaagcttctccaccagcgctttcagctgcgccagggtctgctgccggtcctccgcggcggcgacaggccaggccgactggcgcacgatgagccgggtcggcagcagctcgcggatccgcagctgcggggccgccatcagggcaatcagccgctccaccgcccttttgcccaacagatcgaagtcctgcgccaccgtggtgagcggcggctggaagtaaaggctgtcggcggtgtcatcgtagccggtcaccgataccgcctggctgccgctgcgattgagctgggccagcgcgctgagcacgccgagcgccatctgatcgtttgccaccactatggcgctgatccgcggctgcaggtggaggagctcgaaagttttctgccaaccgctggcggcgctccagtcgccaaacaccgtagtagagcgggcaatattcagactgtgcaacgcctcgcgccagctggcgagacgcagacgggcggaaaccgaactttccggtcccgccagcagaccaaattcgcgatgccccagctcccacaggtggcgcacgcaggccccgcagccgtcgcggtggtcgaagcgcacgcagcagacatcggcctccggggagacatcgagaaacaggcaggccatatccggattgtcttgcaccagccgctcggcagtggcgctctccagcggcagactgacgatcaccccgcgaatatgctgagcgcgcagctcgtccagccgggcctgcagcgcgacaaaatcagcctgcgccggcatcgctatcgccacttccagctgatgcaggctggcatggctctttatcgcggcggcgatctgcgagggggcgtgcagcgtcagcgaggcggtaatcagcccgatggagggcgccgctttgccggcaagcagctgcgctgagcggttaggcacatagtgcagcgcctgcatcgcgcggatcacctgctcgcgggtgcgggctgacaccacctcaggacggttcagcacccgggagaccgtctgctgggacacgcccgcggcgcgggcgacatcctccagggttgcggtacgacgcggcatcttttctcctcagcaataacaatgtcgtgcgctaacattttatgtttaacgcgcgacaaaaaacagcgcttcgcccccgctttcgtgatcgtctgttaatttcgattcccccgagattgctggacaaaacaaattacccgataacgttaatcatcctgtttagcgaacgacaatttatgacttaccggggtttaatatgcaaattagcgataccggccgcagccacactcctgactttcacgccgtcctcgcccgtgaagactggcagaaccagaccattacccaccttaaccgcctgccagcgcatcccgttttcgccagctggcgcgatgagcttgccgcccgcgataacctaccttcatcccgccgccgtcaactggacggcgagtggcagttctcttacgcccgtagcccgtttgccgtcgatgcgcagtggttgacgcaggatctaccggactgccgcggcacgcctgtgccttccaactggcagatggagggctatgacgcgccgatctacaccaacgtccgctatcccatcgacaccaccccaccgcgggtgccggaggataacccgaccggctgctactccctgcactttacggttgaggacacatggcgcgagaacgggcaaacgcagattattttcgatggcgtcaactcggcgtttcatctgtggtgcaatggcgtgtgggtcggctattcgcaggacagtcgcctgccggcggcgttcgatctcagccccttcctgcgtccgggcgacaaccgcctgtgcgtgatggtcatgcgctggagcgccggcagctggctggaagaccaggatatgtggcggatgagcggcattttccgctcggtatggctgctgaataagccgcagcaacggctatgcgacgtgcagttgacgccagcccttgacgccctctatcgcgacggcactctgcaggtccaggcgaccatcgaagcgactgaggcggcgcttgccgggctcagcgtcggggttagcctgtggcgcggcgaggagcagatcgccgccgggcggcagccgttaggtaccccgacggtggatgagcgcggccactacgcggaacgggtcgatttctccctggcggtggcgacgccggcgcactggagcgcggaaaccccgaactgttatcgcgccgtggtcaccctgtggcgcggcgacgaactgctggaggccgaagcgtgggacatcggttttcgccgcatcgagattgccgatggcctgctgcgtctcaacggtaaaccgctgctgatccgcggcgttaaccgccatgagcatcatcatttgcgcgggcaggtggtcaccgaggcggatatggtgcaggacattctgttgatgaagcagaacaactttaacgccgtgcgctgctcgcactatcccaacgcgccgcgctggtatgaactctgcaaccgctacggtctgtacgtggtcgatgaagccaatattgaaacccacgggatggtgccgatgaatcggctgtccgacgatccggcgtggctaccagccttcagcgcccgcgtcacccggatggtacagagcaaccgcaaccatccgtgcattatcatctggtcgctgggcaacgagtccggcggcggcggcaaccacgaagcgctgtaccactggctgaaacgcaacgatccgagccgtccggtgcagtacgagggcggcggcgcggataccaccgccaccgatattatctgtccgatgtacgcccgcatcgaacgcgaccagccgatcccggcggtccccaaatgggggatcaaaaaatggatcagcctgcccggtgagcagcggccgctgatcctttgcgagtacgcccacgcgatgggcaacagcctcggcaacttcgccgattactggcaggcctttcgcgagtatccgcggctgcagggcgggtttatctgggactgggccgaccaggcgatccgcaaaacctttgccgacggcagcgtcggctgggcctatggcggcgactttggtgataagcctaacgatcgccagttctgtatgaacggtctggtgtttcccgatcgcacgccgcatccgtcgctggtggaggcgaagcacgcccagcagtattttcagttcacgctgctgtcgacctcgccgctgcgggtgcgcatcatcagcgaatacctgttccgcccaaccgataacgaagtgctgcgctggcaggtgcaggcggccggtgaacccctgtatcacggcgacctgaccctggcgctgccccctgagggcagcgacgagataacgctgctcgatagcctgatcctgcctgaaggcgcccgcgcggtgtggctgacgctggaggtgacccagccccaggcgaccgcctggtcagaagcggagcaccgcgtcgcctggcaacagtttcccctgcccgccccgctggcgctgccggcgcccaccgtgtctgccggcgctccggatcttatcgtcagcgatgaggtctggcagatccgcgccggttcgcaatgctggaccatcgatcgccggacgggtctgctgagccgctggtcggttggcggtcaggagcagctgttgacccccctgcgtgaccagtttattcgcgcgccgctcgacaacgacatcggggtcagcgaagtagagcgtatcgaccccaacgcctgggtggagcgctggaaaagcgccggcctgtacgatcttgaggcgcactgcgtccagtgcgatgcgcagcgcctggcaaatgaaaccctcgtcgactgccgctggcactacctgcgcggcgaagaggtagtgattgtcagccactggcgcatgcacttcactgctgacggaaccctgcggttggcggtggacggcgaacgggcggaaaccctgccgccgctgccgcgggtcgggctgcacttccaggtggcggatcagcaggcgccggtgagctggctgggtctggggccgcatgagaactaccccgaccggcggagcagcgcctgcttcgcccgctgggagcagccgctggcggcgatgaccaccccctatatcttcccgacggaaaacggcctgcgctgtgatacccaggcgctggactgggggcgctggcacatcagcggacatttccacttctccgttcagccatggagcacccgtcagctgatggagaccgaccactggcacaagatgcaggccgaagacggcgtgtggatcaccctcgacggcctgcatatgggggtgggaggcgatgactcctggacccccagcgtgctgccgcagtggctcctgagccaaacgcgctggcagtacgaggtctcattgcgttgcttttaatccgtgggggcgacagcccccaccccacaaacagaataacaagggatcatggtgatgaaattctcagaactggcgccacgagaacggcataatttcgtctatttcctgctgttctttttcttttactatttcattatgtcggcctacttcccgttttttccggtgtggctggcggacgttaaccatttaactaaaacggaaaccgggatcgttttctcgtctatctcgttattcgccattatttttcagccggtgttcggcctgatgtcggataagctcggcctgcgcaaacatctgctgtggaccattacggtattgttaattctgttcgcgccattctttattttcgttttctctccgctgctgcagatgaatattatcgctggttcgctggtaggcgggatctacctggggattgttttctccagcggctccggggcggtggaagcttatatcgaacgcgtcagccgggccaaccgctttgaatatggcaaagtgcgggtcgcaggctgcgtcggctgggcgctatgcgcctcgataaccggcgtgctgttcggcatcgatcccaatatcaccttctggatcgcctccggctttgcgctggtgctcggtctgctgctctggctgtcgcggccggaaagcagcaacagcgcccaggttatcgaggcgctgggcgccaatcgccaggccttttcgctgcgtacggcggcagagctgctgcgtatgccgcgcttctggggctttatcgtctatgtggtgggtgtcgccagcgtctacgacgtgtttgaccagcagttcgccaactttttcaaaagctttttcgccagtccgcagcgcggtaccgaagtgtttggcttcgtcaccaccggcggcgagttgctcaacgcgctgatcatgttctgcgcgccggccatcgttaaccgcatcggcgccaaaaacgccctgctgaccgcggggatgatcatgtcggtgcgtattctcgggtcgtccttcgcctcatcggcagtcgaggtggtgatcctcaagatgctgcatatgtttgagatccccttcctgctggtgggaacttttaaatatatctcttccgcctttaacccgcgcctctcggccaccctgttcctgatcggttttaatctgtcaaaacagttgtccggggtggtgctttccgcctgggtgggccggatgtacgacaccgtcggcttccatcaggcctatctgatcctcggctgcatgaccctgagcttcaccctgctctcgttcgtcaccctacgcggcggcaaccgtctgctgccgaccgcagagacgcagagccccgcctgactccagcgcccccgtcagggatgacgggcttcactcgacaatccgcgtctccccgccgcgattctccagcgcatagcgctgacaaggcgccccggcggcgataagctccgccagctccgccgagtggctggtcagccagatctggctgtagcgcgaggcctcgataatcagccgggccagcgcgggcaacatgtcgcgatgcaggctgttctccggttcattgatcgccagaaacgccggcgggcgtggactgagcagcgcgacggcgaggcacaaaaagcgcagcgtaccgtcggacatctccgccgccagcagcgggcggcggatcccttcgcgacgcattttcagagcgaaacgcgagtgctcgttttcacaataaaactggcagccgggaaaggcgtcggcaaggatttcatgcaaaatctcctccgcgccgatctcgacaatggtctgaaaggcggcggcgagattctggccatcgctgtcgaggactggcgaacggtaacccacggccggctgacgcagcggcgaatgccggccaatcgcgaattcatgataaaaccgccaacggcgcagcgtctcccgcactcgcgatacttcgggaaaacggtgcggctcgccaagctgaccgaacaccgactcattttcataaatactctcggtgaaagtacttttctccccggtgacatcgacgagaaacgccgcctgattcttgcgctgcagtacgcgggaggaaggccggcgggagtagccggccagccagatattctcttctttaacgataggatcgagcatgaattgcgtcggatagggcaatttttcagggaagcctatctgcagttcataatcgaagctgtcggtccggcaggcgatttgcagccggcgggggtgacgatcgaggggcgaacgctccccggaccacatcatattctccagaccgccctcttcgctgataaaccccgaaagcctgccctcagcggcagcggtcagcaggtggatggcgttataaatattggatttaccgcagccgttagggccgaagacaatgttcagcggcccgagctccagcgcgatatccttcactgagcgaaaattttgaatacgaatgtactgaatcattatgcgtccgaccctggaaatagaaggctgccacagtagcacagcggcgcccggcacaccctcttacgccccctttcgggcagggtttaacagaacatttttttcattccacgggtcagggcgacccgcgtcagcttatcgctatcctgatgggcgtcgctgaaaacgccaaaaaaatagcgttcatcgtcaatggtttggctaacaattcggtagctcaacggttgcccggatagcgcaccgtactgcgcaggcgtcaccgagacctcggtcgcgtcatcggcgacgctgaccaacagcccgtccgccttaccgcccaccagcatgaccttaattatcgggtgcaccagttcctcccgggatggcatatagcgttggcgaaccgcagggaccggcgggcgtggtgatcggcaaacagcgacgcccgacagagtgcggtatttagtactttcttatagtccatcacggccttgagtcaaaaaatagcgtgcttaggcagggctagatattgattattcgaaataaaagatgacaaatgatgaaggaaaaaagaggaattgtgaatcagcaaaacgccgggttattcttatttgtcgcttctttactcgcctttatcggccctcactcaaggatgtattgtggttatgcgttatattcgcctgtgtattatctccctgttagccaccctgccgctggcggtacacgccagcccgcagccgcttgagcaaattaaactaagcgaaagccagctgtcgggccgcgtaggcatgatagaaatggatctggccagcggccgcacgctgaccgcctggcgcgccgatgaacgctttcccatgatgagcacctttaaagtagtgctctgcggcgcagtgctggcgcgggtggatgccggtgacgaacagctggagcgaaagatccactatcgccagcaggatctggtggactactcgccggtcagcgaaaaacatcttgccgacggcatgacggtcggcgaactctgtgccgccgccattaccatgagcgataacagcgccgccaatctgctgctggccaccgtcggcggccccgcaggattgactgcctttttgcgccagatcggcgacaacgtcacccgccttgaccgctgggaaacggaactgaatgaggcgcttcccggcgacgcccgcgacaccactaccccggccagcatggccgcgaccctgcgcaagctgctgaccagccagcgtctgagcgcccgttcgcaacggcagctgctgcagtggatggtggacgatcgggtcgccggaccgttgatccgctccgtgctgccggcgggctggtttatcgccgataagaccggagctggcgaacggggtgcgcgcgggattgtcgccctgcttggcccgaataacaaagcagagcgcatcgtggtgatttatctgcgggatacgccggcgagcatggccgagcgaaatcagcaaatcgccgggatcggcgcggcgctgatcgagcactggcaacgctaacccggcggtggccgcgcgcgttatccggcccgcagcacctcgcaggcgtgccgggcgatatgactggcggcggcatcggagagatgccggtcggtaatgatggtggtgaaccgggtcagaggtaacgccatgaacgtggccacctgattgtatttcgaactgtcgcacagcaggatgcttctcgcgctgacctggctgacggtctccttgacggtaaccttgttctcatcaggggtgaaaatcccgcgactgtcccagccgctggcggagataaaggccgtatcgatagccaggtggcgtaacgtacgcgccgccgattcgcccacgcaggagcggttctcccggcacagagtgccgccggtgtggatcacgccgcactggctggcatcgatcagcagctgggttatctcaaaatcattggtgaccacctggagatcgttccggtcgaggatcgcccgcgccagcgccagggtggtagtcccggcatccagataaatgcaactgtttttggcgatatgactcgccgccagcgcgccgatcgcctgtttctcctcactctgcagcgtgcttttcaccagatgactgggttccgcggccagccggctgacggcgcgcacgccgcccgagacgctgaccagcagcccctgctcctccagtttactaacgtcccgacggatggtcatatgggacacgccgaggatctccgtcagctcgttaatgcttaccgccccacgctgctccaccagggctaaaatacgctgatgtcgttctattggaatcaccgctctccccttaccattttttcacaccaggcgtcaccacccaggctacgggcctggcgacacccggtgttgttatcgcgctttgccgctgttttttacgctattttagggcaagaatcgccgctgtgcagcctctttccgcctgtgaattttttatattcatgtgggttattcgtgataactctcacataaattcacatgataacgctttattctatcattaaatcacattaattaactaatgttcacaaggagaccagcatggctgcacacactaacgtctgcgtgattggactgggttcaatgggcatgggcgccgcccgcgcctgcctgcaggcgggcctgaacacctggggcgttgacatcaatcccgacaactgtcgcgcactgctggcggtgggcgccaaaggcgcgggccccagcgcggtgccgttcgccgcggaactggatgcagttgtgctgctggtggtcaatgccgcccaggtgcgggggatcctgttcggcgagagcggcctcgccgcccatctgaagccgggcaccgtcgtgatggtgtcgtccaccatcgcctccgccgatgctcaggccattgccgaggcgctggcggagtaccagctattgatgctcgacgcgccggtatcgggcggcgccgtgaaagcggccgccggcgacatgacggtgatggcctccgggagcgatgccgcctttgcccgcctcgcgccggtgctggacgccgtggccggcaaagtctaccgcatcgggagcgacattggtcttggctcgacggtaaaaattatccatcagctgctggccggggtgcacatcgccgttgccgccgaagcgatggcgcttgccgcccgcgccgggatcccactggagacgatgtatgacgtggtcacccacgcggcgggtaattcctggatgtttgagaatcgcatgcagcacgtcctggatggcgattactcgccaaaatccgctgtcgatatttttgtcaaagatctcgggctggtgaatgacactgcccgggcgctgaccttcccgctgccgctcgctaccaccgcgctgaatatgttcacctccgccagtaatgccggattcggtcgggaagatgacagcgcggtgatcaagattttcaacggcatcaccctgccgggccataaacagtgaggagagacaacatgcagcttggtgtcattgccgatgacttcaccggcgccacggatatttccagcttcctcgtgcgcaacggcatgccgacggtgcaactgaatggcgtgccgacccgcgatcttccgctgaccagcgaggcggtggtcatcagcctgaaaactcgctcctgcccggcggaaatggccgtcagccagtcgctggcggccctgcgctggctgcaggcccagggctgtcagcagttttatttcaagtactgttccactttcgacagcaccgcgcagggcaacattggcccggtgctggatgccctgctggccgagctgggtgagacgcggacgatgatttccccggcgctgccggttaacggccgcacggtctatcagggatatctgttcgtcggcgagcaactgctgaatgagtccgggatgcgccaccatccggtgacgccgatggaggatgcgcacctgggccgcttaattgagcgccaggggcgcggaaaagccgcgctgattgcctggccgattgtcgcccgggggccggaggcggtcgccgccgcgctggcggcagtcaacgatccggcggtgcgctatgtggtgctcgacgccctcagcgaacaggatctgctcacccagggcgtggcgctgcgggagatgaagctggtctccggcggttccggcctcgccatcggcctcgcccgcgactgggcgcagcgccatggcgcccggggtgaaagcgctcaggccggcatgccgctggctggcccggcggtggtgctctcgggctcctgctcggtgatgaccaacagccaggtggcggcctatcgtcaacaggctcccgcccgcgccgtcgacttaagcgcctgctttaccgatctggagagctacgtcaggacgctgactgactgggtggacgcgcagcgcgatgcgccgctggcgccgatgatctatgccaccaccgagccgcaaacgctgcagcggatccaggcgcagtatggcgacaaggccagcagcgaacgggtggaacagctgtttgccgctcttgccgccgccctgaaggcgaaaggatttacccgctttattgtggccggaggggaaacgtcgagcattgtggcgcagaccctgggggttgaggcgttccatattgggccgaccatctcccctagcgtgccctgggtgcgtgacacccgccagccgctctccctggcgctgaagtcaggtaacttcggcgatatccagttctttgcccgtgcccagcaggagtttcgtcatgactgagcaacaactgcgagaggaaatggtgcagattggcgcctcgttgtttagccgcggctatgccaccggctccgctggcaatctgtcgctgctgctaccggacggcaacctgctggcgacgccgaccggcgcctgcctcggcgaactgcaggctcagcggttgtcggtggtgacgctgcaaggagaatggatctccggcgacaaaccgtcgaaagaggtcacttttcaccgggcagtctatttgcacaacccggcctgcaaggcgatcgtccacttgcacagccactatctgaccgcgctctcctgcctgcaggggctcgatccgcacaactgtatccgcccctttaccccctatgtggtgatgcgcgtcggcgacgtcccggtggttccctactaccggccgggcgatgaccgtattgcccaggcgctggccgggctggcgccccgctataacgcctttttactggccaaccacggaccggtggttactggctcatcgctgcgcgaagccaccaacaataccgaggaactggaagagaccgcacggctgatatttaccctcggcaaccgcgagatccgctacctgaccgctgacgaagtgaaagaactgagataaaaccatgccaaaattcgctgcaaatttatccatgctgtttaccgaactgccgttcctggaacgctttgccgccgctgcccgggcgggatttgaagccgttgagtttctgtttccctatgagtatgccgccggggaaatcagacagcgcctgcaggagaaccagctgcagctggtgctgttcaataccccacccggcgacgtcaacgccggagattgggggctcgccgccattcccgggagaagcgcggaggcccgacgcgatattgagctggcgctggagtatgcctgccagctcagttgcccgcacgtgcatatcatggccggcgtggtgccgccgggagcggatcgcgcagactgcgaggccgtgcttatcgataatctgcgctacgccgcggagtgctttgcccgccacgacaagcggatactcatcgaagcactgaatccgcagaccaaaccgggctatctctaccacagtcaatatcagacgctggcgatggtgaaacgggtcgacaggccgaacctggcggtgcagttagatctgtttcacgcgcagaaggtggacggcaatttaagccatcttattaccgaatatgccggccagtatcgccatattcagattgcctccctgcccgaccgtcatgaaccggatgagggcgaaataaactatccgtggctctatgcgctactggataaaaccggttatgacggctggatcggctgcgaatatatcccccggacagacacgctttccgggctggggtggttctcgccctaccggaaaaaataaacgccgttttctaaaaaaataactctctgtacacctgttaatacccgaggcaaacctatgtcgacatcggcgctgttacttattgcgttagccagcgtagtgctgttgctcctgttagtgatcaaagcgaaagcacatccttttgtggcgctcctgatcgtcagtctgctggtggcattcgccaccggcattccggcagataaaattataaccaccattgaaaaaggcatgggcggcctgcttggccacatcgccagcattattattctgggctcaatgctgggggtactgattgaaatgtccggcggcgccgaatcgctggcgaaaacgttgaccggcgtactgggtgcaaaacgaaccattgccgccttaaccatcgtggcttttattctcggcaccccggtcttttttgaagtcggctttatcatcatcattccgttaatctacggcttcagcaaagtcgcccacgtatcgccgctgaagtttggcctgccgatggccggcgtgatgttaaccgtccacgtggcgctgcccacccatcctggcgcagcggctgcggcaggcattctgcatagcgatgtcggttggctgatgctggcggggattggggtgtcggtggtcgtcggtatcgtgggctattttgtcgcccggtttatcaatcggcgccattatcatctgtcgattaacgtgctggagcagcaacaaacggcggaagtaccggatctctcggttaacgcgcagcagacccgtctgccgccgccgaatgcgctggttatcggtgggctgatcgtggtgcccatcatgctgattgtttccgggacgctgtgtcaggcgcttctgctgccggaaaacgcggttcgccagctgatgaccgtcattggtaccccgccggtcgccctgctgatctccctgggcctggccagctggacgctgggcatccgtcggcggatgagcctgaaaaagctgggcgaagtcaccggcagcgcgatcccctcgtcggcggacgtgatcctcgtcgccggcgccggcggcgcctttggcggcgtactggtcgcttccggcatcggtaatgccttagccgaggcgctggagacaatacatctgccgctgatgcccgccgcttttctgctatcgctggtgctcagagcctcgcagggttcggccaccgtggcgatcctcaccacctccggtctgctgtcgcaggcggttgtcggtctggagccgctgcaactggtgctggtgacgctggcgacctgcttcggctcgctcgggctgtcgcacgtcaacgacgccggattctgggtcgtcacgcgctatctcggactctcggtgccggatggactcaaaacctggaccgtcttgacaaccatcatgggggtgacgggctttctcatcacctggctgctgtggtttgcgctttgatgttaacctgggtggctccggccaccttaacttcgccccggcgcaggccctgacccactaccgctgtcagaccgcagacccgctgccgacagcgtcaccgggataaaatagcgtacgcgatagcgcctgtcccctgcctcttcgccttccgcatggcgggttataaaacattcaatgtcatagccgtcccgacgacttacccccagggatggcagcagctccatatacagatcgctggataaacgagcataacgtgaccagctgccgtagaattcaaccccgacataaagccctgaccgggtggtcagcgagctgttcatggccagcgcggggggcagctttcccgcctcatgacagccgacaaaagcgttaacctcgacgttaagctcatttttactcgccgcggcgtagtcggaaagtacggaaagcgagcctccgccagcggtgaaaaaacggtcaaccttttgtctgatgctcgtcttagcggtgctttgcaacaccaaatccgacaggcgcagttcatacttcattggatagccgtaatagacctgttccggcagagaaaaaaaacgagccagaggtaggctctctccgtccgggtgaaactttttcaacagctttgccgtgtcccagtgcgccgcgcaacggtattcacgtggcgagagcgaaaagcgcttcttaaactcccgggaaaaggtctgcggcgagtcatagcttaactgccaggcaatagcggcgatcggttgtcgtgttaagcgcagactgaccgctgcgatggtcaaccgccgcagacgaatatactgcccgatgggtaactggccatactggtaaaacacgtcgtacacaaaccgacgtgaatagcccatatacagcgccaggtcatcgatcgccgggttacaatagatattatcctccagccacgccagcattttcaaatagagcatctgcttcataagtacggcatacatcctgtattcttgtcctccgctaattttaacaacagagcgcggctatcactaagctttttatgcatcgcaaaaataaaaaaacagcaaacggctttaaatagttacaaatatatgcttaaggttttgtttattaggaactttcgcatatcaatataccgttatctcactttccccaccagatattgcattaatggaaaacatcccttagattaccacggctaaaaatagtacctgcatcatcattatattctttaatttatccagatatgttttttaatgcccacagggaagttatatgactaattttttgttcaatataaaaaatcactatttgcgagtcgctattgctgaactggttgatgaagcgatgaaggccgccgggcggccacactatcagttttctcaacaatgggatgcaggatcgatggcgcaagctgatgtgatattcacggaaatggtcgcgggggagtggtacttgtgccaggatctttttcagcatgccccggaacaatatacgctttttattttcccggacaatgaacacgctaccgtagatgagggtttaccgaattgtcttcagcatgcggtatttatgccgcctcacgctcgcgttcagcggctgaaagatgagatagctaacgccattgaacgtccgctgctaccgcggcaagatccgccgttcaatcgtctgcggcgttgcattaattgcgcctgcaggtcggtcagcgacgcgcaaaccaaagtcatttacgcgttcagtattggcctgagcccgcatgaagtcgccgctgcgctaaatattagtcccaaaacgatccattcacataaaaagaatattatgagtaaatttaatttgaatagccgccagcagtttaacaaccttgtgcaactgctcgccaaacgctgatacaactcgtcattttattctgtcaaacaatcatcttctggaacggaaaacataccgtctcttgcgcctttcctgaatataggaaaagccactccataaagaaatgatgggacataaaatcagacacaaaataataaagaagtcgctcatatcaaacctgacaaaagaatttaatttagagtgataatattcactcgattatattcaggcaagaccagcgcctcatttttgagagtgggaaatagaatggtaggataattcctggtagcgaatattaacaggtaaaataagacgcagcgccagtgtctgaggaaggaatgagaggcctgttagcgtctttttgcattgaggatgagaaaaagatagccaaatgtgtaattccctgtacagtggagggaatcacaaagtgaagctcgcgttccgcgtagcggacatcacggttggttgaatgtttgtacatatcagcctcgccctcctttagggtcaggccatactcatcttgcatgctgagcgcggatgttcttacgccgcgggagcgatcgtaacaactatgctaaccaccctgatttaccgcagccaggttcatcctgaccgcccgcccgtcgatctcgacgctttagtccatcgcgccagcagtaaaaatttgccccttggcatcaccggcattctgctgtttaacggcctgcagtttttccaggtcctggaagggactgaggaggcacttgagtcgctgttcagcgaaatccaaagcgacccgcgtcatcgcgacgtagtggagctgatgcgcgattactcagcctaccgacgttttcacggcaccggaatgcgcatactggatctccggctgtttgaaaccgatggcgcgctggaggaaattctgcgctttagcacgtttggggtcaccgaaccggtcaacgaccggatgttccggctgcttagcgccttcattgccgacggcggccgctattgcctgcccgagccgctgcagccctctcgctggatgatgatgcccgcgtcaggtacggccgcgccgcagcacctgcccggtcaaccttgccagtttgctctgcaggctattgtcgagccggctaaaaagcgagtttcttcctttgaggctctgatccgcagcccaaccggcggctctcccgtggaaatgtttgctgccattgcggcggaggatcgctaccgttttgatcttgaaagcaaagcgtatgcattcgctctcgccggccagctgccgctcgggaaacatcagctggcgattaacctgttgcccggatcgctgtatcaccaccctgacgccgtaggctggctgatggacagcctgctggcggccggcctcagaccggatcaggtactgatcgaggtgaccgagacagaggtgatcacctgctttgaccagttccgcaaggtgctcaaagccctgcgcgtcgcgggcatgaagctggccatcgacgactttggcgcaggttattccggcctgtcgttactgacccgttttcagcctgataaaatcaaagtggatgcggaactggtgcgcgatatccatattagcggcaccaaacaggcgattgtcgcctcggtcgtccgctgctgcgaggatcttggcattacggtggtggctgaaggtgtcgaaaccctggaggagtggtgctggctgcagtcggtgggcattcgcctgtttcagggctttctcttttcccgaccctgccttaacggcatcggcgagatctgctggccggtagcgcgccaggcaatggacctgtaaggccgcgcacccgggcatcgtcactgccagtgggcaagcttttcgctcagcgccgccagggcatatcgtaccgctttcgccaccacggtctcacagtcgccggcaaagcacatccgtttggtttcagtctggccgcgaaaattccaggcaaaccataccgtgccggcgggggtaccatcttccccgccctccggtccggcgtagccgctgacggcgatggcgatatcggccccggcgagcgccagaataccagaggacatctcctgaacgcaggcttcgctgacggcgctgtgtaccgccagggtttccgcgcgaacctgcagcacgttgcgcttggcttcatcgctgaaggtcactacgccggtatcataaaatgccgcggtatccgcctgggcacagagcgctgccgccagattccctccggtgcaggactccgccgtggtcagtcgccaaccgcgcgcgatcagcgcccgagccacttcagcggttagttcatgcgtattgtttgcgtcgctatcgatctcgtcagtcattcttcctcctcgccgaaattgaaagaaatagcagactcactgcgtctgttaacagaatagcatatcgatttctttgtcgtcggggggccatttatattttcagggggaaaggataaaggcccgcagggcgggcctttaaggtaacatcgtcggaacaacggtgaatcaaactttatgttctatcacgcgtccctgattctcgatcgcaattttacgcggtttttcgctctccgggatttcctggtggattgctatttttaagatgccgctatccagctgcgcctgattaatttgggcgtgttcaggaagagagaaactgagctggaaattagcgcggcggatacctttataaatccagcgttcaccgctgtctgtcgaggaatcggtttcctggcgtttcccggaaatatgcagattcccccctacggtttctatttccagctcatcatctttccagccaggcacgctgacgctgagcaggaaattgctgtcgtcgactttctgtaaatcataagccggtaaagtgcccaccggcgtatcgcccgttaactggctgaaaagacggtcaatacgattaaagcgatcggcaaaaagagaatcagcaaataccgggagtgctgacaaggttttgagtgccataattaacctcctgaatatccattcaaaagctcaacataaaggcaagcattgcttgtccgctatataaaataatatctaaggcgcgtttttcaagacccgaaataaaaaatttttcttcgccagcctcagtgaaaaataagcatgccggtggcgaagttacccccgcccgacggcgggggctgtggcgcttctgagtcccataactgatgctgtttaacattcaataaacagaagcgacatgtatatataacttgtttaaggggatgtcaacgtccgaatcgctccccctttgccgtcgtgtattctccccatgaacagcgcgtttagcaacacggctgcctctcagggtccccttgccaacagcggcgcttcgacgtggcattcgccttgttgccgtcaaccggacgccgctggtgaaaatatacccggccgggtaaggaacctttcatccgacaccgtgcctaatgatctgcatacgcactttctgaggcaccgccatggccagcatttttatctcaaccaccctgttcgccctcttcgcgtcgatgttgatcggcctgggaatggtgtggaaaagcatttccaacaatcctgataactgattctgttgtacgccgttgctgttcaccctccgcagcggcgggtctaccccgcccctttttatcaatgaccaccccaggtttcgctcaggcgcaatctcctcaaggacccacgcctgcaaaaggtatttttgaaaaagcaattcatacagtgaataagtcattctgattaatatatttgagaccagaattaacgcatgcaatataagcaatttaagcagtttgtgccaaattagcgatcatgcccgcgcaacgctaaaaaataagccattgattaatataccattaattttactcgccagctcaaagtccaaaattagacttattgcatttattgattattagaaatatcctaaaggcatacgcatttaatgttctccactttaaatgcatgacaactttcacgatcgccatgactatgcctgatattttaattaacactgaaaacatatttcttaatcgcggaatttgcgaactgcttagcgagatcgcgaaagaagaacacatccgtgaaccgtattccgttgtagactattccacagatatattaggtccgattgatatgctgttcacagaaatggccgctggtgaacattatctatgccacccgtttttcaaaaaactccctccgcacacgtctatttttattttcgtcgccaccgacagcgctttgcaggttgaacggttaccactttgtctacgcgatgccacttttatcagcatgaacagcgacttgcgccgcgtaaaaaatcagattgcaaaacgtctgacggagtcgacaacatctagttgcggtgggctggaaaaagacagcagacgctgtgtcaaatgccctcggttaaccttgaccaaatcacaactttatattatcgatgcgatcagaacgggaatgaacaatcagcagatagcgcaagaactgggcatcagccataagacggtcttctctcacaaaataaatattatgaaaaaattccaaatagctaccaaacaagagttaacgagattctcatctgttgttcttgcgctttccgcaggaaggatcggttaacgtcggaatttattaaagcgcatcttcatttttcttctttctctaacataggacaggccaaaaaacaaagatgtaaacaataacaccaccgccaggactaataatagtaagttactcataacaaccttttaaaagataaagatgactttttaaataataaggggtggatgttttcaaatacaacccagcgacaaccatttcagacaaaggtaaaactccgtgcgataattctgaaagataataaaaagagtaaaaaggatttcttttatcagacaggcgttagggtaataacgatgaagcataaacggacaatgccaggcctaacgcccagcgtgtactgtcgcgacgtcaggcaagatgacggcctgaaataatggtctactgacgtggaaggagcgtggtatttgggcaggtgaaaacaccgttttgcagctgttctatactgttagtcagacatcacgctggaggtggctatgtgcggacgttttgcgcaagcgcaaagccgggaggaatacctggcgcatctcgttgaagcggccgaacgagatattgcctgggacccggcgcctatcgggcgctataacgtcgcgcccgggacaaaagttttactcctcaatgaacgcgatgagcaactccatctcgatgccgtttactggggctatgcgccaggatggtgggataaaccgccgctgattaatgcccgggttgagactgcagcctccagcaggatgttcaagccgctgtgggagcacggacgggcgatctgcttcgccgacggctggtttgagtggaaaaaggaaggaaatacaaagcagccatactttatccagcgtaaggatggccagccaatttttatggccgcgattggtcggactccgttcgaacgtggggaccatgccgaaggattcttgatcgtgacggccgccgccgatcgcggtcttgtcgatattcatgaccgtcggccgttggtcctggcgcctgaagccgcccgggaatggatgaggcaggatgtcaccggcgcggaagcggcggagatagccagcgacggagccgtttccgccgacgattttacctggcacccggtaacgcgggcggtcggcaatgtgaaaaatcaggggcccgaattacttgcccctctcatcccatgacaaacgtaatcaaagcggcggataacgcatcatgttcagcgaagagataattaaattttataccgccctggagtagtgccgaacatccgacggaacaaggctatgaaggcactcacattgtcatatcccagatccagcgctatcgccgtcactggcttgccggcagccagaagctcaagagccctgagtaagcgtatccgctgtcgccattcattgaagctaaaacccgtttcggctcggaatcgtcgcgtgagcgtgcgtgatgacatgccggcccaggctgcccattcttccaacctgcgcccgtcgtccgggtttgctgacagcgcctgcgcgattctgagcaatcggctatcttgcggcattggaagcccaagattaaccctgggaagggaaccaatttcatcaagaataacgccagctaaacgtttttgggacgcagtaagctctacaccttgccatgcagccgctcgcgttatcgcttcacgcagcagatttgtcattgagagaacagatggcttatcaggtagctcgccacaggctttggcagaaacataaacactccatcctgaatatggaccgtgcgagcgcaggccgtgcggaacacctggcggtatccagacggcatgtgttgccggtaccacccagcgacaatcaccgccatcgaccgtaagtagcccacgtatggcaccgattaactgcccacagctgtgatggtggcgtggagtctcccgtattacctcagactgacgtaccgcgacgagtaaagtgggtccctggggtgaaaataccggttcgaatggaatcaatggatcgtgcatattggcgtgtttgaggcgtttaatgtcttttataccgtactgaagccagttagtcgattgtaaagtattcatcactttcacagaggactaaccatcaaaatgattactattactagggtattggatgacattatcaaccaccaacagataccactggatcggatactcagtcgctattttagtcccggttatcggcagcgtactgataacaagtgggaaggattagatggctttgctcagcatgcgcgtagactccgggaaattatcgccttcgctaaaattgagttacatgacgaacttcgtaacgggaatctttatgccacaaggcatcgcgttctgtgcaccaggcgcagcggagaagaggtggacatggaagtttatatgttcgctgaaatagatgattccgggcgcttcattcgtatcgaagaagccacgctaatgcttaaagggagagagagcgataaagatttaggcagcgtgaggtaaaagaaatataaggttacgactagatcagacaaaaaaccgggcagcgcgcccggttatcttgtcagactaaaattgccctacgcactcaacccgcgatttttcagcatcggctcaatatgcggatcgtgtccgcgccactggcgatacagttcagctaaatcagtgctgttcccgcgtgataaaatcgcctcacggaaacgctgaccgttctcacgggtcaaaccgccctgctccacgaaccattgatagccgtcgtcggccagcatctgggtccacagataggcgtaatagcctgccgcatagccgccgccgaagatatgggagaaatagctgctgcgatagcgcggggggaccgccgccagatccaggttctcttcccgaagcaccagctgctcaaacgcgtccatctcctccggtaatgccgaggtcgacaggctatgccaccgcatatcgagtaacgcagcagccaacagctcgctcatgtcgtaccctttattgaaggttgccgcacgcaacatattgtcgcgtagcgcctgcggcatcggctccccggactggtagtgcttcgcgtagtgggcaaacacctgcggctggctggcccagtgttcgaagatctgcgaaggaaattcgacaaaatcgcgcggcgtattggtccctgagagactggcgtagcgctggctggcgaacagcccatgcagggtatggccgaactcatgaaacagggtgatcacctcatcccacgacagcagcgcgctttgccctgcctgcgggcggacgtagttgcagacattgtagataaccgggcgctgcgcgcgcagggtcgactgttcgacaaacacatccatccatgcgccgccgctctttgagtcacgagcgtagtagtcaccgtaaaacagcgccatcccttcgccgttgtgatcgaagatctcccagacccgcacatccgggtgatagaccggtatatcgaagcgctcaacaaagcgcagaccaaagagctgcgaggccgtccagaagacgccgtcgtgcagcacccgcccgagggcaaaatagggtttgagctgcgcgtcatcaatggcataggcagcccgccgcacctgctcactgtagtaaagccagtcccatgccgtcgcgcgaaaacccccgccttcgttgtcgatcacctgctggatgtccgccagctcacgttccgccctcgcccgcgccgccggggcgatctgacgcataaagcccaatgcctccgccggggaagccgccatttgatcggtcagcgcccagctggcgtaatcagcggctcccaacagctcagcctgctgcgcgcggatcgccgccagccgcagtaccaggtcacgcgtatcatgctcatcgccctgctgattgcgggtccagccggcggcgaagagattctcccgcgtttgccggtcgcgcagcgcaagcagctgcggctgctgggtggtattggtcagcgtcagcaaccagcggtcgctaagccctctttcacgcgctgcgtcagccgccgccgctatctcctcatcgctcaggccagccagctgatgccggtaatcaaccaccaggccgccgctttttgccgctcccagcagtcgctgctggaactgactttgcagcgtagccgcttcggtgttcagtgcgcgcagcgccgcctgctgctcgggagccagcgtcgccccggcatgtacaaaacgttgccacgtcagggtcaggagacgataggactcgctgtccagcgccagcgcgtcgcgctgctcgtagacgctgttcacgcgctgaaacaaggccgcattaagccagatgtcattccccagctcggcgagttcggcggaaaattgttcatccagtgattgaatataaggattggtatgggcgccagccatggcgaaaaagacccgcgtcacccgcgccagcagctgaccactctgctccagcgcctcgagcgtgttggcgaaactggccggctgcggattgtcgataatagcgcgaatttcggcccgctgctgccggacgccctcatcaaacgccgggcgatagtggctgtcgtcaatcacatcgaacggcggcgcctggtaaggcaacgtactgacgctaaaaaaggggtttcgttcggacatctttctctcctgtacaggctaatgctgtaagattaggcctctccttaaggggtcgcaatgatttccgttaccggtcgccgcctgtgcgtgctatggtatgaaaacacaaaaagcgttgaggaacagtaagatgattatcatggtcaccggcgccaccgccggttttggtgaaagtattactcgccgttttatcgctaacggtcataaagtgattgccaccggtcgtcgtgaagagcgcctgaagacgctgaaagacgagctgggcgataacctttatatcgcgcaacttgacgtccgcaaccgcgccgccattgagacgctgattgctgacctacccgccgagtggcaggctatcgatgtgctggtgaacaacgccggcctggcgcttggtctggagccggcgcaccgcgccagtgtggaagactgggaagatatgatcgacaccaataataaagggctggtgtacatgacccgcgccgtgctgccggggatggtggagcgcaatcgcggccatatcatcaatatcggctctacggcaggcagctggccttacgccggcggaaacgtctatggggcgaccaaagcctttgtccgtcagtttagcctcaatcttcgtaccgacctgcacggcaccgcggtgcgcgtgaccgacatcgagccgggtctggtgggcggcaccgagttttctaacgtccgctttaagggcgatgacgctaaagccgaaaaagcttacgaaaatacccaagcgctaacgccggaagatgtgaccgaggcggtctggtgggtcgccaccctgccgaaacatgtcaacatcaacaccctggagatgatgccggtgagtcagagctttgccggactcagcgttcaccgtcagggctaaccgtcagccacccggcctgcgggccgggtatgggcggaaacgcaaaaaacgcgtaaaatagtgcgcataaccccctaaaaagtaaccatcaatggccgcagaatcgcaactgaatccgacgcaacccgtcaatcagcaaatttatcgcatcctccgccgggatatcgttcactgcctgatcccgcctggtacaccgctgtcggagaaagaagtctccgtgcgttttgcggtgtctcgtcagccggtgcgcgaagccttcattaagctggcggaaaacggacttatccagattcgtccccagcgcggtagctacgtcaataaaatctcattgtcgcaggtgcgtaatggttgcttcgtccgccaggcgattgagtgcgcggtggttcgccgtgccgccggcatgattaacgaagagcaactttatcagctggaacagaatcttcaccagcagcgtattgccgttgatcggcagcagttaaacgactttttcctgctcgatgatgaatttcaccagaagctgtcgattattgccgactgtcagctggcctgggagacggtggaaaatattaaagccgccatcgatcgcgtccgctatatgagtctggaccatgtcacctctccggagatgcttctgcgccagcatcatgagattttcaccgcgctggaaaaacgcgatgccgaggcggtagaaaaagccatgagtatccatttgcatgaaatcagcgaatccgtactgctgattcgccaggagaaccgcgactggtttagtgaagaataagagtcagacggctgccggcatggccgacgcagccgttgtcattgaagggattatctaacgaccaataccggcgttttggcgtagcgcagaattgactcggcgttggagcccagcagatgggtggagatccctggtttgcgggaaccaatcacaatgacatcgaactcttcgttgttactgatagccagaatttcgtcacgcacgttgccaaagactacgcgggtatggatccgcgtcatggggatggcgaacagtcgcgccacctcgcgcatttttttctccgactcttcttccatataggcttcaaacttacgaatatccgccgtaaaaccgcgcaatagcgaacggctgctgttcggcagaacgttgagcaaggtgatctcgccattttcggccgaagcgagaaattccgcgtgacgcaccgctttatcgcttaaatccatttcaaagacatcaacaggcaataaaatttttttatacatggcccgtactccttttgcagagaaagttctttttcaataacttaactatgccattattgcggtgaaataccagtcattgttcggaaaaataacagctaattatctttagtaaatcagggaaatatagagttatgtatagacattgcgttcgatcatattctgcgtctgctaaaaccgatcgctagcaaaaaatagacatcagcggagtatcgtagaaataactgaagagccggtgtcgaccccgggaccgacaccggaaaaagattattgcgcggcggcccacgcggcgacggtagctttagccccctgccgctgcagcgctaagtaggcgcgggtcaccgccgtgacaaagcgtgactcctgcggcagttcgacgccgaaaatagcctcaatacccagcagcgctttgactcgcgcttcgccatcggcgctggcagccaccgcttgctggataaccggcaacaacgggtcgcatatctcgattgactggcccgcatcgtcaacgccgccaacgtaacgcatccaccctgccacgcccagcgccagcagtgtaaaatcacgctgatgcaccagatgccagcgtatggagtccagcatgcgctggggcaacttctggctgccgtccatggctatctgccaggtgcggtgcttcagcgccggattgcagtaacggtcaatcagcaaactggcatagcgtgacagatccaccccctgcaccttcagcgttggtgcctgttcgtccagcatcaacgacagcgccgcgcgacggtagttatcgtcctgcatacagtcgttgatatgctgataaccggccagatagccgagataagcgaggaacgaatggctaccattgagcattctcagcttcatctcttcgaaaggcaccacgtcggcgaccagttccgctcccgctttctcccactgcggacgtccggcaacaaagttatcctcaatcacccactgacggaaaggttcgcaggccaccccggccgggtcgcgcaccccggtcagctgggtaattttatcgagggtttcggcagtcaccgccgggacaatccggtccaccatcgtcgacggaaaggtgacattctgctctatccatgcggcaagatcctcgtctaaagcccgggcgtaggcgcagacgacgttgcgcatcacgtgaccattttccggcatgttatcgcaggacatcacggtaaaagcaggcaggccggccgcccggcggcgagataaggcctccaccactacccccgccgccgattttggctggtgcgggttatgcagatcggcggcgatcagcgggtgatcgagctgcagttcgccgctggctggcgaatggcaatagcctttctcagtaatcgtcagggagacaatggccacctgtggctgacacatcgccgccagcaccgcttcgagaccatcaaccccggcgtgcagcgcctgcttcaccacaccaaccacgcgcgcggtccaggcgtcggcggacatttcggcgacggtatacagcagatcctgctgctggagatcggcgatctgctgctcgccgccaatcagattaacttcggtgtagccccagtcgctgccgtgctcgctggccagtatatcggcatacacagcctgatgagcgcgatgaaacgcgccaaaaccaagatgaacgatacgggggatcagtgcgctgcgatcgtaggtcggcagcgtggcgttagcggttaagagggtgttttccatgatgactctcgttgttatgtagcccatcaaccattctcggggagaactctcgaggagaatgcctttgtgcctcaaccatctcacgcaattggtataacatctttgatttctgtcaactaccatacaagaagatctcgcctgataaagcacggggcacgtggctgcaatcgccgcagtgacaggatagcgcaggagaagaacatggcggccgcgcgtccctgcgggcctgctgttgacgaatcgccgagcgttgttaatcgatgcgagttttgacgataaagaagtagcacagcgccccggcaaaggtcaccccggcggcgatcaccagcgccagattgaaagagtgagtcgtatccactacccagccggtcacgatcggcgcgaaggaggcaaacacaaagctgccgaagttctggatcgccgccaccgaagccactttatgctccgccaccattacctgcaccagcccccaggcggacgtcccggcaaaatgaacgcaaaacagcgccatggagataaaagccaccgcctgggctggcgtggacgattgcaccaccagcaaggtgcccagcgccgacagcaccagaccgataacaatcgccgttttgcgggttttcgcctgatcgtagcctctgcgcgccagggcatcgaccaccaggccgttgacccacatccccaccgccgcggcaagaaacgggatcgccgccacccagccggtacgggccaggcttaacccctgctgcgcctgcaaatagccgggtaaccaggcgatatacagccagccggtgtagttcacaccggaaaagccgaggatcatcccccaggtagtccgccgtttaaacagagccagccattcgctaaacttcagcgccgggcgggccgcctcctcactggccagatactgctgctcctcctcctgcagggtaaactgccgacggttacggtagcccacataccagcacaggccgaccacgatcccggctaaaccaatcaccacaaacatcgttcgccaaccccaggccaactgcatgatgaccagggccggcggggcgatagcctggcccagcaccgtcgaggagttgaatattcccaccgccgtgccgcgctctctttgcgcataccagtcgttgatcgatttcacgccggctggcataaacggcgcttcgccgatcccgaggccaatgcgcagcagaataaaatgcgagaacgaattgaccatcccggtcagggcctgcatcgcggaccagaaaatcagcccggcgcccagcacaatccgtggtcccaggcgatccaacaaaataccggagggcagttgcgcgaagccgtaggagagcgaaaaggcggagagcagcaccccaaactcggtggcgctaaggcccaggtcggcgcgtatcgcctccccggcgacgctcagcgaagagcggtcaagaaagttgacgataccggcgataaacagcagcgtcagggtgatcttctgcacccgacggatgcgtaacggcgtcgccccggtccgggcggcaagagtctcgatagccatcgttgttccttacagagtcatatgaaataggatgtctgataagtaaggcaacaggtcgactaccatacaagaattagggttgaaaaaagcggcagggatcacacatgacgggcttaggcccgtccccaccccgccacgatgattagcatgccgcacagggcgatggccgcgcccgcccagtcataatgggttaatttgaccccatcaacgacccgcagccagagcaatgcggtacaaacgtacaccccaccgtaggcggcatatacccgcccgctggcggccggatggagcgtcaggagccagacgaatagcgccagcgccagggcggtggggatcagcagcagcggcgttgccccgcgcttgagccatagccacggtagataacagccgacgatttcacacagagcggtagcaaagaacagcagcgttgttttgagcattaaaagattcgtaaaagagacaaagcgttgaaccattctacgcgataatggcctctgccccacgctgttttgccggctatgcccgacaaaagagctgtagtaaactgaacctgagggttaacccatcacttaaaggaaatcgtgatgaacatgacactgaataaacgctggtgcctgaccgccattctggcgttaagcgctgtggtctacacctccagctcctatgccgccaccgaccggctggtgattgaatctggcgacagcgcgcagagccgtcagcaggcgtcgatggaaaaagagcaatggaacgacacccgcagcctgcgccagaaggtgaacaaacgggcagaaaaagagtgggataaagccgatgtcgctttcgacgcgcaggataactgccagaagagcgccaacgtcaatgcctattgggagccaaacaccctgcgctgtcttgaccgtcgcaccggccgcgcgatcaatccctgagccgctccctgaccacgctggcgcctgcgggcgccgcctttctgtaatcccttttccgttttgaccacaggaatctccatgaccgacgcgctacacgtcaaactccgcccgcttgagcgcgaagatttgcgctttgtccaccagctcgataacaacgccagcgtcatgcgctactggtttgaagagccgtacgaggccttcgttgagctctccgatctgtacgacaaacatattcacgatcaaagcgagcgccgctttgtcatcgaatgcaatggcgataaagccggactggtggagctggttgaaatcaaccatgtgcaccgccgggccgagttccagatcatcatctcccccgacttccagggaaaaggtctcgccacccgcgccgcacgtctggcgatggactatggctttaccgtgctcaatctgtataagctgtatttaatcgttgataaagagaatgaaaaagcgatccatatttaccgtaagctcggctttatggtcgagggtgaactgatccatgagtttttcattaacggcgagtaccgcaacaccatccgcatgtgcctgttccagcaccagtatctggccgagcacaaaacgtccgggccgtccctgctgaagccgacggctcagtaataatcgatacggtttttaatggtgtagtggcgggtcagcggcggctggacgctttcatcgatcacctgcagctcacagctcagcggattgtcgtgatcgtcgtagtcgcaggtctgacgcaccgtgcccagcgtgcgatcgttgaaggtgctgatggcggtatagtccaatttcttacgcggatcctttgacggcgttgaggcgacggtaaatcgctcctctttggcggtggtggtttttcccagcggatagccatcgctgtcatagcggtaggtggcggtggtctctttgccgcgtgcgctgataataaaaccgttatcatccgtctcccaactcaccccggcggcaggtatctccgccagctgacacttgccctgcaggcgcagccgcttctcgtgggtgcgcccgtcgacgtaatagttggcgtccagcagcagcgtggcgccggttttgttctccacatcttccagggtcagcagatcgaaacacccttccctggagagctgagcgctcaccttcttgaccaccacatcgtgttcatccagcagcgtctggctaaaatctttcaccggcccgcgcaggggatcaaactcaaactcattggaaaaactcgccatctccggggtgaaggcgtccggggcgcttttacggtcgcatgccgtcagcagcagcgctgccgggatcagccaatacaatcttttcacagacgattccttttgtgtacatccgatcatattagcaaatacaattgtttacaccagttctgctatgcttaaatctggataacatcgataaggagcgtaagatgaaactatccctctgcaccggcgctgcgctactgctgtgctccacggccgtactggcggctcccgactcctgtgaacgggtcaaaagcgacatccagcagaagatcatcaacaatggcgtaccggaaaccgccttcagcctggccattgtgccaaacgatcaggcagaccagcccggggttcaggtggtcggtcattgcgccaacgacaccttcaaaatcacctatacgcgtaacagcgacagtcccgccgaaaacgacgctcagtaagccctcttcggtttcaaatgaaagatcttatccctgcattgaccagggataaggtctactggctacccataacgtattatcgctcacccctgcgtctgttaatggcacagcggcccttctccgtacaacataacgatcatggagtgagcaatgtcgaatcaggaatctcccggcggcgtcagccgacgcgcgctactaaaatctacagccctcggctccctggcgctggccgccggcgggctgaccctgccctttacgctgcgccgcgccgcggcggcggtacaacaggctacaggcgacacaacccgcattgtctggggcgcctgctcggttaactgcggcagccgctgcgccctgcggctgcacgtgcgtgatgatgaagtggtttacgtcgaaacggataacaccggcgacgaccgctacggcgaccatcaggtccgcgcctgcctgcgcgggcgttcgattcgccggcgcatcaatcatccggatcgccttaactatcccatgaagcgcgtcggcaagcgcggagaaggcaaatttgtccgcatcagctggcaggaggcgctggataccctcgccgaccgcctgaagagcgtggtagcgcagtatggcaacgaagccgtatacattaactactcttcagggatcgtcggcggcaacatcacccgttcgtcgccttccgcgtcgccggtggcgcgtttaatgaactgctacggcggctcgcttaaccagtacggtacctacagtactgcgcagattgcctgcgccatgccctacacctacggcagtaacgacggcaacagcacctcggatattgaaaacagcaagctggtagtgatgttcggcaacaatccggcggagacccggatgagcggcggcggcattacctggtatctggagcaggcccgcgagcgctctaacgcgcgaatgatcgtcatcgatccgcgctacaccgataccgccgccggtcgggaagatgagtggatccccattcgccccggcaccgacgccgcgctggtggccggtatcgcctgggtgttgattaacgaagatctggtggaccagcctttccttgataaatactgcgttggctacgacgagaaaacgctcccggccggggcgccggcgaatggtcactacaaagcctatatcctcggcgagggcgacgacgggatcgctaaaacgccgcagtgggcctcgcgtataaccggtatccccaccgatcgcatcattaagctggcgcgcgaaatcggcatgagcaagccggcctacatttgccagggctgggggccccagcgccaggccaacggcgaactcaccgcccgggcgatcgccatgctgccgatcttaaccggcaacgtcggcatcaacggcggcaatagcggcgcccgcgaatcaacctacaccatcaccattgagcgcctgccggtgctggaaaacccggtgaagaccgccatctcctgctttacctggaccgacgccatcgcccgcggtccagagatgaccgccagccgcgatggcgtacgcggaaaagagaagctggatgtgccgatcaagttcctgtggaactacgcgggcaacaccatcatcaaccagcactccgacatcaataagacccacgaaattctgcaggatgaaagcaagtgcgaaaccattgtggttatcgacaactttatgacctcgtcggcgaaatacgccgacctgctgctgcccgacctgatgaccgttgagcaggaggatatcattcctaacgattacgccggcaatatgggctatctgatttttattcagcccgccacctcagcgaagttcgaacgcaaaccgatttactggatcctaagcgaagtggcgaaacgactcggcgacgacgtgcatcaacgttttaccgagggacgtacccaggaacagtggctgcagtatctgtacgccaaaatggtggcgaaagatccggcgctgccggcctacgaggatctgaagcgcatccgctcaaaaccccgtccggcaaaattgaaatctactccagccgactcgcagagattgccgcccgctggcagctggagaaagacgaagttatcagcccgctgccggtctacgcctccacatttgaaggctgggacgatccgctgcgcagccagtatccgctgcagctgtttggtttccactataaagcgcgcacccattccagctacggcaacgttgatgtattacaagcggcctgtcgccaggaagtatggatcaatccgcttgacgcggaaaaacgcgggattaaaaacggcgatatggtgcgcgtttttaatcagcgcggcgaagtccgtcttccggcgaaagtgacgccacgcatcatgccgggggtctcggcgatgggccagggcgcctggcacgacgccaatatgaccggagatcggatcgaccatggcgcctgcatgaataccctgaccacccaccgcccgtcgccgctggcgaaggggaatccacagcataccaacctggtcgatatcgagaaggtttaaggagtaaaccatgagcacgcaatatggattctttatcgactccgctcgctgtaccggatgcaaaacctgcgagctggcctgtaaggactacaagaacctgactccggaggtcagcttccgccggatctatgagtatgccggcggcgactggcaggaggacaacggcgtctggcagcagaacgtgtttgcctattacctctccatcgcctgtaaccactgtgaagatccggcctgcaccaaggtctgtccgagcggcgcgatgcataagcgcgaagacggttttgtggtggtcaacgaagaggtatgcattggctgccgctactgccatatggcctgcccgtacggcgccccgcagtacaacgccgacaaaggccatatgaccaagt

SEQ ID NO: 79 - DNA, 53463 bp, Unknown
  source: /note="Description of Unknown: MKP2_coc_1 Mutant Bacteria sequence"
  modified_base (1901)..(1901): a, c, t, g, unknown or other
gctttattgtaggtgggccagttggtgattttgaacttttgctttgccacggaacggtctgcgttgtcgggaagatacgtgatctgatccttcaactcagcaaaagttcgatttattcaacaaagcctttttttatatacgatctgacgaattcagcagaaggaaactcatcattcgtgacgaaataaaaattagtttccccattaatatagaaatgagtgtttactcacagaaagaaaatcaggagtaattattctgaagacagataatacagaagtcgtacagcgcatttaactcacttctcaggaggttaatcactctctatttgtggacaaccgacatgtcttaaggctctggaataacgtgttgatatttcgatgcgtagcatgcagcggaatattaccggatcaataaagcaggaagaggcgttttaattctttccgcaggatgatagtagggtgactgccatgtctgattataatgaaaaaagtgcgatctccgcacttctcgcaggtcattgttccgatccattttccgtgcttggcatgcactcaaccgatgcgggtctggaagtgcgcgcattattacccgatgccaccgatgtatgggtgattgaaccgaaaaccgggcgcaaagtcggtaaactcgaatgcctcgacacacgcgggttctttagcggcgttctgccgcgccggaaaaatccttttcgttaccagctggccgtcacctggcacggtcagcaaaacctgattgacgacccctatcgctttggcccgctgctgcaggagcttgatgcctggctgctcgctgaagggactcatctgcggccctacgagacgctgggagcccatgccgacaccatggacggcgtcaccgggacgcgtttttccgtctgggcgccgaacgcccgtcgtgtgtcggtggtcggacagttcaactactgggacggccgccgccacccgatgcgtctgcgcaaagagtccggcatctgggagctgtttgtccccggcgcgcataacggccagctgtataagttcgagctgattgacgcccacggccacctgcgggtgaaatccgacccgtatgcctttgaggcacagatgcgcccggaaagcgcgtcgcttatctgcggcatgccggaaaaggtcgaacagccacagtcccgtcagcaggccaaccagtttgatgcaccgatttcgatttatgaagtgcaccttggctcgtggcgccgccacgccgataaccatttctggctcagctaccgcgagctggcggaccagctggtgccttacgcgaagtggatgggcttcacccatctggagctgctgccggtaaacgaacatccgttcgacggcagctggggctatcagcccaccgggctgtacgcgccgacccgccgttttggtacccgtgaagacttccgctacttcctgaatgctgcccatgccgcgggtctgaacgtgatcctcgactgggtgccgggccacttcccgtcggatgactttgcgctggcatcgttcgacggcaccgcgttgtatgaacacagcgacccgcgagaaggttatcaccaggactggaatacgctgatctacaactacggtcgccgtgaagtcagcaactttctggtcgggaacgcgctgtactggattgaacgcttcgggatcgacgccctgcgcgtggatgcggttgcgtcaatgatctaccgcgactacagccgcaaagagggggagtgggtgcccaatgagtacggcggccgggaaaacctcgaagcgattgaatttctgcgcaataccaaccgtgtgctcggtgagcagacgccgggagcggtcacgatggcggaggagtccaccgacttcgccggggttacacgaccgtcttcgacgggcggtcttggcttctgnttcaaatggaacctcggctggatgcatgacaccctcgactatatgcagctcgatcccatctatcgtcgttatcatcacgacaagatgaccttcgggatgctctacaactacaccgaaaacttcgtgttgccgctgtcacacgatgaagtggttcacggcaaaaaatcgattcttgaccggatgcctggcgatgcctggcagaagttcgccaacctgcgcgcctactacggctggctgtttgccttccccggtaaaaagctgctgtttatgggcaacgagtttgcccaggggcgggagtggaaccacgacgccagcctcgactggcatctgctggaagggggcgacaactggcatcacggggtgcagcgtctggtgcgcgatctgaaccatacctatcgccaccataaggcactgcacgaactggattttgacccctacggctttgaatggcttgttgtggatgaccatgaacggtcggtgtttatctttgtccgtcgcgataaagccgggaacgagataatcgtggcgagcaacttcacgccagtaccgcgtcacggctatcgcttcgggattaaccagccggggcgctggcgtgaagagctgaacaccgactcgatgcactaccacgggagcaacaccggcaacggcggctgcgtggcaagcgaggcgatcgccagccacggtcgggagcattcgctgtcggtgactctgccgccgctggcgacaatctggctggtacgggaatctgcagggcaataaaacgcgcagctgatttattgcagctgacttattaccggaggtgatcacttctgaattattttgcagaagagtgaggctttttcttcattattttcttttatggcttttatttaatagcaggacattattatgagtaaacttgaatatactgacaacttaatgctgtcgcgccagttaccgcttaaatccgtggccctgatcctcgccggcggacgtggcacacgattaaaagacctgaccactattcgcgcaaaacctgcggtgcatttcggcggtaaattcagaattattgattttgctttatcgaattgtattaactccggaataagacgtatcggggtcattacacaatatcagtcccattcactggtgcagcatattcaacgcggctgggcattctttaacgaagaaatgaatgagttcgtggatttattaccggcgcagcagcgggtgcatggtgagaactggtatcgggggacggcggatgccgtgacccagaatctggatattatccgccgctatgatgcggaatatgtcgttattctggccggggaccatatctataaacaagattattcgcggatgctgctcgatcacgttgaaaaaggggcgcgctgtaccgtggcctgcctgccggtcccggttgaagaggcaagcgcttttggcgtcatggccgtggatgagaatgacaaaatcattgaatttgttgaaaaaccggctaatccgcccaccattcctggcgatgaaacccgctcgcttgccagtatgggcatttatgtgtttgatgcggaatatctctaccagctgctggaagacgacgatcgggatgaacactccacccatgattttggcaaagatattattcccaggataacggcggcaggtgaagcgtatgcgcatccgttcccgcgctcctgcgttcagtcggataataatgccgagccatactggcgcgatgtcggaaccctggaggcgtactggaaagcgaatctggatttagcctcagtagtgccagagctggacgtttatgaccgtaactggcctatccgtacctatgtcgaatcgctgcccagcgccaaatttgttcaggaccgttccggcagtcatggcatgaccatgaattctctggtctccggcggctgtattatttctggctcggtggtggtgcagtcggttctattttccagagttcggattaactcgttctgtaatattgattcgtcggttttattaccgggcgtctgggtcggtcgctcctgcaggataagacgctgcgtgatcgaccggggatgcgttattccggaggggacggtgattggcgaaaatgccgttgaggatgcgcgacgcttttatcgttcggaagaaggcatcgttctggttaccaaagaaatgctggacaaacttgaggtatgagcccatttgcggaaaaagcgtgtccggcggcagagaaaatattgccctgtcgcgggtcgtctctgtggctgaataataaggagcatacatgcaagttttacatgtaggagcagagatgttcccgctgttaaaaacgggcggactggccgacgtcaccggcgcgctcccggcggcgcaaattgccgaggggctggatacccgcgtgctgctgcctgggtttccggcgatccgcaacggggttcaggatccgcaggtggtggccagcagggagacattcgccgggcggatgacgctgctgtttggccattttaacggtgtgggcatctatctgattgatgccccgcatctctatgaccggacgggtaatccttatcataaccagcagatgcaggattatcctgataacgtcctgcgtttcgcgttgctgagctgggtcggggccgagcttgccggtggtcttgacccgttctggcgtcctgaaatcgtccacgcccatgactggcacgcgggtctcaccccggcttatctggccacccgcggcaacccggccaaatcggtgtttacggtgcacaacattgcctatcaggggttgtttcaggcccggcatatggcggagatcgcgttaccgtggtcgttcttccagatgcacggggtggagtttaatgggcaaatctccttccttaaggcgggtctctatttcgctgaccatatcaccaccgtcagcccgacatatgcccgtgaaattaccgaaccacagtacgcgtttggtctggaagagctgctgcggcaacgtcagcgggaagggcgactgtcggggatcctgaacggggttgacaaaaatatctgggatccgcgccgcgatccgctgctggcagcgccttacgaccagaattcactggcggagaaagcgaagaacaagcagcagctgcagacgtcgctggggctgaaggcggacgatcgggcgctgctgttcaccgttgtgagccggctgaccagccagaaggggctggatcttctgtttggcgcgctgccgggaattatatctaagggagggcagctggcgctgctgggatccggggacccggatttgcaggcccgttttctgaccgccgaggcgcaataccccgggcaggtgagtatccggatcggctacgacgaggcgctgtcgcatcagatgattggcggcgccgacgtcatcctggtgcccagccgttttgaaccctgcggtctgacccagctttatggtctgcgctacggcacattaccgctggttcgccgtaccggcggactggcggataccgtcgccgactgttcgctcgaaaaccttgttgacgggctcgcgaccggatttgtgtttaccgacagcgagacggaatcgttattacatgctatccaccgggccagtgtcctgtggtcgcgtccctcgctgtggcgttacgtgcagcggcaggcgatgagcatggattttagctggcaaagtgccgcaaagtctttccacctgttgtatcagcgtattatttaattgctacggataagaaaaatggaaccacgcataagttatatttcacccaggctgaatgaagaagcgctgcagcatgctatcgcttataacctcatgtttattctcggtaaagacccttcacttgccaataagcatgaatggctcaatgctacgctgttcgccgtgcgcgatcggctggttgagcgctggttgcgggcgcatcgggcgcggatctcgcagcaggcgcgccaggtatattatctgtcgatggagtttctcatcggccgtaccctctcgaatgccttactgtcgctgggcatctatgaggatgtgaaaacagcgctggccgggatgggtctggatctggaagagctgattgacgaagagaatgacccgggcctgggcaacggcggtctcggtcgtctggcagcctgttttctcgactccctggccacgctggggctgccaggacgcggttacggcatccgctacgactacggcatgttcaagcaaaacatcatcgacggccggcagatggagtcaccggactactggctggagtacggtaacccctgggaattcgagcgccataaaacccgctataccgtgcgctttggcgggcgcattcagcatgaggggaaaaactcgcgctggctggaaaccgaagagatcatcgcggtggcctacgatcagattatcccgggttatgaaaccgatgccaccaacaccctgcgcttgtggagcgcccaggccagcagcgagattaacctcggtaaatttaatcagggagattacttcgcggcggtagaagataaaaaccattccgaaaacgtctcccgggtactgtatccggacgactcgacctactccgggcgcgagctgcgcctgcgtcaggaatatttcctcgtttcggcgacggtgcaggatattctttttcgccattaccagttgtatcaaacctatgacaacctggcagataaaattgctatccacctcaacgacacccatccggtgctgtcgatcccggagctgatgcgtctgctgattgacgaacaccgcttcagctgggatgacgctttcggggtgacctgtcaggtcttctcctacaccaaccataccctgatgagcgaggcgctggagacctggccggtcgagatgctggggaaaatcctgccgcgccatttgcagattattttcgagattaatgactattttctgaaaaccatgcaggagcactatcccgatgatattgcgttgctgagccggacctcgattatcgatgaatccaacgaccgtcgcgtacggatggcctggctggcggtggtggtcagttacaaggtgaacggcgtgtcggaactgcactcccggctgatggtggagtcgctgtttgccgatttcgccagaatctttccgcgccgcttcaccaacgtgactaacggcgtcacgccgcgccgctggctggctgccgctaacccgtcccttgccgcggttctggaccgccatatcggccagacctggcgaacggatttaagccagctgagcgaaatgggggaatatcaggattatccgctggttaaccaggccgtcagcgccgccaaactggcgaataaacagcgtctggccgattatatcgcccgtcagctgggcgtggtggtgaacccgaacgcgctgtttgatgtgcaaattaaacggatccacgaatataaacgccagctgatgaatgtgctgcatgtgatcacccgctacaaccgtatcaaggcggacccgcaggccgaatgggtgccgcgagtggtgattttcgccggcaaagccgcgtccgcttaccacacggcaaaacagatcatccatctgataaacgacgtcgccaaagtcatcaacagcgatccgcagattggcgacagactaaaggtggtgttcattcccaactacagcgtcagtctggcgcagatgatcattccggccgcggacctttctgagcagatttcgctggcagggactgaagcctccgggaccagtaatatgaagttcgccctcaacggtgcgctgaccattggcacgctggacggcgccaacgttgagatgttggagcacgtgggtgaggacaatatctttatcttcggtaataccgctgcagaggtcgaggcgctgcgcagcaacggttatcagccgcgtgattactacgaccaggatcaagagctgcgccaggcgctgacccagatggggaccggggtgttcagcccacaggagccgggccgctatcgcggtctgctggattcgctgatcaactttggcgaccactatcaggtgctggccgattaccgcagctatgttgactgtcaggacaaggtggatgcgctctaccgaaccccggaagagtggaccgccaaagcgatgctcaacataacccacatgggctatttttcatcggaccgtacggtgcgggagtatgcgcaaaagatctggtatatcgacaaaacgcaactctgagcgcgtactgacaaccaggaaacgccggggcgggtggcaggagaccggccccgtcgatgagcgacccggcagcaacacataaataagcctgacggatatgacaggagagaaaaatgacggacagtaaacgcgcaggggagcctgcacaacagagtgatttgattaacgtcgctcagctgaccgcgcagtactacgtactgaggccggaagcgggcaacgcggagcatgcggtgaagtttggtacctctggccatcgtggcagtgcagggcgccataacttcaatgagcagcatattctggcgatcgcgcaggcgattgcggaagaccgcgccaggaacgggattaccggtccctgctacgtgggtaaagatacccacgcgctctccgaaccggcctttatttccgtactggaagtgctggcggccaacggcgttgatgttatcgtgcaggaacacaacggtttcaccccgacgccggccatttccaatgccatcctggtgcacaacaaaaaaggtggtccgctggcagacggcatcgtgatcacgccgtctcataacccgccggaagatggcggtattaagtacaacccgccgaacggcggcccggcggataccaacgtcaccaaagtggtagagaatcgcgctaacgaactgctggcctcgggtctgcagggcgtcaggcgcatctccctcgatgcggcactggcatccggtcatgttaaaaagcaggatctggtacagccgtttatcgaagggctggcggatatcgtcgacatggcggcaattcagaaagccggcctcaagctcgggatcgatccgctgggcgggtccggtatcgaatactggaaacgtattgccgggcactacaagctcgacctgactatcgtcaacgatcacgtcgatcaaaccttccgctttatgcatctggataaagacggcgccattcgcatggactgctcatctgagtgcgcaatggcgggcctgctggcgctgcgcgataagtttgacctggcttttgctaacgatccagattatgaccgtcacggcatcgtcacgccggcagggctgatgaacccgaaccactatctggcggtggcgattaactacctgttccagcatcgcccgcagtggggccaggatgtggcggtgggcaagacgctggtctcttccgcgatgatcgaccgtgtggtgaacgacctcggccgcaggctggttgaagtgccggtgggctttaaatggtttgttgacggcctgttcgacggcagcttcggcttcggcggagaagagagcgcgggcgcctcgttcctgcgttttgacggaacgccgtggtcgaccgacaaagacgggatcatcatgtgcctgctggcggcggaaatcaccgccgtcaccggtaaaaacccgcaggagcactacgacgaactggccgcccgcttcggcgcgccgagctataaccggctgcaggcttcggccacttccgcacagaaagcggtgctgtcgaagctgtcgccggaaatggtcagggccagtcagctggcgggtgacccgatcactgcgcgtctgaccgccgcgccgggcaacggcgcatcgattggtggcctgaaagtgatgaccgacaacggctggttcgccgcccgaccgtcaggtacggaagacgcttacaagatctactgcgagagcttcctcggggaagcacatcgcaagcagatcgagaaagaagcggtggaaatcgtgaatagcgtgctagcggcgcaccagtagagcagttgacgtactccgctgagccggagtacgtcatagttacccggcgacaccaatacaggcaccactttgtcagaacataaggaacgggacgcttcgcaaaaggtattgctgcggggactatatgaatatctatgttattaccaataataatttcatgcttgtaggtctgaaatgtatgttcagcgacaacagcctctccgtcaacagggttgtgttttcacgggtcagcgatattgccttcagcaacagcgatgtggtgattgtggagtcagagctgaacaccggcgatgccgaacgtctcaagtacctacacatttcaccggtcaatcttatctttttattaaaaccggcgtcaggaatgagcgggacagggcgtgaagcggtatgcattgacactgaattaagcggtaatgaatatctcatgatgaggcaggcgtttaaaaaaatggggatcaatctgaagagggacaagttgtcatttaccaaaagagaaacacatgttatcaatatgattttaaatggttattcgatagatgaaatttcccgtagcctgctgatctccaaaaaaacggttcagtcttttgtcggtattgttttgcataaactgaataccaccaaaataagtggaatataccgcaaaaaaaatctcatcatcgacagttttgccaggaggagcctgcatcgttaggatgccctataaactaatgatctgcttatggaaagtcactatttcatatattaagtttcaactaaatttgttataaattattttatgttgttatgttgaacggggtttgattattggtatgcttcagaaaaaataaacatacatcatgggtgctaacatgatgaaaatatatgaaaccatagtcatcaaatgatttaagcatacaataaataatataggattatatcctctatctgtgaatggtgggcggcagaggaaaaacgggatatatatttatgcatttcatctttttattataaaaaactgttatgtaaattctgtagcgggagggggtatgtttagtgaagacgcacactatgaatttctaaaaagatattacagagcggagttttttgaaggaagaaatggttccatttggggaataaattattcttacaatttggcaagggtgggtatgaatatgcttgaaagatatggctatgggataatattaaagcatgaatctatcactggtgaaaccatttactatgatcgtagtctgacgatactatttggtgacagaattacacaggccctgggaggtcagtattgcaacagagaaatgagagaataatgatttaatatattttttaatcgctcgttaaacattggaacttttctcagaacgtgactgcaatgtcttcaacgcatctaacatgtcgtcgccgttcagtgagcgctgcgattatttctctgttggttttctgcgccgccgcaaagagccatcaccggcagggatcgcctgtgaacggttgttatcgcgtttatcctgaacatcaatctaaattgaaatgtccgcatgtaggttatgtttcagcctttgccgaagatgtctttactccgggtctgaagttgctgcagggcttccagcatgtcgttatggtccagacttcgttgtgatttcttgccgggttgtttctttctgcgtgaggtctggccgtccagtgatggcagggcctgtgagcgggtgttgtcccgtttgtcctgaaccagctttatcatttccagggcacgtcccagacgcttgttgtcgatgatggcgccctggtccagttctcccagtcggtcgtaagtggtaaagggcagggaagtgccgctggcccggagctcaatgtcaccatccgggtattgccatacctcgatgtacttcccctgaaaacgccggttttcttcattatcttcaagcagataaagctttttatcatactgtaatgtcaggtttttcgagaccttacgctgctcgcgccaggtgaatgtcgcctgcaggttttcgccattatccagctggcgatgtacgtcaaaatcgtgacgtggcggctttgcaaaccgacggttgtaatcttccatgaactcatcagcaaaggcgtttgcagcctcaggtgtgctgataccgcggagccgcagttccttgaccaggcggtcctgtaatgtcagatgagcccgttcaacacgccccttggctgaactggtgttggcacagataccagtgatattcagctcgttcatggcacgaccaaactgagtctggccatctccgccggtggcctgcttgttgttgatcctgaagacgctggctttgtcgctgtagaatgccagaggcttaccgtagcgctccagatatccccgggtggcttcaaaataggtgaacgtggactccgaactgacgaacagaagctgcatcaaccgacttgttgcatcatcaacgtaaacgagcagcgtgcaggccggaccacggtcctcgaaccagcgatgttcactgccatcaatctggatgagttcgccggtgcaggcccgacgtgggcgtggctgatgcacacgaggtggccgtaacttacgagggatccataaaccatcccgggtcataagcttacgtacagtctctttagcaagataaaggtcatgaatctcagcaagcttctcgcaggccaatgtcgggccaaagtcggcgtaacgttcgcgaatgatgcgcagcgcacgctcagcgaggccaggcatcaactgtcggttactaggctgaccacgtcggcggttaacccgcgatagcggtccgtgttcacgatagcgctcgagtagccggcggcagtgcctgtcagagatctcaagtcgggttgctgcaagacgcgtggtaagacgccggtcgataacgtcctgcaggatcctgagtcggtttacatcgttcatcgagaaaaactccgttccgtatgccgtcatgagtctcatcctttgaaagcagcgatcgcggtggcgagactgtagcgcggacatgtctatttggtcagagacggacatctcaatttagctgttacactgtatgtctagccaatgttgaaatgtcgtgctgaaaacaaagctgacctgacgtcagtggagagtctggacaatgcctttttaaggttgagtcaggctttggaggaagaacgtggttgccaggttttctcggctatcatcagtttacgtacggtctcttttgaaatccggacaccgtattctgtggtcagaattcgccagatggctgacggattcataccccggccgcgtgagcgaataagctgcagtgcctgatctctgatggtggtgtttaactgatgattgccgggctttccacggcgccggctgaccagaccggctggccccagctcgcgatagcgcttaatcaggcgggagcactgacgacgggtgagctccatggactctgccacttctgccagcgtgatttcccgcgccatataggcttcaatcaaatccaggcgtagcgcttcgtgaagtgtcaggagcactggtttgttgtcgtccatttttctctcatctgtcggccatatcagatccacaggtgagggaagggctcatcgcttcaggctggggataaaatcctgcggactggccagcaccgggttgatcgccctgagctcttccagtgcacgctcctgagcgcgcctgcggggcatttttgtactgcgcattcgctttccttcagcctccagctcgtcctgtttctgctgtgccagcctcagaacggcacccagtcgtttgttatcaacaaccgccccctgatcaacgcaggtcagtttatcgaaaatcttataacccagtggccggtgctgatgccggaaagtaatgcttccgtcagggtaatcataaacggtaattttttcacctgctatgcgcgtattttgttcggtgggttcaatgatatacatgactttatcatactgaaaagtcagtgctttcgataaggtccgtagctcctgccaggcgaagatatcattcagctccagtggactctgtgtgaccgcacggtgcagatctttagggtattttgccggccgggagaaacgacggttaaaatcagacatgaaatgttcaatccactgattggcttcagcaaccgagctgatgttctgcaggcgcatctctttaatcagtcgatcctggagcgttttatttacccgttccacgcgaccttttgcctggctgctgttggcacaaatcaattcgatcgccagttcccggagagcccgtccgaactgggttgtgccggtacgtcggctctcgggtccgctgaccctgaacaccgcatgcttgtcgctgtaaaatgcgacaggtttaccatgtttatcaatgtattgccgggtagccatcatgtagtcaaacgcgttttctgaatcacagaatcgcaggtgcatcaggcgacctgtggcgtcatccatgaagaccagaagacagcattttggggctcttccttcgaaccagtcatggtgagagccatcgatctgaaccagttcgccgaaacagtcgcgacgatagcgcggctggtaaacccgggttcgccggcgggaatgaggacgccagagaccgtcggctgtcatccagttacggatggtttcaacggagagatatatatgatggcgttcagccagtttttcggttgcgagcgttgggccaaaatctgaatagtggcaccggatcaaatccagggctttacagcgtgtttcttcatcgatccggttgtttgcaggacgtccacggcgggaagatgcaaatgcggttgcgccatctgtccggtacagacgcacaagacgctgcacctgacgaacactgagcttaagtatgtctgctgcgtcgcgctgaagcaaagcccggtcaaatactcgctgaatgatgccaagccggtaaagttctttgtctgtcatagtcaccaacataagatcgcggtcctgtgctgagcaaaatgaaggcttagcgtacacgacgcgtgtgaattgtgctgagacgacaataacgctttgtgctgacaatacaggtgcgcataacaaagattatgttaaatattaaaataaataacataaaaatcaatatgttaagacggtaaccagctactttcccattccagcaaccagtcatggaagctttagaaacagagtcctctcatgagtttgtgatgccttaaatccatggtgagcatagaaacctttggcttcttcagtaagcgcatgaaccattatcgcacgaaccccaatgttctcagctacgcgataacaccgtagaactgcatcgtggagtaaatcggcgccaaccccttttccgtgcaatgagacatctaccgccaggcgagcgagtataatcaccggtataggatctggcatgttacgccgaagactacctgtcgcttccgtatggttaacgctaccggtggccaaagagtaaaaaccagctacttgcttcgtacccgtcttgcaaacaacgaacgttcgggcagcgccaagagcttgattttttaaacctctctgttttagccattcatcgaggactgtctctccactgacgaactcagccagctgatgagagctggataacggctcgggcgtggttatacgtcccactgaggtttccttgccagtagtttattaatggcgggctcatcctcgactggtgcatcgagcatatcgatgaactctgcatactgttcgtcgttaaaattgaaaacacggcgatcaaggatcacattctccgcagccttgcaggccatctccaggataaagtcggttcgcgatttatgaaggatctctgcagcagcatcgatgagtgctctctgagactctttagctcttaggttgagttgaacatctgatttcatacacacctctcttgtatagcaattgatatacaagaataacacaacacgaacgtatagcaaatgctatacacttcaaagtaccgataatgcgttttatgttaaatatcatacatttaatgaaagatgatggctgatcttctgcaatagtcagctcattatcgctgcaggcgtggcttcattctggatagatggagtcttttctggcattaatgccctgaagacgaacacggtcgttatcaggcaaatggatacccatcatgcgaagaataaagccgcgccacccccggttaacctgaccgttatagtcatacaggtctgcattttcttttttaagctttgaccattcatgcatgagtgttagtgcatcgagctcggtgatgtgcttcacttcatcgccgatacgtactgtgttaatgcctcttcccgtcatgatgatcccctccggcaatatcagtttcagattaacgctgttatgatgatgatttaactacacactaaaggcaatctaacgtttaatcatacctctgataataaagaacatcatggttaatgaaaacacaatcagaagccagccaaagggtttggcatcaaaaacagtagtgatgcaatcattagtacaggtaaccaacttcggggtgacaatagaaattccccacccaaaaataactaccatagtgcctgctactgcggctaagaaaaaagtggtgaagaatgcgcatccgactacaagtaacaatccaatcagttcaaatatcatattcatgattgcgctccaggtgagataactgcgaacagactgatgctggctgttttatttaacatatttccagacgcctgcaggaattttatcataaaacttccccattgccatttccgccagccggtgatccactgcggcattaaagtgctcaagttcgtcatccgtcagggaatatttatttttttctattatcctttccagagtttccttagatgtacagcggcgtagtcttaaaatccattcctgtttcgtcattggttttttatatcctgaggtgtcccggtaatttcattttggaagaagatttcctttcagccggttatgagtgaaccattttgcatatatgatgtaacctacaaaagttaagagtgcggacagactatatatccctagaacaggtaccacgtgatgaaaacgtatcatctgaccggattcatctgccagactcattaatacattgctgtatatttcagtctgaaaaaactcgtagtaaggtaccatcactacatgaagaaaaaataaattaagcagatacgtcagagaaaacgcgtgttcctgcccgttatagggcgcatactgcgcaaaggcgaaaatccagcctgtgaaaagcagaaaacacatcgtgaaatacaccaccacccatatcgctgttttcatcactgcccctcagttatataatttttctgtaacgcaaatttcttcaggcgttatggcccgtgccgttctgcttcagataatcactgatgctcaggccggacaagcgaattttatccgaaatctccctgaactgctcctcccagccgtcctgcagctccctgattgccgcgatctggaaagcaacactgaaaggcgttctgcccagtttctcggaaagccagaaaagatgcgtaccgatctcttcatccgggaccggttcaagcgcatcactcagtaaggttttttcgtcttcctgccagggatgaccggctcgcggaaaacgcggatcaggctggcggtcttttttctcccttttttcccgtctggcaacggtcggcgcttcgccttttttcatgctgacgcgtgctttcatggcgccgatggccgccacggcccgcaccagggtttcacgctcctggcgcgtgagcaggctgtcctcacaaatcagggtgttcaggttatcgatcagcgtattcagtccgggttcagtgactttcattttatgctcctgttccttgtgtggtggcgatcagtcccggctctcattcacctgaacgatgaccggcaggcctgcatcaaaacaggcctgataccagctggccacctgcaggggatcgccctcttttatccggcgtatgccgccggcatccgtcagctgcaggcaggtggtaccgtccagacggatcacgtaggccgcttccctgatggtgtaatggccgtcacccagctgcagctccaccgcgtcaccggcagccgtctggcgtaacggcagacgccggacgtcggtcagtcgttgtcgtgccgtttcagcctcgcgttctgcctggaagagcggttctgcaatgccgcgaccggcctccgtcagctcgacggccagctgcaggttcggcgcgcgcagggtgcgcagccagcccgcggcttccatgcgccggcaggaggcgcgcaggttcggtccgtacaccggggcgtccccgccctgctccagcacccgctcgatatcccgcgtcgccaccggccccggacgtttcgcatcgagggcggccagcacaatcagtacccgtcgctgcagcggcgacggcctgcgggaggttgttactgctgccatgaacgttgttctgctgtgggagcgcgcaggagcattccggtgaggcgcagatggtccctgtcggcgacgtcttccggggcacggcccgccatcgccaggtggtaccagagttcgatcgcgctgcgtgcccgggcaatctccgcatcggcatcattgcagtccgcacggtttgcccgttcaagacacgcgttaataaaatcttccgtgtcgccaagcatggtttcataactcaggtgaaagaatactttctcatccatcctgcacgctccgtctgattatgtgattaaagaagataaatcatattatatatgatttgttattcatcatttaaacatcatatcagatattattatgcggttaatgataaatatcatatcaagtatgattttgtgagtgtgacttaattatcatatcacttaccggtttcccgccgcgcagatccgatttctggctaagtcggatctctgtaacacacatgtattttccccggaaagtaatggacgtataccagcgtgacagcgtcatctgacactttcacacattcgattttccgaatatatggttgttttttttgtcttcgggcgtatgctttacgcaaccgaacaggaggaataatgccccttacagcccttaagcttttcaaaaacctgtccgatgaaacccgtctgggtattgtcctgctgctcagggagctgggagaactgtgcgtctgcgatttctgcacggcgctggatgagtcccagcccaagatctcccgtcatctggcaatgctccgggaaagcggtctattgctggatcgcaagcaggggaaatgggttcattatcgcttatccccgcatattccttcctgggctgctcaggtgattgagcaggcctggttaagccaacaggacgacgtacaggccatcgcccgtaagctggcatcggcaaactgctctggtagcggtaaggctgtttgcatctaaaaaatttgcctgaacatatgtgttttttcgaatgtatgaggtattcagaatgaagacgttaacggtgtttgacccggcaatgtgctgcagtaccggtgtatgtggttcagatgtcgatcaggttctggttgatttttctgctgatatgcagtggctgaaaggacgtggcgtacaggttgaacgttacaacctggcgcagcagcccatgagctttgttcacaatgagaaagcgaaagccttcctcgatgcatccggcgcagaagggcttccgctgctgttgctggacggcgaaacggtgatggctgggcgatacccaaaacgcgctgagctggctcgctggttcggtattccgctggagaaggtagggttagctcccaccagttgctgtggtggtaatacttcctgttgctgaatatgtcaggaggacatatgaaattattacagaatatcccgccttacctgttttttactggcaagggtggtgtaggaaaaacttccatttcctgcgcgacggctatccaccttgccgaacagggtaagcgggttttgctggtcagtaccgacccggcctccaatgtcggtcaggtattcgatctggctatcggtaacacgattcgccctgtgacagcagttcctgggctttctgctctggagattgacccgcaggaagccgcccggcaatatcgggccagaatcgttgatcctatcaaaggtcttctgcctgatgacgttgttaacagtatcagcgagcagctttcaggagcctgcaccactgagattgcggcgtttgatgagttcaccggcttattgacagacgcttccctgctgacccgtttcgatcacatcatttttgataccgcgccgacgggccacacgattcgccttctccagcttcctggtgcctggagtagctttattgaaagcaatccagatggtgcctcctgtcttggcccgatggccgggctggaaaagcagcgtgagcagtatgctcatgcggtagaggcgttatccgaccctgaacgtacccgcttggttctggttgcacgactgcaaaattctacgctgcaggaagtcgcccgcactcatgaggaactggctgagattggcctgaaaaatcaatatctggtgattaatggtgtgctgcctgaagccgaagctgaacatgacgccctggccgcggcgatatggcaacgtgagcaggaggcactggcaaatcttcctgccggtttatctgagctaccgacagataccctgttactccagccagtcaatatggttggtgtttcagcattgaagggactgctggctacccgttctgaggcattaccgctcccggtaacgaacatcctgtacacgcctgaaaacttatcactctctggcctggtcgatgatatcgctcgcagtgaacacggcctgattatgctgatgggcaaaggtggtgtagggaaaaccacgatggctgccgccatcgccgtcaggctggccgacatgggatttgacgtgcatctcacgacctctgatcctgctgcgcacctgagtacaacgctgaacggcagcctcaaaaacctgcaggtcagccgcatcaaccctcacgatgaaaccgaacgctatcgccagcatgttcttgagacgaagggaagagatctggacgaagcagggaaacggttactggaagaggatttacgctctccctgtactgaagaaattgccgtgtttcaggccttctcccgtgtgattcgtgaagcgggtaagcgctttgttgtcatggataccgcccctaccggacacacgctgctgttgctggatgcgaccggggcttatcaccgagagattgccaaaaaaatggggagtaaaggtcattttactacccccatgatgcagcttcaggacccggatagaaccaaagttctgctggttacgcttcctgaaaccacaccggtgctggaagcggcaaacctgcaggctgaccttgaaagagcggggattcatccgtggggctggattatcaataacagcctttccattgcggatacgcgttctccgttgctttgtcagcgtgctcaacaggaactgcctcagattgaggctgttaagaatcagcatgctgaccgtatagcgcttgttccggtgctggcgtcagagcccgccggtattgaaaagctcagagagttgatgagttaattttttgacatctacagggcgacaaagtcgccctgtcaggaggttttatgttactggcaggcgctatttttgtcctgaccattgttttggttatctggcaaccaaagggattagggatcggctggagtgcaatgctgggcgcgggactggctctgatatctggcgttgtgcatgtgggcgatattccggtggtgtggaatatcgtctggaacgcgacggcgacctttattgccgtgattattatcagcctgctgcttgatgagtccggctttttcgaatgggcggcattgcatgtttcgcgctggggtaacggtcgtggccgtttgctctttacgtatatcgttctgcttggtgcagcggtggcggcactgtttgccaacgatggtgcggcacttattctgacgccgatagtcatcgccatgctgctggcattagggttcagcaaaggcacgacactggcattcgtcatggctgccgggtttattgccgatacagccagcctgccgcttatcgtgtccaacctggttaacatcgtttctgcagacttctttggactgggcttcaccgagtatgcgtcggtaatggtgccggtggatattgcagccattgttgccacgttggttatgctgcatttgttcttccgcaaggatatcccaccgacttacgacctggctcttctgaaagcaccggcaaaagcgattaaagatctggcaaccttcagaaccggctggatagttttaatacttctgctggttgggttctttgtccttgagccgcttggtattcccgttagcgcgattgcggctgttggagctgtgatcctgtttgcagtagctaaacgaggccatgccattaaaactggcaaagtgctgcgcggtgcgccatggcagatcgtcatcttctcattggggatgtacctggtggtctacggtctgcgcaacgccgggctaaccgaatacctttcaggtgtgctgaatgtacttgcggataaaggactctgggctgcaacgctgggtactggcttcctgacggctttcctgtcttccatcatgaacaacatgcctaccgtgctggttggcgctctttctatcgatggaagcaccgcaacaggcgttatcaaagaagcgatgatctacgccaacgtgattggctgcgatctgggacctaaaattacacctattggtagcctggcaacgctgctctggctgcatgtcctttcacagaagaatatgaccatcacctggggatactatttccgcaccgggatcgtcatgactctgcctgtgctgtttgtaacgctggcagcgctggcgctacgtctctctttcactttgtaatgagatactgatatgagcaacatcaccatttatcacaacccggcctgcggcacgtcgcgtaatacgctggagatgatccgcaacagtggtaatgaaccgaccgttattcattaccttgaaaatccaccgtcacgcgatgagctggtcaaactcattgcagatatgggcatttcagtccgggctttgctgcgcaaaaacgtcgagccttatgaagaactggggcttgaggaagataagtttactgacgatcagttaatcgattttatgcttcagcatccgatcctgattaaccgtccgattgtggtgacaccgttgggaacgcgtctgtgccgcccttccgaagtggtactggatattcttccggatgcgcaaaaaggcgcatttgctaaggaagacggcgagaaagtagtagatgaggcagggaaacggctgaaataaccgaaagggggcgatgccccctttctcctgcctcagcgtccgggtaccggactgtccggcagcgtacagctcccttttcccagctgacgctgcagcaacaccgtgtccagccagcggccatgcttgaaaccgatgtccttcagcgtgccgatttcagtaaatccggcgcgaagatgcagcgctacagacgcgacgttcgcactgtcccccacaaccgctatcatctggcggtatccctgagaccgggcccatgttaaggcatgatcgagtaaggcttttccgcccccctgccgctgataagccggatcgatgtacaccgaattttcaaccgtaaaccggtaggcatggcgttcgcggtagcgggagagataacagtagccgatgaccgtctccccctgcagggcgatataccagggaaatccacgtgactgaacatttttcacccgggcaagcatttcctgcgtgtccgggggttccgtctcgaagctgcctgtgccgtgcaggacatgatgggcgtaaatgcgccgtatggcgggaatgtgctgctcttcagcattgataatgtgcattgtatgactcctgtgacgttgactgacacactaccggaattcgcgacggcagattaagcgcttcatcttatgacctgtataaggaaatgttttaagtggaggtagggcgtcgccccacctgtcagcccgccatttcagccagcaggtccacgcctaccgggtcgtccttcagcagtggcgtcagggcaatgcgctgtgcataatgcccggcaacgtcgtcgatcagcggcagttcgcgacgggcacgggtgaccaggaacggggaggacggcttcgcggccgcgaggctgttattgatgacccacgcccagggttcaatcccggcccggcgtaagtcctgctgcagcccggccgcttccagtaccggcgtggtttcggcaagcgtcacgataatgactctggtcttctccggatcctgcagctgcatcattggcgttatcacgtgatcgtgagcctgccccatctggcgcaccatttcccggtgataggccccggttgcatccagcaacagcagcgtatgcccggtgggcgcagtgtctataatgacaaaatggtcgttggcctctttgatgatccgggagaatgcctgaaacacggcaatctcttcggtgcagggggaacggagatcttcctccagtaccgccagtccctcttcatccagaccttttccctgattttccagcacaaagcgacgatagcgctcagtctctgcttttggatcgatacggctgacctgaaggcctggcagcgagccatccagggtgtaagacaggtggctgccggatcggaggtggtcaggtggactttatgaccgcgtctggccagcgagaccgcgaccgcagccgccaccgtggttttccccacgcccccttttcccatcgtcatgaccagcccttttcccgctcggctgaggtcctccaccagggaggcaagctccggtaaatcgaccgtcgtgagcgtggctcccggatccggcagaacaagtgtgctctctgtaaacagcgccctcagggcttccagaccaaccagattaaaaggcttcagatacagcatcgaccggggaagatgcgcgaggttttcaggcatggcccgtaaggcccgttcctcccgcgccagaatactgtgcgccagcggatcctgttcaccggcaaagggaggcagcacgccattgatggcaaggtgctgatgctgcagaccgatagccgacagctcctcgtgggtatgggagacctctttcagggtcgacgcctgtgcgcgggcaaccagaaccagtcgcgtgagtgccgtatcagagagggctttcactgcgtcagcgtactggtcctgttgtttctccagccccaccagagggccgaggttcgccgcagcatcaggatgtgcatcgaggtacccgctccaggcgcccggcagctcaagcatacggatggtgtgtccggttggtgcagtatcaaagacgatatgatcatatttttcgcgcagttcatgactggtcagcagcgcggtaaattcatcaaacgccgcgatctccgtggtacatgaaccggaaagctgttcttcaatgttgctgatgacatcggcaggcatcagttcacgaacaggatcgagcacgcgatcgcggtaagcctgcgcggccgccatcgggtcaacttccattgccgcaaggttttccacggtgcggataccagtgatccggtggcccacagtctggctgaagacctgaccgacattggaggccggatcggtactgaccagaagcgttctccggccctggtcagccagccataccgccggcgcgcaggccagagaggttttccccacgccgcctttgccggtgaagaagataaacggggggatattctgtaaaaatggcatcgtcattgttgagctcctccgggattaaggcatacggggaatgctgcagcagcgcggctgcgtgctgtcttcattccagtcctgcgtgagggaaataccggcccagcgggcgatatcttcccgggacgggagcttgcccgccatcaccagctggccgtcaagcagggtagcgggaagggactccattcctgacgtgttcaggaaggccctgatgacgggcgtattcaggaactgctgcgggttctttgccaagctgtaacgctgaatattcacaccatgctttttcgcccattcggcgctggcgttccatttgacggcttcatcgctgaccacgacgctgctggtcgcacagcagcctgcggcttcaaagatctcaatttttgacatggactgtttacctcagtgttgaatgatggggctttacactgaggtaaacgagtgaggcgggaaaaagatgcgcggttaatccatttttttatggcagcagacggaagacgcatcatccacttccacctggcagagttccgtcatcgtcttcttcagatgtttccgggcgcgaagcaggcgcgacttaaacgccgtcagcgtgatccccagctcgtcggccaggcgctgctggggacgccggttcagatcggcctcttctatcagccatctttcctcgtcaggtaaggcctgcagggtttcaggcaggcaaatctccagcgttgaaaccgcctcatggaaggcgtcaggcagcgggatctcgtcttccagcaccacgacgtctctggcggcacggtactcatccgtcagcagattcctcgccgtccggtacagccaggcccgcgggttctccatttcacagaagcggtctgcacaggcccgggcgcgcaggaagacttcctgaagcagatcggctgcctgctcccgatcgcctgtccttgatgccagaaaacgggagagctctgcttcatgctgttgccagaacacgctcatgcagttgttgaatgccgttacatcactcataccagccctcagattttgctctgattcacccgccgggaaagtgcttctgccgactctttacgttcactgtagcgatcgacgagatacgctgcatactcccgggtcagcagggtaaacttcatcagctcttccattacatccacaatacggtcgtagtacggggatggtttcatccgtccgtcttcatcaaactcctgccaggctttcgctaccgaggattgattaggtatagtaatcattcgcatccagcggccaagaatacgcatctggtttaccgcattgaaagactgggagcctccgcagacctgcatgacggccagggtttttccctgagaagggcgtactgcgccctctgatagtggtatccagtcaatctgggctttcataatgccggtcatcgcaccatgacgttcaggagagcaccataccatcccttcagaccagcgcaccatttcgcgaagttccataaccctgggatgcgtatccgctgcatcatccggcagagggagaccggaaggattaaagatgcggacatccgcacccatggcggtaagaagccgggcagcctcttcggtggccagacggctgtaggaccgctctcgaacggaaccgtacaacatcaggatccggggaggatggtcaactgtctttacacccaggcggaccccggtgagacctgtatcaaacagctcaggaacaacatttttcagttcagcaatcattttttctccggtggtgacataaaaccaggcggggcatattcgtctgcacagcactcttctgtcagaaaggcaatcaatgcagcaaggttgtcataacaggcgtggcagaacagtgttctcccctgcctttcctggcgaaccagtgagacggatatcagcgatgaaagatgatgactcagggtcgaggccggaatggcgagatgttgctgcagttcccccacgggcagtccctgacgtccggccttaacgagtgttttgtaaatatcgagacgagtggtgtggccaagttctttcagcaccatcgcggcgattttcagctccatcccattcctcgtaattttatttctatatttccagaataatagaaatatatagtgagcgcaaccacgtccataatatgactccatctccggggccttacacttacgcggcatggagaaaacatgatcggtgtttatacctctcagaaatgaggtacgtcacaatatatatggaaaaatgcatatgaatccgtcacagtagaaaccgattcccgctaaaaataaaatgaccttcatcctttgctgacgggcgcattatgtcccgccgccgggaagcccaggcaggctcgttttctgactgcctatgaatacagcaaacatacggtacagagaaatggcagagatcatcattagaaaaatgcacgaagaggactggtgtgcagtcagggaaatttatcaggaaggaattgcaacagggaacgccacctttcagaccgcagcacctgagtggctggaatggaatgaagggcatcttcaggactgccgctacgtcgccactgttgataacagagtggtgggatgggctgcgctatctcctttttcccgccggcatgcataccgcggtgtcgcagagctgagcatttatgtcagtactcattttcagggaaaaggcgcgggcagggctttgctctccgggctgataaagggctcggaaagtgcgggtttctggacgctacttgctggcatctttccggaaaaccaggccagtgttgctttacatcgcagccagggattcagggaagtcggctgccgggaaaaagtgggtgaaatgaacggaaaatggagagatgttctcattctggaaaggcgtagccggacagtgggttgctgaaaaaaagaatgcctctgttcatcagaggcattctgtcctggaagggactttattccggtgagggtgacttcagttgcggcataaacagctggcagcacgcaacagctacaagcccgccagacagcggagcggcccagtacagccactgattatcccagtatcccatggccaatgccggcccgaagctacgggccgggttcatgcttgcccccgtcagcggcccgccaataaaagcatcaagaaaaacagcaatgctgataatcgcggggtttctggtcgttaggatgctcataatcagaataaaagtcatgacaccttcgatgaaaaaggcattgtacagtgatacccccatatggacccgggtcaccccggccagcagggagtggccaaagacagccttcaggcacagtgcagcagcgccggcccctaacaactgagccacgatgtaattcatggttgccctgaaagagcaggccccgatcagataaaaaatcaggcttaccacggggttaaggtgtgctccgctgtcaacaacgggtaaaaagtgggtcttccgcaacttaggtggacaaaaattgatgaaactttttagttaacaaggatctaagctgttttaagttatgtataacaaaatggcctcacttaagagacttttacagctaccgcgcgggtggcaaacctgccgacagattactggtactgatggaataaccctccatctccgcgccacacgtaaaacggcatcatgtcctgagtgcctcacgcacagtcattctgttcatagttgccggcggaggcgagtacagcatcttccatgctcaggccaggccctctggttagtcttcgccatccggcactggtactgtcgtaacccttcctgttcacgtaaaatttttgctgaatcgcttgctccctttgcaggcccgcagcagcagtcttctgcattgctgaaaaatctgcagcatcagctggggcttatcgcaggtggtgaagcagggagacgagctgcagtagcttcaggaatacagatcagcgcggatactttactgcgcagagtggttcaagctccggaacaaacagagaaccggaccaggcatgttggtattgacgagtgggcatggcatcggggccacaggtacggcacactgatcgtaaatcttgatacccatcgccccctggtgttactgccaggccgggagcaacgcactctggcggcatggttcaaaaaatacccagaaatacaggtcgtctcacgcgatcgtggggggatctatgcgttagctgctcgcgatggtgcaccgcaggcaatacaggtggccgatcgctggcatctgctgaagaatattggtgatgcgctggagcgcatgatgtacagacacatgccattgatacgactggtggccaccgagttatccccccaaaaaacagaatgctgaagcgtctttggtgccaacgtcaacgttacgtcgccctgaacgtattaaacgagagcgacgtgacaaacggtatcagcgctgggctgaggtagactctcttcataaaaagggttgtgggataagagaaatatcgcgtatcaccggactgtcccgggtgacggttcgccggtggatacagtcaaaagcgttccctgaaatatcaactaagccacccagacccgggttacttgaaccatggcaggaatggctggaagaacaacggataaacggtaaccataatgccgggcagctatggcgggagatggtaaatgctggcttcaccgggagcgaaacgacggtcagggatgctgtggctaagtggcgtaagcaggttaacagtcccgttatcgccccagttcgactcccctcagcatccagagtaagccgctggttaatgccctggcgaatgatcagaggagaagaaaactatgcatcccgcttcatcgaatcgatgtgccagaaagaaccgcaactgaaaatggcgcaacagctgtcgctcgacttctatcgaatgttgaaaacgaagaataaatcgcagttaaatcaatggttctctgacgtcagtcaaagtgggctcattgaccttcagcgtgttgcggccggtatggaagcggatgcaacagcaatacacgaagcgataagcagcagatggagtaatggcgttgtggaaggccatgtaaaccgcctgaagatgctgaaacggcagatgtacggtcgagctggcttcgagttactgcgacgacgagtcatgagccctctggcttaaacaactccacctaagttgcggaagacccagttttgcaccgttggtaacagtatagcagcggtgtttgacgttctggccatgcatgacataggcacgcatcgcgcggagctgggagacaatatctgctcgctgccggtggaacagcacatgatctattttgtgtcatcacattcggtggttatgatcattcgtattctcagccagtctcaggatacggcgcggcatgaaccctggatataggatataaccgggaacgaaaataataattaaaaacaatatgatactgatatttttttcatgaactgaattctcgcgcaacataagttaaattttatttgatcagggccaattatgataatggtgatggatgcttttgatgacacttattaattacgaaaaaaaacgctcccggcgggagcgtaagccagtgacttcggcgtcaaatgagggtctgacaagtggagctgcgggttaattctgggtgatctggctgcgatgcttttcagcctgctgctgatgaatcactgaagactgaccattattcgccttctcgtgtacaacagcggctttctcatgctcgttcatttcggaaaatgattttgctgtttcgttagaagctgctggcttggatttcatcatttttttatgcatttcagccatgtcctgatgggcagaagcgttgccgttttgcatcatttcatgggtcattgcagcctgatcgtgaccgctcatatccatcattgtcatactgtctccctgaacagcgcttttttcagaggttgactgcatctgatgggcgggtgcctgggcattatttacctggtcatgcatgttcattgtctctgcagccatggcggatgaagcgacagccataatggcaacaaatgatacaaggatctttttcatggttgggtctccggtgttttcatacccaaacaatcaacggcttataacagagaaagcatttgatctcagggctggttgatcatcacgccaggaaccgggcgattgaattatcacgctgtcctgatttatggctgattataaaaaaccgcctctgtttatcgcgtgactgaacgatgacatttttgtcaccttccgggtttctcctgaataacggtattaatccattaacagacgcacactgaacacaatttcccgcccctgctgttctgctgacagctcgccgccgtgagcatgaatgatcgaccttgtaattgataatcccagccccgcgccttccgtgttgtagaaccttgatgagtctgcgcgatagaaccggtcaaacaaacgttccagattagcgggaacctggccggacatcgtattcgtaatcatcacgttcacacagtcactgtcacgctcaatgtgtatcgctgtacaggtgttatcgggagaatacttgattgcattggaaagcaggttactgaaagcacgtcggagcatatcgctgtctccggcaacaacgccctctccttcaaccgtgattgtctttcctgtttcgtctgccaggggctcgaacaactcacgtaattcattcagttcggctgccagatccacatcatgtttatccagccgcagcagaccatgctctgaacgtgccagaaaaagcatgtcactggtcattcgtgacaaccttttcagttcttccaggttagcgaataaaatttcgcggtaatgcgaaacatccctttccttagccagtgcaaactgcgtctgcatcatcagattactgactggtgtgcgcagctcatgcgcgatgtcagacgagaaatctgacagtttccggaatgccccctccaggcgatcaaacatattattgaactcctgcatggtctcagagatttccggcggagccagatcgggatttagacgctgatccaggctgtgtacggtcatggaggaagccagactggtcatttcccgtagcggtttcagaccaatacgtgtggtcagccagcccagaaaaacagaaataaagaccagaccgatattgaaccagaacagccaggtactgagtttgtccataaacagggtgtgatacccagtatccgtggcaaccgtaatgatgacatgtttgcttttaccctgttccggcgtcacggcaacccgccgcgagatactgcggtacacggtgttattttcttccgtctggatcatatagtcgagaatatcacccgacttattaagcaggaccgctggaacaacagaatttttggcatagagttcaacaattttttcattttccatgttttttatagaaatgaataagccattgtgccccaccatcgcatcgtttattttttctgataatgacttaatatccgttttgttcctgaacgtctctgttttaagaaactcttcggtgagctgaagtttacctgtcagaaaatcgcggtcctgattatcgaaatagccattcagggtgctaatcaggataaaacttgataaccaccataccgtaagcatcaccgcagaaaaaatcaggctcaggcgtgtggtcagggaaattttgaacctcactcttctctgatctccaggacatatccggcaccgcgaacggtatggatcagttttggctcaaagtcatcatcaattttacttctcagacgtctcacggcgacatcaatcacattcgtatcactgtcaaaattcatgttccagaccagggacgagataagactcctgggtaacacttctccggtgcgttgcagcagcaactcaagcagaacgtattctttaccggtgagatggatcttcttccccgaacggatcacggtccggcgcaccatatcaacggtcatatcggcgatggtgcagactgttgcggcctgcgagcgtgcccggcgcagtagggttcttacacgtgcaaccagctccgtaaaatcaaagggcttaatcaggtagtcatctgcgccaagctccagtcctttcactttgtcccgcacgttgtcctttgcggttaaaaacaggaccggttcttcgtgcccggactccctcagtgcgctgatgatttgccacccgtcgaggaaaggcagcatcacgtccagtattatcaaatcatactgtcccttcgacgcggccccgagaccatcgcggccattattaaagagatcggcctgatagccttcctcaaccagtccctgctgcaggtaacgacctgttttttgttcgtcttcaacgattaaaatacgctgcatggtcaactcgctgatatgaaagtaaaaatctcacgcatgagctttggctgtcccctagctgatctgagacggagcaagcattccaagccacgctacggcgcccagaatgataatcgcaacaacgaattctgtcaggatgctgtttcgcatcagggcaacgctgcgatcataattcccttccctgaccataacttcaagccggggacccaggtgaaaccggtttgctgcagccagaagaagcatcagaacaaacagagccgtcttggcaagcaatatcctcccccaggaactgttgaataagggagttaagttaccctcagcaatatacagatagttgaccagcgcactcaggatcagggctacaacaatcaccgttcctgccgtggcaaattttgccagggagtcagatatcacaatgacgctctgtgcattatgctcgtttctgcgcatcagcaggatagcaaatgcaaccagagcacctgtccaggcacctgcagcgccgagatgggtcagatcgctcagtaaatggagatagtaatgcagaccgtcatgcataacggcgtgtcctccccaggcaagtgtagccagcgccacgcccccactcatcgtcatcagcaggcaggacaatactctcttattagtgtaaaggaacaaagcaccgagtgtggtaaacagggcacagagtctgacaatccagctaatacccacatcagtttcttctatcaccatctcgataacatggatggataattctctgaggtcagttactccactcatggcattagataccaggagcatattaatgccagtaagaatgatgcctgtaacaacagcaaaggttataaacgacctgaaattagtcaggttataggtttcatgtctgacaccgcttattccatatatctgaaaaaatggcaatccaaatattaccatcaaatccagataaagaagaaaacgaataacaatcataatcaggtcgttcataatattacttcactgtaaaggtgtaattaccggtaatagggtgcgtatctgaagaaaccgcgcgccagtcaacacgataagtgccagcgggtaaaggctctcgcggaataatgaccatcgatttagggtcagcgcctggcgccacttttgccgcgaccggcatcggagaatgtgatgacatgcctttcatacccgtcatcgttaattttgcacctgagaatttcacggtcagattttccgagaaattaagctgaatcttttccggggccgctacggctgaatcagcctgtggcacagagctttttaattccggatgggccatagcagagaaagcaacgcccataacgaggccacctgtaagaatggctttatttaaaatcgacattttatttacctgtttagttgagtgttttatatcagtgcgttaaaaccagattctggctcccgccaggaatactacctgatggtctttctcaccttctcttttcgccatatcggatgttttcccgtaaagttgattccaggaaacgcctatatagggtgcaaactcacggcgtatttcatagcgcagtcggagccccagctctgtgtcagtcagtcccctgccgcgaccccgcgattcatcatcctgactgtagaaattcacctcataggatggctggagtatgagccggttagtcagtaaaacgtcgtattctcctcccagacgaagggctgcttttccgccattactgacaaaacccgtaatttcagactcaaaattatagagtgccagcccctgaaaaccgacagcagcccaggtccgggcagaagcaggtctgaaatcctgcctgacacccgcaaccaaatcccaccatgggccaaccgcatgtccccagagtaactgcgcttcagccgcctccgtttccccattgcttcgttcaccttcactctttagccaaatccgatctgtgtcgcctccaatccagctgttaacactccagctgaaattgttggtgttatccgaccgttgccattccagttgatccagcagaaccagataattaatcgcactgtcgtgaatcgcatgcccctgtaaattgccgaatgcagccttccggtcggcatcggtaacaggcggaattggcgttctgctctcagttacaatgggctccattgacgtcatctcagtgaaattctcatctgctggcatctgcatggcagacatgtcgtgcccggcgtggggatctgcagagacggagcccgccgcaatagaaagctgtgaggtaaacaaaccggcgaccagaacaggtatggccttcaaatttctcttcattcgcatcattcctccacccggacttcacgaaacattcccatttccatgtgatagagcaaatggcagtgatacgcccagcggccaagcgcatctgctgtcactctgtaactgcgttttgtaccagggggaacatctattgtgtgtttacgaaccatgaaattaccgttttcatcttccagatcgctccacataccatgcaggtgaatggggtgagtcatcatggtatcgttgatcagcgtgatcctgagccgctcaccgtatttcagcagcaccggtgcggcatctgaaaacttgattccgttaaatgaccaggcaaacttttccatgtggccggttaaatgcagttctatggtacggccaggttcacgtccgtcaggatcctcaaagcggcttttcaaatccgcgtacgtgagaacctttcttccgttatttcgaagaccaatacccggatcatttaatttcggagagacgctcatcgcctgcatatcaaccagtgggttatccgtttctgacgcaggatgactttgcatacccggcattccggccatccgggaatgatccataccggccatgctgctgtgatccatgggcgcggaggatgtcccgctatccggaaggtcagcaccgtccatagacatcatctctccgctgttatccatgcctcccatctggctgtggtccattcctgccatatcatgtcccattccccccatacccatatcttccatggtcaacagaggacggggatcgagggggggaacggcagcacttaacccttctctcgtggccagtgtccctcgagcgtaaccggtcctgtccatggattgtgcgaagatggtataggcctcaccctgaggctccacaatgacatcataggtttcggcaacggcaatcctgaattcgtcaacggtaaccgggtttacatactggccatctgcagccacgaccgtcattttcagcccggggatacggatatcgaaataggtcattgccgagccgttgataaaccgtaagcgtatcttttcaccgggacggaacagtccggtccagtttttcagcggggcctgcccgttcatgagataggtgtaggtgtagccactgacatccgcgaggtcagtcggattcattttcatttcagcccacattttccgatcggcaatggtggctgacagccccctggtattcacgtcgcggaaaaaagagccaacggttggtttattgaaattgtagtaatccgactgtttttttaattttttcagcaggctgtgaggattttcatcggtccagtcagacaacatgaccacatgctcacgatcgtaagcaaacggttctggctccctggcatcgatgataatggcaccgtataccccctcctgttcctgcagaccggaatggctgtggtaccagtaagtcccgttctgcttaaccttaaaggtgtaaacgtaggtatcatcaggctctatgcccataaaactcagccccggaacaccatccatattggccggaagaataatgccgtgccagtgaatggacgtctgttcattaagacggtttttgaccttcagggtaatggtgtcaccttctttccagcgaagaacgggccccggcaggcctccattgattgttttggcctgacgctcactgcccgtgatattgacggccgtttcaccaatggtcaggtcaaactgagtaccctgcagggatgcggcaactggcaggctcagactggaacgcgcattgaaactccatacgccaagacttccggctacgccagagagggttaaccccttcaggaaagttcgtcgagacgttttcaacagcatgcgcattcccttatttaaagtatggttactgacagaattcgagaaccgatttaaattaaattactggttcatccacttacaatgaaatgaatctagcacaccttaagaaacaaattcattacaatcgtgtaatgtacgtggctgtattacatttacgtcatcttctccacaggttgatttttttatatatgatcataaggacatcttttatgtacctcagaaggtaattacacatgaatatattaatcacgaccactgcgtttacagctttattttgtggggcagcttttgctcagtccagtgatattgcccatgaagcacatcgatttgttaataatgcctcagccgtcagtcatgtgaactcctcgacgcatgaaaacttaccggacagggttaataaaaacaacacgccctcattctctgaaatgaatgaacatgaaagggccattgttgctcattcatttatgaacaacagcgcgtcctatgcgcatcagaaaatgattgaggaacataaaaaaatgctgtccggcagtgatgcaaattcaaagacctcgtcttcttcttttaacgaactgaatgccggagaaaaagccgctctcgtgcatgagcaggtcaataatgccggtgcggaagcacatcagacgcaggcaagaaagcttcgcgggctgtattcgaccaggtaactgcaggcgggttagtgcttagcgtcaggtgcgcagcagggctttactgacgggttacgtagcaggacatgagccccatattgctctgccgtaacctgtttcagtcccgttaatcatcaccgtcgggctggtcatacagttcccagagcttcaggagcaaacgggaaacaagatatgttacaaaaatgacgaccatcaacggtgctcccgattaactgacagatgacacgcctcctgaaaacccctagcatacgccgcagtgttcatgctaacggcgaattccagtaaatgtattctaccgatgtcgtaaaagaaaatgcctacctttcagccacccgctcggggctggaatcgaacgagatcgctactcttcagcgctccttgccttcccggtttaatctgcggcatttgaaaaaaaatgaatcattaaaactcgtactgcaaaagaaagcgggaaaatcacgtgtcgtggcctataaatttacgtccggttcatttaattacacggcgtatcgtatatcagataaaaagttctataacctttccgatacttccgggaaaggcagtctcgattatccgttaccggccacagcaagactcagttcgcctttcaatcctgcaagacttaacccggtatcgggaaaagtgagtccccataatggcattgattattccatgcccatgaacacgaaaatagtcagcgtcatcgacggaaaaatcacccgggccgaatacaacagtaccatgggatattttgttgaagtaacgggaaaagccggtgttaaaactcgctatctccacctcaataaaatactcgttactaaaggggccagggttacccggggagacgctattgcgttatccggtaacagcggacgttcatccggtcctcatctgcattacgagctggtcatcaataacaatcctgttaactcactggcgttccgggcagcggcacccgctgataacaaacttgaacagcatgcctttgcgcatgccagagactacgaacgatacctggaatgataacggggccgcgacgcggccccgtctgccggattaattttttttatcgttttcacttccttgatgttgatgatctccatgccctccgtggccgtggaaaagatgcattagcgggcagaccagcaataacagatatggccagtaacctgccacatgtgaccagtgttcgcgcaggagggcaaatgccgcaatcgcggcgacagcaataagcgcataggtggtacttttcataccggactccttctgttagtaacagacccttcattcagggttatttcccgagcctgacacttttcagacgcaacgcatttgcaatgacgctaacggaggaaagggccatagccgccgccgcaataactggcgacagcagtattccatacacaggataaagcagacctgcagctacaggcaccccaagagcattgtagataaacgcaaaaaacagattctgccggatatttttcatggtgatttctgacagatgacgggccctgttgagtatcatcaaatcgcctttgagaagggtaacgccagcactttctattgccacatctgtacccgttcccatggctatacccacgtcagccgctgccagcgccggggcatcattcacaccgtctccggccatcgcaaccacatggccagacgctttcagtcgggttatcactgcttttttgccatccggcagaatcccggcttcaacctcatctattcccagtttccgtgcgactgcttcagcagtaagctggttatccccggtgagcataacaatgcggatccccgcctgacgcaaagctttaagcgcatccggcgtggttgctttcacgggatccgagatagctatcaggcctgcaaggttcccgtctgtggccacatagataacggtagcgccttccatccgcaacgtatccgcaacggccttttgattatcaataacgatactgttttcctgcatagccagttcattaccaataacaacccgttgaccttcgacatcgcctgagacacctttccccgacggggcattgaaattactgacggcaggtatcacgatccccttttcatgcgcggctctgacaacagccatacccaacggatgctgcgaacctttttccactgcagctgttacacgtaaaagagatatttccccacccggactgagactgataatccctgtcaccgtaggcgaaccttccgtgagcgtgcctgttttgtcgacaaccagcgtgtccactttttcaagacgctcaagggcttcggcattcttgattaacaccccggcctgggcgcctttgcccacccccaccattatcgacatcggcgtggccagtcccagcgcgcagggacaggcaataatcaggaccgacacagccgcaatgagaccgtgcgccatcctgggctcgggcccccagagagaccagatcaagaaagcaacaaccgcgataagtatcaccagaggaacaaaccagcctgaaacgctgtctgccattctctggatgggggcacgcgaacgctgtgcatcagcgaccatctgaacaattcgtgagagcatcgtttcatcaccgactttctctgcacggatgataagactacctgtctgattaatcgtccccccaatgacagggtcacccttcgttttggtaaccggcatagactccccggtcaccatcgattcatcaacggttgttttgccttcgatcacgataccgtcgaccggaatactctctccaggtctgatgcggagcttatcgccaggcaggacatcttccgcattaatatccgtttcatgaccgtcatgatccagccgtctggcggttttgggggcaaggttcagaagcgcagtaatggcgcctgaggtttgttcccgtgcccgcagctcaagaacctgtcccagcagaacaagcaccgtaataactgctgcggcttcaaaataaacggccaccaggccatccatgtttctgaacgatgcaggaaaccaggaggggaagacggttgcaatgacgctgtaaacccaggctacgccggtccccattgcaacaagggtaaacatattcagggagcggttacgtaacgacattccggcccgggcgaagaatggccagccacaccacaacacgacaggggaggccagaagcaactgcagccatgtgttgtactgtggcggtactgtattcctcaagtcgggaaacagatgagatcccatttcgagtaccagaaccggaaacgccagcaacaaccccagccagaagcgtcttgtcatgtcgtgaagttcatcactcggccccgtggatgccgtagctacgagcggctccagtgccattccacagacaggacagcttccgggaccactgcggcgtatctccgggtgcatcggacatgtccacacaccttcagaattctctttttccgcctggttgtgaggctgttttatctgatcagggctgacttcgtgatgatcgtggtgatggtgatggtgatgggaatgttcactggcatcttcggtaagataacgatcgggatgggctttaaatttactctcacagctggcggagcagaaataaagttggtggtcctggtatcgaatgctgctgtgcgccctgtcgggcaggatggccatcccgcacacgggatctctcaccttatgcaatacgtggccctcgtccggggataatgtctgctcagaagcagtctggttgttgtgttgcactgcattgtcatttttcacagtaactctccttatgcataccgaagcatcttctgtcttcagggtatgtcatggatgcgattaccacgaatatcgccggcacaggagtgcctgctaccggcgtcccgttatcagccgttccgctgactattcgattcgctggaagacttttttacttccatccggtgagaatgcgataacatcgtaagcctcttttcgggctcccatctccattccaggacttcctgctggcataccgggggtggcgagaccgtatatacccgaaccagactgcattgccttatgtatcgttgtcgcaggcacatggccttcaatgatcaaattaccggcaaccgcggtatgacaacttcgtagtcctgcaggaatagcatgcttttctttcagggctgacagcgcctgatcattcatgacgtgagttcgtacttcaaacccgtctttttccatcgctttgccccacagggaacaacagccacagttttcagatttgtacatatcaatcactttttcactcgccatcgcgggtagtgaaaggccgagagccagcgccattagaaccacttttttcatactcacctctgtatattatcgatataaaccctgacgtcagggtgaatcagtaaagaaggacacccacagggggtgccctttcaggttcaggacacgctttttttatgtctgcgcagccagattaatttgtaggcggcaggaataatgaacagggacagcagcggagccgtgatcatcccaccaatcatgggtgccgcgatacggctcatgacttctgaacctgcaccggttccccagagtattggcagcagacccgcaatgatcaccgccacggtcatggctttcggccggacacgcagtacggcaccatgatagagggcttcatcaaggccttccggtgtgaacgtctctttacgggacaattccgggtgcgcttcaatggcatgacgcagatacatcagcatgaccacgccaaactctgctgccaccccggccagggcgataaacccggttccggtcgccactgacatatggaagccctgccagtacaggaaccatatcccgccaaccagggcaaacggcaggctcatcagaataagtaaggcctcatcagcccggcggaatgccagatataacaggatgaagatgatcatcaccgtcatcggtaccatcagttttaatttcttattggcgtgctcgagtaattcaaactgtcctgagaatgccacactggtccccggtctcagtttcactttctcactgatggccgtcttaatatcgttcaccaccgacaccatgtccctgccgcgggcatcaacataaatccagctggctggccgggcattttcggttttcagcatggttggtccggaaacgaccttaatatcggcaacatcgcccagcgtaatttgctgcttcattggggtcaggattggcatctctctcaacgcctgcggactgttacggtaatcctgcggatagcgaatgttaatagggtaccgggccacgccttcaaccgtctcacccaccatagccccaccgattgctgaagagacgaacagctggacgtcgcccacagtcatcccgtaccgggaagctttctcccggttgatatcgatatcgatgtagcgcccgccctcaagtcgctcagccaggacagacaccacgccaggcacggttttggctaccgcctcgatactctgcgccgtcgcgtcgatatcggacagaacagtcccggacactttgatacctatcgggcttttgatcccggttgagagcatatcaatacggttacggataggcggcacccagaggtttgccagacccggtaaacggactgtcctgtcgagttcatcaataatcttgtcaattgtcatgccgggacgccactgatcctcaggtttgagctggatcgtggtttccaccatttcgagcggcgcggaatccgttgcggtctctgctttaccggtcttgccaaatacagaagccacttcaggaacgcttttgattaacttgtctgttgtctgcaggagcgctgcagcttctgccggagagacgccaggcaaggtcgacggcatatacagcagatcgccctcgttaatcttcggcagaaattcaccgcccacctgactcagtggccagataaccgtgaaaatggacaaggccgcaaccagcagggttgtttttggccagtggaggacccgcagcagcaaaggatgatacgctttgatcagcacccggttcagggggttacttgtctcggcaggaattttcccccggatccagaatcccatcagaataggaatgacgatgatggccagtgcggccgctcccgccatggagtacgttttcgtgaatgccagcgggccaaacagacgaccttcctgcccttccagggtaaagataggaataaaggacagggtgatgatcagcaggctaatgaacaacgcgggtcccacttccacggaggcgtcggtaatcaccttccagcgggtggcgttgtcaatctgctcacccggatgctgatgatcccactcctcaagccgtttgtgcgcattttcaatcatcacaatggcggcatccaccatcgcaccgacggcaatcgctatccctcccagcgacatgatattggcgttcagtccctggaagtgcatgacgataaaggcgatacacaggccaagtggcagagaaataatcgccaccagggcagaacggacatgccagaggaacagtgcgcaaacgacagcaacaacgataaactcttcaagaagcttgtaactgaggttatcaatcgcccggtcgattaactggctgcgatcgtaggtggtcacgatttcaacgccttccggcaggctggccttcagcgtctccagtttatccctcactgccgtgataacgtcgcgcgcatttttacccgaccgcaggatcaccacgccgccagcgacttctccctggccgttcagctcggcaataccacgcctcatttcgggcccggtctgcacgcgggcaacatcccgcagataaaccggcacgccgttctcacctgttttcaggacgatgttattaaaatcatcaatgctctgaagataaccgctggcacggaccatatactccgcttcggccatttcaacggatgagccaccggcctcctggttagacgattcaagtgcctgtttcacttcgggcaggctgataccgtactgggacagttttaccggattgacctgaatctggtactgtttcaccacgccgccaaccgaagcgacctcagccacgttcgggatggttttcagctcaaatttcaggaaccagtcctgcagagagcgcagttctgaaaggtcgtgttttccgttgcgatcgacaagggcatattcaaaaatccagcccacacccgtggcatcaggaccgatttcagaactcacaccggcaggcagttttccctgaacctgattcagatattccagcacgcgggaacgggcccagtacagatcggtgccgtcttcaaaaatgacatacacatacgaatccccgaactgtgaaaaaccacgcacggtttttgcgccaggtacggacagcatggtggtggtaagtggataggtgacctggttttctacaatctgcggggcctggccgggatagctggttttgataatgacctgtacatctgacaggtcaggcaaggcatcgaccggcgtgttaataatcgtccatgtaccccagatgctgagaaacagggcccccatcatgaccaggaaacggttggcgacagagcgccggataatccattcaatcatcgtcgtctcctcagtgccctgaatgcatatttacaggctggtcagacattgctggcatactgctttctgttttttcagggtggcgcatacgttccagcgcgcccgtaatattggcttcggagtcaatgaggaacaggccactgaccaccacggtatcgccttcattcaggccggaaccgatgccggactgttgctgtgattcatgcagaacgtggatctgtttcggcacaaacttgccttcatcatcaacagtaatcacgcgctgttctttgccggtatcgataacggcctggcttggtatcagcagcatctcctggctcttggtattcagtttcagataggcattcatgcccggcttgagaaactcatccttattagaaacctggagacggacctgaagcgtacgggttgtctgatccacgctgggaagaatgttccatttttcgacatggaatgttttatccggataagccggtaccgaaatttcaaactgcgacgtatctttcagcagatatgcgatagattctggcactgcagcgctgatccagaccgggtccatcccctgaatctgagccactactttatctttcgaaatattcatgccggtgcgcaggtcaaacgcagtaatgacaccatcaataggtgctttaatggtaaaacgggtctggattgtgcgggttgaacgcagcctttgaatatcctcttccggcataccagccagacgaagtcgctccagaaccccttttatctgggttgacgtaccgcctgtaccggataacagcaggaactcactttgtgcctcaacccattcaggaatggtgatatcgataagcggagtgcctttcttcacatgatcgccaatcgtcaggggatacactttttcgacgaaaccgtcagagcgcgcctgcacaatgacaaactgatactcgttgtaactgacattagccgggattgtctgggaataattcagcattcctcgcgtgactttttgcgtttttaatcccagattctgaacctgcgttggatcgatacggatcccgccactgcttttatcgccactttcatcagcatatttcggcaccaggtccatatccataaagggagattttccgggtttatcaaatttggtatccggtttcatcgggtcataccagaaaagtacctttcgctccggtgccttttgttcggtttgtactgttttttgtgatgagtttacatactgccaggcagtaaccgatatcagcccccctgctatgaggctgctgataattattgcagcatattttatctttaaagaagccatacaatttctcgctgaaaaatcaaaacacctggcatatgcgcccgatcattcattcacagtaatcccttaatgaatgttcaggcgcactggatgtattcgctccggactgataatcaggattgcgtaacgttaatgcttttgagtaaggagatattgccctgctgaataaacgagaaatcgacatggttgccggttttcagggcattgatagcgtcgtctgcattaacaaaagtgaagcgcatggtcattgcaggccagcccacagcagggattgcttcgtgcgaaatggtaatctttttactattcatatcaatgtctttaacgacaccggtgcccttgataacctgctgtaccgaagcatcactggcagcattcatatcgccatgctgatgtgtttcagcatgaagaccggcagaaaacatgacagagaaggcaccaaataaaacggctttaagtgaattacgcatttttaatttcctgattaattaaataaatttactctacccaaccgccacccagcgcggtaaacagattaatttcgttaacctgtcgggaataggtaagatcgagaatggtttgctgcgtagcgaagagggaacgttctgcatccagcacttcgatgtaactgacagcaccacttgcatataatcctctggcacgctggagagttatctgaagtgaatcaagataacgctgctgtgactcaagttgctggctaagactgtcgcgcagcgcaagcgtgtcggaaacatccttaaaggctgactgaattttttgttcgtaattaaccaccgattgttgctggcgaatttcagccagcttcagattggctttattcctgccagcattaaaaataggaatttcaattttagggataaaattccacattccacttcctgacgtaaacaggcttgacagctccgtactgcttgcggaaagaccactggtcagggtaatggaggggaaaaaggccgctcgcgctgcgccaatattggcatcagccgctttcagctgatattccgcttccataatatccggtcgctgcagcaaaatttgtgaagatagatttggtggcaattttactggtgcgatctccccgcctttcatccctttttctgacggaagtgcgcggtacgttcccagcaccagttgcagggcattgtttgcctgagccagatcgccttctcgtttggctatttcggcgcgggtactttcgatttgtcctctcgcctgttcaagtgccagaacgttcgtactcccggtcacgagctgttgctcaacgaaagcataggactgttcataatttttcagcgtttcccgcgcaatacggagttgttcgtacgccagttgctggctgaaatagctctgtgaaacgttggagaccagcaggatgtgtacggcacgacgggcttcttcgctggcaaagtagttctggcgatcagcctcactcatgttcttaagtttgccaaaaaaatcgagctcatagctgagctccagacccgcgtcgtactcctgtgtggtcggcttgtcacctttcagaccaccgttgtatgtgatcccggatgaggcattcagttggggataacgatctgcatccgtgacgttgaactgggcccgggcctcttcaaccttcagggcagccattctcaaatcacggttattattcagggcttcaccgatcagcctgctgacctggggatcgacaaaaaagtttcgccagcccgtatcctgatagctgtttaccgcaggcgtcagactgtttttagacaatgaaaactgctggggaaccggagctggcggacgctgatattcaggtgccagagaaacacaaccagccaggatgaatatggtactgatgctgagtaattttaatttgaacataacgcttctcgtacaggcagacctggtaaatggttcaaacgaaatccagagtattgatagggatactttaccgaacgctctctgtttgccgggtgacaggataatgacaatgttgtcatttttgctgtaatccgttgataacgatcgtgggcgcaataaaatgacattagcagccagccggggagcatgatgaaaatattaatcgttgaagacgaaattaaaacaggtgaatatctcagcaaggggctgacagaggcggggttcgtcgtggatcacgctgataatggtctgaccggatatcatcttgccatgacagccgagtatgatttagtcatcctggatatcatgctgcctgatgtaaacggctgggatatcatccgtatgctgcgcagtgccggaaaggggatgccggtattactgctgacggcccttggcacgattgaacacagggtcaaaggacttgagctgggtgcggacgattatctggtgaagccctttgcgtttgctgaactgctcgcccgggtaagaaccctcctcaggcggggaaacacgatgatcacggaaagccagcttaaagtggctgacctctcggttgatctcgtatccagaaaagtcagccgcgccgggaaccgcattgtgctcaccagtaaagagttcagcttgctggaattcttcattcgccatcagggagaagttcttccccgctccctgattgcctctcaggtctgggacatgaattttgacagcgacactaacgcgattgatgtcgcagtaaagcgactccgcgctaaaatagacaacgattacgggacaaaactgatccagacagtgcggggcgtgggctacatgctggagatcccggatgcatagcaaaccgtccagacgacctttctcactcgctctgcggctgaccttttttatcagcctgtccacaatactggcgtttatcgccttcacctggtttatgctgcattctgttgaaaagcattttgccgagcaggatgtcagcgatctgcaacaaatcagcaccacactgagccgtatactccagtccccggcagatccggatgaaaaaaaagtaagcaaaataaaggaatcaattgccagctaccgcaacgttgcccttttgctcctcaatcccaggggtgaagtgctctttagctcagctcagggggcggcactacgcccggcagtgaattcagcagattttagcgagcacagccgcgcacgggatgtctttctctggacggtggaggatcctgcgggaccgatggataccgggtccgaaatgaagatggaaacatacaggattatcgcctcctctggtcaggcgatatttcagggcaaacagcagaactatgtcatgctgactggcctatccattaatttccatctccattacctcgatgcgctgaaaaagaacctgattgcgattgccgtcgtgataagcctgttgattgttctgatcattcgaatcgctgtccgtcaggggcacctgccccttcgtaatgtcagcaatgccattaaaaacatcacctccgagaatcttgatgcgcgactggaaccgacacgcgttcccattgagctggagcaactggttatctcgttcaatcatatgattggaaagattgaggatgtctttacccgccaggccaatttctctgccgatatcgcgcatgagatcagaacgcccatcaccaatctggtgacgcagactgaaatcgcactgagtcaggatcgaacacagagggaacttgaggatgtcctctattccagtcttgaagagtataaccggatgaccaaaatggtcagcgatatgctgttcctggcacaggcagataataatcagctgatacctgacagggtcatgtttgacctcagagcggaagtcatgaaagtcttcgagtttttcgaagcctgggccgaagaacgcaatatcacgctcaaatttaacgggatgccctgcctggttgagggagatccacaaatgttcagaagggcgatcaataatctgttatccaatgccctgcgttataccccggagggacaggcaatcaccgtctcaataagagagcaggagagcttttttgaccttgtgattgaaaatccggggaaaccgatccctgaagaacatttatcaaggctgtttgaccgtttttatcgggtggatccatccagacaacgaaaaggagaaggcagcggcatcggccttgcgattgtgaagtcaatcgtggaagcacatcacggaagagtgcaggtggaatcagacgtacgctccacgcgttttatcttatccgtgcccagactggagaaaatgatcccggaaacccaatgctgaaaataaagatgtaaatgacaaagatgtcattagcctgtcatgcagcaaacagaagccattcgatataattagtgcaacttatcaggaaggctggattgcttcatcaatacccggcgtcagagtacgccaggaaatgaatatccagccctcttccggagaaataaacgctgccgaacttgtttcagttatggaactgaaaacaccggttgtacttccccggacatcactaattcagaaatggagagttatcatgaaaaatatcgtattagcatctttgctgggctttggtttaatttcatcggcctgggccactgaaaccgtgaatatccatgatcgcgtcaacaatgcacaggctcctgctcaccagatgcagtctgctgaggctcctgtcgggatccaggggactgctcctcgtatgaccggtatggaccagcatgaacaggccattattgctcatgaaaccatgacgaacggctcggcggatgctcaccagaaaatggtggaaagtcatcagaagatgatgggaaataacacggtatccacgaccgtcccgtcaacgtcttacgcggcgatgaatgagcatgaaagagcagcggttgctcatgaattcatgaataacgggcaatccggcccacatcaggccatggccgaagcgcaccgccgcatgatcaatgcaggctgaatgcgacggtagtatccgtgctgttaccttttccctgatagattttcctgaaacaacgttgctacatttttgccccccgtcagggggcttttttgtctgactcagctacacttaaccggtacctgtctgaaaggaattattatatgggctatttgcattctagggttggaattcatccattctaacccttgattcttagtcggacaaaaagctgcttctggttggatttttctgtttttcaccaccctgcgaaaatctaacattggttggattctcagacgcgccctctctcgcgttaatccaactctccaccttctgcctgcttcaacaatgtcggaatgtgcggtccatactcgaccttgcctcgtcctgctcgaataccactgccaaccttgcgggcttctttggagtacaacgtctttgcacggatgatctcatagctataaccccgacctaaccggttggacatcttgatcaaaccgttgagcccttcggtatagccattggtgagtgagaacggcgcatcccagtaggcaaagatgtcgtcgtaatggttgtgtaccgtttttaccagttttttgaaaggctccatgccataaggcggcaggctgttcttccaagcctcaaaggcgttctgagcactctgcttgtcgggttcgtcgtagatgcagaagaaggcttccttgaagtcataggccatggcaagtgctgggatcgcctgctttacaacctccagcgccttttgctctgcgggcgtcaggttgccgggtcgcttcagggtaagccagcgaatggactttttgacgtaaatgcgatcttctttgcttaactgtgcctgggtaatgaccccaacttactgatagtgttttatgttcagataatgcccgatgaccttgtcatgcagctccaccgattttgagaacgacagtgacttccgtcccagccttgccagatgttgtcgcagattcaggttat

SEQ ID NO: 80 - DNA, 49641 bp, Unknown
  source: /note="Description of Unknown: MKP2_coc_1 Mutant Bacteria sequence"
ggcatacggttcgtgcgacctgccgttaatttattcaccattgttgctgaaactgccggtgctgacggcctcaaaatcgctgagacgttcccggaaggccggggcagcccgcatggatgcgggctgaaggccgtgttttgcacggatgctgcctcggcccgacccgaagcctgcagggataagtcgaagggaccgcgtagcggcgattttgctggctggagcccgggggtacagggggcggcggcgactggccgccccctgtgcgctccctgcgccatgccaggcataacgcagacaattaaccgggagcgcaatgtgcgctgaaatcacatgcgacaaacgctttacccggattaatagagttgcataccaataacattatatccggcaccccgcaggcgcatataccccaggcccggcaagcgtagcgccgccgggcaggacacctccggcgccatacccgcctttgtgccggatggcggcttcgccttatccggcctacgggatcctcccgtaagtccctatacaccaggcccggcaagcgcagcgccgccgggcaggacaccgcagataccgtagccatttttgtgccggatggcggcacaaatgccttatccggcctacgggatcctcccgcaggcctatactgcgccgccgagtaacaaacgccaggcagcctatctcacgccttctgcttggcctcggactcctggctgctgttcagcgccagcgaaaccgccagcgtctgggccagacacagggaagcaacctgcgaacggaagccatccacctgcgcttcacgcaccacaaagcagacatcgctgaaggccgccagcgggctgacctggctgtcggtaatggcgatctgccgcgctttgcgctgcgcgcccagctccaccagctcgaccacttcccgggcgtacggcgagaagctcaccgccactaccacgtctttcggaccgaccaggctcagctgctcggtgaacatgccgccgaggccgtcgatcagaaaggctttgcgatcgaggtgacgcagcgcataggtcagataggaggcgacgctaaacgaccggcgcagaccaatgacgtaaatattttccgcctcgcccagcagggccaccgcgcgctccagatcatcgctggaggtctgcatcgccagctgctgcaacgcctggttgttcaccatcgtgaacatattgaggatttccgtcggcgtttccggcgggctggactcatcgctggtggtctggcggaacagacgggcgcgctcggtatagttggcggtctcttccatcaaatgttgcttgaacatctgtttcatttcgttaaagccgctgaagccgaaggcgttggcaaaacgaatcaacgtggaagggggaacatccgcctgttgcgcaatggaggccacggtatcgaaagccacgctattgctgttatcaaggatatagcgggcgacctgtttcaggcgtttgcttaacgtatcgtagcgacgcctgatttcatcctgcaggatggtcagctgtgttgggttattggccatagagtgcgctctgagaaaatggaaggaatatggcttccagtgtaccaaatgaagcgaatttttcatttattgcgacgaaatacgcgattcatttcacgaagaaacagaaaaacgcccgctccgcaaggtgacggagacgggcgtcgggggatcagcggcgggcttcgcgccagtagccaatgagcgtcaggtagttgcgtttcacttcttctatcagggcctcatcgctgagctcaccctgcatccagcgccgcgacggctggccaaagatggtgcgcccgacggcgaaacctttgatcatcgggtgtgcggccgcctcggcgaaaccggcgcgcagtttgtcggaaggcgcgtcaagcccgaggatcaggatccctcggctccacggatcttcacgctcgataagcgcggtgatctgctgccagctggcgctggagagcggcggcagcttccaccagtccggcttgatccccagctgatagaagtgttccagcatagtgtggtaatggcgctcgtctttgtccgggccattttccggcaggatcacctccaacagcagttcatggcctgacttgttacaggcctgccagacctcgagcagcagggcgtcctgctctgcacgcagcgccgccgggtcgtccgggtgatagaagaccaggcatttgacgacatgctccagcggccagtcgatcagctgcgagccgatgttgccatgctccagacgcagcggtcgcgagctgggcagttcgatagggcgcccgatccaccagcccttgccggtaatggcgttgagcgcacgctggccgtaggtgccgtcggccagaatgccgctgcgctgatcgagacctgcctcctgcgccgccgcttcggccgcggccaacaacagcagtttgagctgcggaatgcaggcttcgtcgcgcccggtctcccgcgccagatcggccagctgtttgcgatggtcgaaggcgaaaatgcacagctccggccactgttgacggcggctggtgacccggtgcaggtggttgaggcgctcgtcgacgtccgggcgcggcaccgattcggcgcgctgcaggtagtcatcaagttcgactttggtcggcatcgccggcgcgcagccgtggcgggagaccaccagcgccccgcaggcgttggcgtaacggcaagcctgctcccagccttcgtcgttgagccagccgcgcagcagacccgacataaaggcatctccggcgcccagcacgttgagaacctccacgcgcacgccctgctgcagcggcacctggtcccagctgtccgggatgtcgccttccagcaccacgcagcccatcggcccgcgcttgcagacgagggtggctttggtggcgttgcgcacatttttcagcgcggtcagggtatcggtgctgcccccggcaatatgaaactcttcttcggttcccaccaccaaatcgaacagatgcagcacttcctgcagctggctggtgaccggtccggactcaatgaaacgggtttcgccatcgccgagcgaggtgagcccccacagcaccggacggtaatcaatatccagcgcggtacgcaggccgtgacggcgggcgtactccagcgccttcagcaccgcggcgcgggtgttggcgtgcgacaggtgggtgccagtcaccgccagcgcccgggaggaggcaatatactcctcgctaatgtcgtcaggcgttaaggccatatcggcgcagttatcgcggtagaaaatcagggggaaggtctcctgatccttaatccccagcatcaccagcgcggtcaggcgagatttgtcggtaatcagatactcggtatccaccccggcgcggttgagcgtttcgcgcaggaaacggccgttgtgttcatcgccaacgcgcgccagcatggccgatttcagcccctgaatcgcggtgccaaaggccacgttgccggaggagccgccgagatatttcgcgaaactggcaacgtcttctagccgcgaaccaatctgctgggcatagaggtcgacggccacccgacctatacagatgacgtcgagccgctttactgctgcattcatagctaggatttcctttttggtgtctgctgcctggaagggtcgggatcccgacgtcgactccgtgaacagcctgagggttattggttacccttagtttgagaaataaatatttcatttgcaaactcgttcgaaattaaaaaaccaaaagtgtgagggatctaccactctgccgcactgagcctcgcgcgagcgcggatcgccccctctgtcgacccgggggaaaatgaaacgccaaatggcatccatttacctatgatttttaaggggatattgccgtctggtgcggcaaaaaaggccccgaaaacgtgtctggaatgtaagtgaaacgtatgaaatgggtagagagtttgatccttctcgcaaaatgaaatatttcttctgtatttgtatttaatgaaaaaaatgtttgcctataatccacaggtattccagtgacgtgaacgacggccccggcggcatcggcgcgacgccacacacaaatactgaacaataaggattgtgcatcatgggcaaactgagactgacaacggcgcaggcgctggtgaagttcctcgataaccagtacctggaagtggatggcgtagagctgaagttcgtgaaaggcattttcgcgattttcggccatggcaacgtcctggggctggggcaggcgctggagcaggacagcggcgatatgcgcgtctatcaggggcgcaacgagcaggggatggcccacgcggccaccggttttgcccgccaggccctgcgccggcagattatcgcctgcacctcctccatcggtccgggagcggccaacatgatcaccgccgccggcaccgccagcgccaaccgcatcccgctgctgctgctgccgggcgatgtcttcgccacccgccagccggatccggtgctccagcagattgaacagagctacgatctcagcatcagcaccaatgacgccttccgcgcagtcagcaaatactgggaccgtattacccgcccggaacagctgatgagcgcctgcatcaacgccatgcgcgtcctgatcgaccctgcggaaaccggcgcggtaacgctgtgcctgccgcaggacgtgcagggcgaagcctgggattacccggaatccttctttgcgcgccgcgtgcaccgtctcgaccgccgcccggccagcgccgcgcagctggcggacgccgtggcggccatcaaagccagccgtaaaccgctgatcgtctgcggcggcggggtgaaatactccggcgcgggcgaagcgctgtcccgtttcgccgagcgctacggggtgcccttcgccgaaaccccggccgggaaggggacggtggtctcggctcaccccctgaacgtcggcggcgtcggcgagacgggctgcctggcggcgaacctgctggcgaaagaggccgacctggtgatcggcgtcggcacccgcttcagcgattttaccaccgcctcgaaatggattttccagcacccggaggtgcgtttcctgaatattaacgtcagcaacttcgacgcctggaagctggacggcattgccatgctggcggacgcccgggaagcgatgaccgctctcgacgcggcgctggcggacagcggctggcaggccggctggggcgcgcagatcgagagcgtgcagagccgtcagttaaaagagacccagcgcgtctaccaggcggtgtggcaggagaaatcctttgtgccggagatcgacgatcatctcgatcgcgaatcggtgtatcgcgagttccgccagatcaccgactccaccctgacccagagcagcgttcttggggtactgaatgaaacgctgccggccgaggcggtgatcgtcgcggcggcgggcagtctgccaggcgatctgcagcgcgtctggcgcaaccgcgcggaaaacacctaccacgtggagtacggctactcctgcatgggatacgaagtcaacgccgcgctgggcgtgaagctggcgcagccgcagagcgaagtctactccctggtcggcgatggctccttcatgatgctgcactctgagctggtcacctccctgcaggaacgggcgaagatcaacgtcgtgctgttcgacaacatggccaacggctgcatcaacaacctgcagatggagcacgggatggacagcttcggcaccgagttccgctaccgtcagccggaaaccggccagctgcagggcggcctggtgccggtggacttcgccaccatcgccgccggctacggctgcaaaacctggcgcgtcactactctggacgaactgcgccatgcgctggacgccgcccgtcgcgaaacggtcagcaccctgattgatattaaagtactaccgaagaccatggtgcacaaatacggcagctggtggaacgttggggtcgcccagacggcgctctctgagcggatccgcaaggtggcgcaaatgattaatgaaaagcgcgcccaggcgcgtgattactaaaacgaacctctaccctgaatcctacagacttacggagaaaaccattatgtcgctcaaattaggtgtcatcggcgctggcgctatcggtaaagaacacatccgtcgctgcacccaggttctgcagggcgccaccgttgtggcggtgtctgatatcaatgccgacaacgcccgcgcggcggtcgcgctgccgggcgtgcaggcggaagtctacgccgacggccacgacgtgattaacgccagcgatgtcgatgccatcctggtcacctcctgggacccgacccacgaagagtacactctggccgccatcgccgccggtaagccggtattctgcgaaaaaccgctggcgatgaccgcggaaggctgccgccgcatcgtcgatgccgaaatgaaggccggccgtcgtctggtgcaggttggctttatgcgcccgtacgacgaaggctatctggcgctgaaaaaagtgatcgacgatggcgatatcggcgcgccgctgatgctgcgctgcgcccaccgcaaccagtcggtcggcgagaactacaccaccgatatggcgatcaccaacaccctgatccacgagctggacgtgctgcgctggctgctgaacgatgactaccgttccgtgcaggtgcgcttcccgcgctccacctcgcacacccatgcgcgcctgaaagatccgcagatcgtctcctttgaaaccaaaaaaggcaccctgatcgacgtcgaagtgttcgtgaactgccagtacgggtatgacatccagtgcgaagtggtcggcgaaaccgggattgcccgtctgccggagccgtcggccgtccagatgcgcaagtccgccagcctgtcgaccgccatcctcaccgactggaaagaccgctttatcaaagcctacgacgtcgagctgcaggcctttatcaacgacgtcaaagccggccagctgcacggcccgtcggcctgggacggctacgcggcgtcggtggcggcggacgcctgcattaaagcgcagggaaccagcgagccggttgaagtgacgctgcctgagtgcccggcattctacaaacgttaagcgcgttttgctgacggaacttctttgcacaggtaacgacgatgaaaattgcctttgatgtggatgtgattaaggacctcgggatcacccgcatggtccatcaggtagcggagtggggctacaagtacattgaacagtcgccgcacccgcagattaacccgttctacaagcacccgcgcgccagccgggagatcatggcggagtacaagcaggcgctgcgcgataccggccttgagctgtcgtcgtttatctgcgtctaccgctggtccggcccggacgaactgcgccgtcaggcggcggtgaaaaactggaaacggctggtggaaattgcggtggagatgggcgttcaggtgatcaacaccgagttctccggcgatccgaatcagcctgagatctgcgatgaaatgttctatcgctcaatggaagagctgttgccgatttttgagcgggaaggcatccgcgtggagatccaggcgcatccctgggatttctgcgaagagaacaatgaaaccgtcgatatcgtgaagtcgttccgcagcgataacgtgaagtacgtctacagcgtgccgcacacctttttctacgacaaaggcgtcggcgacgtggcgagcatgctgcgctatgccgggagcgatctctcccatgtcctgattgcggacacccgcaatcatacgaaacattgccgctatatcgttaacccgccgggcgtggatgccgtggtgcaccagcacgtaggcgtcggggaaggggatgtggatttcgacgcgctgttccgcactctgcgcgaaatgaaattcgccgagcagaccttcaaggtcggcggggagccgattgtcgccacctcgctgtttggctacccggaaaaaatgaaataccaggcagtggaaacccgtgaacttattgaacgtgaattgctgcgccgctaaggcgcagcggcaggagccctactatgaacaaagataacgtcaaactggctatcgccccaatcggctggactaacgatgatatgccggagctcggcagcgaaaacaccttccagcagatcgtcagcgaaatggcgctggccggctttaccggcagcgaagtcggcagcaaatatccgcgcgacccggcggttctcaagccgatgctggatatccgcggcattcagatctgcaacgcctggttcagcacctttttcgccaacggccagcgggaaaaaaccattgatgaattcgtcaatcacatgaacttccttcatgcgatgggcgcgaaagtgattggctgctccgagcagagcggcagcatccaggggctggataaaccgatcctcggcgatgcgaagccgtgcttcagcgacgaagagtggcagcgggtggcggaaggctacaacaccctcggccgcctggcggcggagaagggaatgcaggtctgtctgcatcaccacatgggcaccggcattcagaccaccgcggaaatcgacaaatttatgtcgctggtggacgagcgcgtcttcctgctgttcgacaccggacatgcctggtattccgaaggcggcgaagcgccgatgctggcgatcctcaaaaagtatctgccgcgcatcaaccacgttcacctgaaagacgtccgcccgccggtgattgaccaggtgcgccgcgacggcctgtcgttcctcgacggcgtgaaaaaaggcaccttcaccgtcccgggcgacggggtgatcgatttccgtccggtgttcaagctgctggacgactttggctataaaggctggatggtagtggaagccgagcaggatcctgctctggccaatcctttcgaatacgccgtcaaagcgcgcaaatatattcgcgaaacggcagggatctaatcgttgtgacattttcaggccataccgggtatggcctgcttttttcctttcacaaccggactcagggcttaaccacagcgccggacagttccctctccctcagggagagggccagggtgagggtgaggatgacgggtaaagcgtcacttcacttccgccagcgcggtcttatccacatacggtttcatcagcgcgtcggcttccttctgcgccgcctgcaccgccgcttccggcgtcactttggcatcattgaccaccgccgccagctggttctccatcgccttacgcaccgccacggtctcccaggtggagtaccacggatgggcgtacttcagctgctcaagggcgatcgccgcccgcggatcctgctgcagataggccttcatctccggcgtatcgtatgacgccttgcgcggcgagaagtagccggtgaagcggctccacgcgccgttcacctcggggctcaccagataggtcaggaactgatacgccgctttcttctgcgcctcgttgatgcctttaaagctcaccaggctggcgccgccgatcggcaccgcgcgctgctctttggccggcagcatcgccaccccaagctcaaaatctttgctgttctcgcgcataaagcccagcgcgccggtgctgagcatcgccatcccgagcttgccggagaagaacgcggcgctgatctgcttcgagttcagcaccccggacggcatcaccttgtccttgtagatcagatcctgccagaagcgcagggcgccgatggcggtcggcgagttgtaatagacctcgcccggatagtcttcgttaaagtatttcccgccgttggcgcgcaccagcgccgagaagatccagccgccgtagtcgtcgttggtcgacggcagcatgatcccccactggcctgtgctctcgtcggtcagctttttggcatcggccagcagctcggcccaggtctgcggcggctgtttgatcccggcccgatcgaacatcgtcttgttgtagtagaggatcggcgtcgagttatggaacgggatcgcataggtggtgcccatcacctgggcgttcttatgcatcgcgggccagaattccttttgcagaaaatcgccggccttttgatcgccatatttaaacagctcatccatcggcaggatcgcatccttcagcgccagatcggtggtgaagttggcggacatgatcaccagcgccggcggctggccggccttctgcgccgattcggctttgatcttggtggtgtcgtagttgccggtgaagatcccgcgcacttcaacatcctgctgcgagtcgttgaattgcttaatgacgcgggtcatctccatggtcagcttgccgtccaccggcgccgggaacatgaagtctattttctctttcgccagcgccgcgccgctcagggcgaggctgagcccaaccgcgactagcgtgaggggtttaaacatgatctgtctccatcagtaagcacctgtccacaggctattttatttgccagtttggccctgggcagtgctcagaatcctcacgtactacgtgtacgctccggttcttccgcgctgtccgcgtccaaactgactgcaacaattacgcctgatgtaccggcgctaaattatgctgggtctcagcatgaaaaagatgcacatcggcaggcgaaaagccgatcggtagcgactcgcctttctccggcaccgtgccgcggtggcggcggctaaagcgcagggtgccgatcggggtgttgacgtggagcaggtaatcggcccccatcagttctcgttgcagaacggtggccggcaggcgcagatggccctcttccacgcggtcggtaatatgttccgggcgaacgcccagccagacgcgggtctgatcccggtggcgcggcggcagcggatggcgttgttcgccaagctgaacgttgccgtcaacgcaggggagcgatagcaggttcatcgccggcgaaccgataaatccggccacgaacagattggccgggttggcatacagatattctggccgtcctacctgctgcacgtggccgccgttcatcaccacgatgcggtcggccatcgacatcgcctcggtctgatcgtgggtcacatagatggtgctggttttcagctgctggtggagcgccataatgctgtcgcgcacttcgctgcgcaggcgggcgtcgaggttggagagcggctcgtccatcaggaacagccgcggattgcgcacaatcgcccgggccatcgccacccgttggcgctggccgccggagagcttcgccggtttgcggtcaagcagcgcctccagctgcagcatctgcgccactttatccacccgcggctgccagctgcttttctcttccttgcgcaccttcatgccgaaggtgatgttgtcgcgcaccgacagatgggggaacagggcatagttctggaagatcatcgcgaagttgcgctcgcgcggcgtggcggcggtgatgttctcattatgcagccagatttggccttcgctgaccggttccagccctgcgagcaggcgcagcagggtgcttttcccgcagcccgacgggccgaccagcaccacgaattcaccttcgtgaatatccagcgacagggcgctgagcgccggtttgccgtcgaaacgtttactgatgttttgcagactgagcatggcggttagcgctcttccgttgggcaactgatgttatcgtcgtacagccacggcccggcgtagtgggccagcgagtgctggtagctcacccactgctcaccgacctgacggtgcatcaggcacgaggccggagagaggtcgtaatagggccgggtgtcttcgtggcagtacggcacctgatgaacggtgccgggaatggtggagatcagcgcctggcgatactgggtcatggtcaggctgtggttgtggccgcagaagatgcgcgtcagcgacgggaaacgctccaccagcgccagcagacggtggccgttttcgcaggcgatcgggtccatctgcgcattgcccagcggcagcggcgggtggtgcataaagatcgttgccggtttgtcgccgccctcgaacagttgcgcctccagccagctgatggtctcgtcggtcagccagccttttgacgtgccggcatgactggagtcgataaacagcaggcgggtggcgaagtcatccaccacatagcgcatattttgcggatcgttgcccagctgcgggcacagcgggtgaagatgctccagaaaatgggctttgtcgtcgtggttgccggggatcagatacagcggatagttcaggctgccgaggatctggcgggccacctgatactcctccgggcggccgcagttgacgatatccccgctcaccaccaccgcgtccgggcgctcgcgcagcgcgttaagctgggagaccacgtcggcgttggcggcattgacgtcgataaagccgtacagcttctcgccgcggctgcggaaatgggtatcggaaatgtgcgctaacagcatgaatcactccttatttgatcccggagaagccgaagctccgcaggaactgtttctgaaaaaggatgaacgccagcatcagcggcagacagaccatcagcgtcccggcgccgatggtgccccactggccgccggattcggcgcccatggcgaaggagaccagcccgacggtcagcacctgcttatcgggatcgttgagcatcatcagcggccacaggtactcgttccagtggtaggtaatgctgacggtggcgaaggccagcaccgacggccaggacatcggcagcagcacgcggaacagcacctgccaccagcggcagccctccatcagcgccgcctcctccagctctttcgggatggcgaggaacgcctgacgcatcaggaacacgccgaacgccgaggtgaagtagggcatcatcaccccggtgagggtgttgagcaggccgaaggttttcagggtcagcatgttcggcaccatcatcaccaccggcatgatcatcagctgcaccaggaacaggagaaacagcgtctgcttgccgcgaaactcgtggcaggcgaagacgtagccggcggtggtgatggtaaacagctgcacgaagaaggtgccgaaggtgaagataatggtgttggcgtacaggctcagccagtcggcgctctgccaggcgtcgcggaagttatcgagggtcagcggcaggcgcggcagcagcgacgccatatcttccccgaaggtggtggcgctgaacgaggtggccagcatccagataaacgggctgatccacagcagcgccaggcagcacattaatactgtaagcgtaaagggcgacgagcggcgcaggcgcaaccatagtggacgggcggcggcgggcgtgcggaccagcagcggcgagatttcagcgctcatagtgggctcctttctccagcagtttcaggttaatcagcgagaaggcgaacagcccggccagggtgaggaaggtggcggcggaggctttgccgaggtcgtgggtatcccaggcgagattctggatgtaatagagcagcacggtggtggcgttgtccggcccgccgcgggtcatcaccgccacgtggtcgatctgggtgatggagtagatcagcgcggtggtgatcacaaagctcagggtcgggcgcagcagcggtagcgtgaccttaaaaaagacctgcgtgcgggtagccccctccatcagcgccgcttcccgcgtcgaggccggaatgctctgcagcccggcgaggaaaaacagcatgtagtagccggcgaacttccacacgccgatcagcgccagggccagcagcgcgctgttgctgcgccccagccagttgttgttcatcggcccgaacagctttgccagatagtggtcgagcaggccgaggccgggcataaagataaacagccacagcgcggcggcgctgaccatcgggataatcatcgggaagaaaaaggcggtgcgcagccagcggttgacgcgatggttctcgctgagggcgaccgccagcagcagggcgagggtcaccccgggcactaccgtcagcaggatatagagcaggttattgcccagcgactgccagaagacgttatcggcaaacaggcgggcaaagttatccagcccgacgtactgcgcgccgtcgctggccatgcgggtatcaaacaggttgtcatacaccgaacgccccagcgggaaccaggtaaacagcagtaaaaacagcagggaaggcgacaggatcagccagggaagccaggtctttctcatggtgacgcgcatctcgttcagccatttatcgaagcccggattgtgggaagcaatgactacagaggcatggcggggagatgacggtttgatgaagcgacggggaaaacgccgggcgagcgggccgcccggcgggagagaatcatcagaagtcggctttcagcaccgcgcggtagcgggctttgccttcgcgaacgtgcttcagcgcttcgttaatttgcgacatcgggaacagctcggtggtcggagccactttgctgcgcccggcaaacttcatcagcgtgcgcagttcggacggattaccggtcgccgagccggagatgctgcggtcgccgccgatcagggtaaaggccggcaccgggaacggcctcatcaccgcgccgacggtatggaagttgccgccgtaagccagggcttcgaagtacggctgccagtcgaggtccaccgccacggtgttgatgatcaggtcgaactgaccggccagcgcttttaaggcttccggatcgcggctgttgaccacgcgatcggcgcccatcgccagcacttcctgctctttggccgggttggagctgaaggcggtcacttccgcgcccatcgcccgcagcagcttaatggcgatatggccgaggccgccgatgccgatcaccccgacgcggctggtggcggtgacgtggtgggtcagcagcggtttaaagacggtgatgccgccgcacagcatcgggccggcggacgccagatcgatgctctccggcagggggatcacccactgccagtcggcgcgcagcttattggcgaagccgccgcggttgagaatggtcggcaccgagccttccagacagttgatctggttgccgctgatgcaggcgtcgcaatggccgcagctgcgcgccgtccagccgatgccgaccttctggccaatcttcagccctttatcctgagccgcgctgcccagcgccgccacccggccaatcacctcgtgaccggccaccagcgggtagctcgacatcccccattcgttgtcgatcatcgacaggtccgaatggcagatcccgcagtattccacttcaacttcgacatcttccggctgcagctcgccggcatcgtattcccacagtgacagatcggcgcccgcttctttggcggcgtagcttttaatgatgctcatgttcatttccttggggttggcgtgataacccagaaagtgtagagcatggtattccccggcgcttggcaatcggaggggtcgcgaagcgggcggaccagccgcccgttaaggtcagcggctggccagcggccactgattaaggcggatgccgcgctgcggggcgttctcggcaaaatcatccagcaccgcccgcacgtccgggtcgagatagccgacgctgtcgtgctcgacgatcaccacgctcttttccggaatcttcgccagcagggccagcagatgcggattgtgcataaaggtcagattctgctggatgcgcagcacgtagtggtcatcgtagcgcgccagctgcagcgagtggcgatggctgcgccagaggctgaacgccatctgggtggcaagaccaatcccgatccccgccagcatgccgcaggcgataatcccgccgatggtggcgaggaacggaacgtactgcgccgcaccctggcggaactgctcgatgaacagccgcggcgtcgccagcttatagccggtatacagcagcacggcggcgaggctggcgagcgggattaaggtcagcaggccgctgaaccacaggccgcagattaacagcaggacgccgtggataaagatcgacagcttgctctgcgcgccattgctgacgttcaccgagctgcggacgatcaccgcggtgatcggcatcgcccccagcacgccggagagcagattgccgacgccctgggcgaccatttcgcggttcggcgaaggcggcggattttgcggacgcagctttttcagcgcctcctggctgagcaaggtttcgaggctggcgaccagcgccagggttaccgccaccacccacaccgacggattgcgccacgcgctccacgccggagattccagctcgcccagcagatcgccgaggctgccgaacgccggcagggtgatgcgtggcagagtggcaagctgctgcggcgcggcctgggtcattaatacgatggtgacacaaccgagcaggacagcgatcagcgggccggggatccagcgtaggctcttcacccggcggataagcggcgaaccccacagccagagcaccagcaggccgcccgcggcgacggcgatagcactgagggagaaggtggcgttacccttcacgatatcaacgagcccggtctcttctgcgctgccgagcgcgacggggatctgctgcataatcagcaggatgccgatcgccgccagcatgcctttgatgacgctggcgggaaccagcgagataaagcgcccggcccgcaggatgccgaacagcagctgcagcgcgccggccagcaacagcgccatcaggaagagggagaaggaacccagggattcaatggcggcgacgacgatggtgaccagtccggcggcggggccgctgacggcgaagcgggaggggctgagggcggtgacgaccaggccgccgatgatgccagtcagcagcccgacgaagggcggtaagccgctggcctgggcgatgccgaggcacagcggcagggcgacaaggaagacgacgatgccggcgagagagtcctgacgaagcgtgttcatggggcgtgctcctgcggtgagaggtgttcgacgagggtggttaaatggccggaagccagatcgtagacgcagccgtgcaggctgagcggtcgcccgctggcgagcaccgtctgcaccggttcactctccagcagacgggcgaactgggcgcgaacgttggcttccaccagggcgtccagcgcatggcgagaacgctccgcgttggcgctggcgctggtgctggcgccgggggaggccgcaatacaacagtcatcggcgatctgcgcaatttcgtgatgcagggtgtggcgcagctggccgatgcggcgagccagcgccgaggactcctgcgccagcggcagggtgggcagagagagcgccgcctgcacgccgccgcagccgtagtggccgcagagcaccacccgctccacctcaaggtagtggagggcatactgcaggacgctcatgacgttgtcgtcggcgggatcgagcatgttggcgatattacggtggacaaagagctcgccgggctggctgccggtgagcacctcggcgggcacgcggctgtcggagcagccgatccacagcgagtggggccgctgcccgtcgatccatttttcgaaatagtccgggtcatgctgacatttctgcagcgcccagctgcggttgcgggccagcaaaggttttaacgtcgtcacaagtattctcctgagttaattcatcgagtgaatatgtccatcaagactcgtacagcgactagtaaaaatagtgtttaccggaacccttcacgcctgaggaaaatcctggaataaacggcaaaaagaaaacttttcattaatgtaaagttataaaaatattgatgaaattaatgttttgccgcggagcggatggataacaaaaaggcattggctaaaactttctggaatatatgggaatggtggtgggtggggtggggggaatagttggggagtggatattggggatgggtggggaacgttgggttgggttgagtaattcgggtgagcatagcgtgagaaaaatttgagataaatttgaatggagtttgggtgttattgagcgggaagggggaacggctggcaggtggggttgggtttgcgggaggggcggtggtgatggggcgccctggaatagcggcaaaaggtgacgccgcgcaggatagcgctgtttttttcaacacttagcgcaatgacgacacgctgtcgcttgcatgaccgccgccgacaggtataatccagaacgtttccgcatccccttcagtgccgaagtggcgaaatcggtagacgcagttgattcaaaatcaaccgtagaaatacgtgccggttcgagtccggccttcggcaccaagtgatgcaataattagctacctaagggtggctttttttgtgtcttgatttctatgcaacttctgaaaacctgatagccgtgtagtttggatgggatcgaagcgaaagttgtataaagtagtatttggtgccttgttcttgcaaaactatgatgacttaattataccttcattggatataaaaccgagggagagtcatcgatgatgtcatttgatacacatgctgctatggatatgatcacccactcaacgggggggtttagttatgatactcttgccagggctttgatttctaataaaaaggccaaagcaggtggatgtttgttaaaagattgtcaagaattttgcgaatatttagaatcccagggagttatcaaacgtaatgccccgtgtgatagggatgaagatgtttattatgagtattctccacattaattgaattcgtgataggttacgataaaagttttttacctaattaggcttgcaacgaacccctacatacggtagctttgcggggggattcttgagggtaatattgtgagccgactaaatctgattacaagttgcactaatagcaagcataataacggtcattcagtactgaatcttgccatcttttctgaaaaatataaaacgccgaaaggtttgattcatgcctggggtgaggccgtaaattcggctctatcgacgaagttagttgttcctgtagaaaagttatataagggggggcattggtcaacggcaatgtcaatatatgacgctcaacccattgaattatgggttctttcagctggttttggactgttgaaacatggggatgctatagttccttatcaagcgacatttgctacaggacataaagattccatacctcttttttccgataaatatggaaagaaatcctttcatcaagaatggtggggaaaattaaatgaagcatccccattaaaaaaatctcatcctgtatccttatctgacttaatgatggataagtccgatgagtattttattatctgtgcatcacctgattatataaacgcaataaacatggatttaatgaaaggcatctcttacttaaaggatgtcgatagacagttaatcattatatcttcttcgcaggctaaattttctttgaaaaaaaacctattggtaagcaataaatcaatcgctgagttttttaacagtaatatgcttatgttaaatattaaaatagctcagtatgtaattgaacagtttatgagtatggatgatggccatttagggttgcttgctgagcgtcttcgttcaacattttcagtactgcctaaaaagcatactgttcgcggggtgcgcaggagaccagaagaggtaactatttggatttcttcgtatatacatgcaaatccagatggaagtgcttcccgggcacttcggtcatttcgtgatcaaggcaatagttttgaagagaagcggtttcgaacgctgtaccaggcagttttgttgactaatcgataatgtcgcagcaataagactatgctaaaatctcacgttttttgacagtaaaaggcgtcacaggagatcagtgttgtcgaagctaaagtattttttcccggatagtcaggattttatcgatcctagtttcgacttccttcgagaaacgcgcaatgaacatcgtgttcgccagcgtgacgacctctatccgcatgaggttttcccccacccttatgatggaatgctagtttcgaaagcggttgtagatggcttaggtcgcggtgaaagtaaatatacgcgagcacaacgattacggtacttccggaatggaatgaaacatttctttcgtttgccagagacgatgcaaacaatgggagactgtggtgcatttacttatgtaaatcaagatgttcctccatatcgcgtcgaagacgttattgaattctatgaaacatcccgctttaactacggggtatcacttgaccatatcatttttggctacgaaaaaccgggagaatctttctcaggtgaggtgctggcagaatgtcgtcgtcgccaggatatcaccttgactctggcgcaggattttttagttaaatcgcagaagagttgcttcacgccctttggcgttgcgcacggttggaacaaggcatcttacagacaatcagtagaagcactgctggctatggggtataagaatatcaccatgggggggatggtgcccctgaaaacggcgcagatccttgaaaccttggaagagattaaaccacttctcaaaagtgatacccgggttcatctgcttggtattgcacgtccggagagctttacggatttcattcgtcttggtgttaccagtatcgactcaacaaccccccttcagcaggcgtttaaagatcgcaagaataactaccatacgcctgagggacgggcttatacagctgtgcgtgtgccgcagttcgatgccaaccctagtctcagtcgtaagataaaatctggcgttattgaccaggatgtggcgcgtcttctggaaaaagatgcgatgcatgccttggttgaatacgataaagacgcgttgtcgctagaaaaagttctggaggctgtaatggcctatgaacgtctacactcgggtgaaaaagaagcggagaagatccgtgccgattacgaacgtacgcttgccgaccaaccttggcggaagtgccagtgcaatatctgcaaatccattgggattaacgtgattattttccgtggcgccgagcgtaatcgccgtcgcggattccacaatattcaggtgctgtacagtcgcttgcagcacacattgtcattacgctcagaggattaatcatgagtgagtttcgtgtccccgccctgcgtattcgtcagggtgagaagagacagctttacagcttggccattgaaggcaaacaaatcagcaaaattgctgcgatttcacgcattcgacgcggagatgagaacctggttggttatcagcgtccggaagtacgtagccatattaaggaaatccagcgctatattgaaagcgcgaatccgatgatccccaaccccgtcattatcgctttcgatcagcgcgtacgctttgaaccgctgctggaaaacagtgatatggggcatctcgttattccgtattctgaggaggcaaacttcgacaaaccggggtttatcgttgatggacagcaacgtacagctgcgttaagagaagcggacatcaactcttttatgatgccggtatcggcatttatcgccaatgatgcagaagaacaacgcgaacagtttatgctggtgaactccaccaaaccgttgcctaaaacgctgttgtacgaactggctccgcatacgcatggccgcttgccttccgatctgcaactgcgcaaattcccttcactgctgacacagcgtcttaactttggtgaggggccattggctgggcgaattaagactgcgaccaacccggacggagtgattgctgacaactcaatgatcaaaatgatcgactctagcctacgtgagggggcgttgtatcgcttccgcgattcggcgactggtttgggcgacgaagcgaagatggtgaagctgctgaataacttctggtcagctgtagaaactgtgtttactgacgattgggataaaaaacctcgttactctcgcttgttacacggtgtggggattcttgctctcggtagcctgatggatgaaattgatcaagtgcatcaggagtacaaaggggaaccaggatggaccgagatcccttcctattcccgttttgtcgaagagttacatcgtatcaaaccgctttgcgcatggagcagcggtgtgtggaatttaggcacagatattgatggtcagcctattgtccgtaagtggaatgaagttcagaacctgtcgaaagatatatcgctggttactaattatctggtcacaaattatatcaaagcggcgaacgcaaccatttgaaaaaggggcgaaagccccttatttttgtctatgagctcatgaaccaagtcgtaatgcctgagggaatttatcctgtaatattcatggcatgttgaacacgggcgatgaatgcattcagaattgaacccgctcctttaccttcagggtaaataagatcgcgtcgatacggtgttaccgcatacagagcttgatgtttcgcgcttgaggcagcaaaaataaagtaatccgcctgttttgccaaattgactaacttgtccgtcgcggtatgatcatgattcacatctactttgattccctggaacaacgtctcaatcatccctcttgctcggcgcgcagcgccttcagtcaaggtataaatggcgacgcgttttcctgcaagattcggaagtgtctcaaactcactgtcatcacttcgtggtggttccggcggaaacgcagaatcggcacccctgcccaatacgtcgatggccagattacgcatgatcgtgcgggttgagtgatctagacgcggccacacaccaacagcacaagcttgaatattcatccacagagcgtttctaacctctttatcgtgttctggtgcatccaggaacagttcgatcatctcgccaagtgaagttatatttttaagcgaaccgcagcgttcaataatgagttgcagtgtcgcaacaaattcctgatagtcagtccgactgagagaaccttgaaggaaatgctccgttgctagcgtcgccagttgaatatctgccggactgacactttgttccatcgccagaacatccatccatttaagccaagttgagctcattaaaagcacttggtttttcctcagccagttaatgaaggccggcatagcattacgcagggtgggaaatgcctgtggcggaatattctgtgacagtaggcgaatgaatgtggattcttggaaggaggaggtggaccaatgttcgctttccagagcgacaatctgcaacagtgcatttccatcagcgttgggattgcacagatgtgagaaccaactatcccagccggagatatgagtggtagtaagccgttcgatactttcaatcagcgttataagtagtggaactttctttgcttgatctagcagttgtatatctatgttgcggagtgtgtcggcgtatgaattcagcgtgtcggttgttgccgtcagcgatgtttgtagataagaggccagtgattctagcgatgtaggaggcaaagagaatgagactggagattgtgtcgagatatcgtacctaattcctctaaggtcggcccactgctgtaattcttttagccagttggatttcagcgcttttggcagggcacttagcagggttggttcaccggctagcgccactccgattgcccaagttttccagatgttaagctcttcctcttcgtatcccagcagcggaacctgcataaagagcggatgtagagaaaggaaagcggggcgcaatactgagggggcctgctgcgcgtagctctgcatatcataacctaaatagcggttctgataagcagtgagcagcattctaaccagtgaagtaggaatgcgtcctctgatcagttcggggagatctggatggtttagcagggagtcccatttctgccatttcccagcctgttgaagttctagcaacagcaaattgcgtttagacagcagaccgttgtcacgtagttcctgtagatagctgtcactggccgctatctcattttgattcgttgccaacatgaaatcgctaaggatacgaccaaacgggcgcttgcgggtacgaacaagcgatggacgttggcgaaataacgtaattacttccgtcagtgcagtaaaaacccgcattttcgccagtttatcatcacgtttggcggccaacaattcaacacgaataaaccccgttgggcagtgctccaacagtatggtttccacggtgagcgtgggaccagaagcgggactcaggtaaatcctgcggtcaggttctacatcagcagaaccgagtcgggctccgatgacgttactgagttctaacagagtgcgctcatcttccgccatcgcaaagaaaacccagtttttgcggtcacaccacggcagaataatgggccattcgccatctcgtgcgctatccaccaaaggtagcagggcatttttttgctcttctggataagcaccaggtccgtcagtcagtaatttttcgaggctgagcaaattgccttcgccgaaaaaggctcgaagccaggagggaacattagtcatctctgtctccgaatgtatattgtccactgagctcaattagtgtgtcagaaataatggttttattggtggagaacagcaaatgttcatcattgaggtttgcaccactccaggtgtagttcatcgaacctctcaagaggaagtgctttgttaacatatccttagcatgcaagttctcatggtatgtgtattgcacatcatgatccggagagagccttgccagcagtcgttcaacgaacactttgttacgagtatcagggcgagtgacaatcctgagtggacagccgttatttgccgctgtagcaagcaattcctggaaactgatcattctggcaccccacgatgggtcaagaaaactccattggccgccgcgattatcaatgatgtcaaaatcacttatccagggcgagatcaaccagatgagttctggataaaggattagtccacagaactgtgcgctcagtacttccctaagttgtcgctgtccgagaggtccgtggagaaatatttgtcgttgctcttccattcattgctttccttactgcagggcttcagctagttcgattcgcaacacgatgttaccaccccgatagtctacggctcccattcgtggatagagatgcaggccgaaataatcgataggctccagttgtagtgtggacacgatctgtactatctgataacgggtttcccgagggatcaacagttcagcaaatccttcgcgagagattgctatatggatctgctgaagccagtcgctattggtcacatcaacttgtgttgcttgctgctggaagagagtgctgagcagcaatctttctgtcagtttcggcccattatcaaagggattgtagtagctgagtactgactgacgaaggggactgccacgctgccataacatgccctgaatctggcaaaaacggtcgaaaattttggtgacgttcgcatcaggcagttcctgagttgcttgggtatgggcgaatatatttaggctaacttcataacccgctttggcctctagtgcctgccattcccgcagatactctagcaagcgccgatcgtgagaggagtggctgccagggcgaagaatacgggtatgtagcacggacataaagctgtgagaaagagcaaatccttgttttttcagctgagcacgcagttgtccgttcgctgttcggcgatcgtgatgactttccgccatgcgcaaatcgttcagcgcattctgtaatgtagtgcttgaaggaagtcgagagagtagttcgaaaagatcatcatctatttgctcgtaatcgctggcggcgaaactgcgtataaacagatttagcagggcgactggatcgctgtggaacgcttcttcgaggcgggtgataattccacagcccccaggctctgattctgtgagccagatatcgaggtgctcgccatcaaaaacggcgtcaacaagcaatcctttgtcgtccacatctggtagcagtagatggccggtctgttttacggctccggagaaggtattgatcaacaaggtctgaagccactgacaaaatgaataactctggctgagatcttcagtaaacacagcactatgcgtatcaagcatcgcgagaagctgcggctcattgaacaggcttctcaactgctgctgtaactcttgacgttctgcaataccgttaccatcatcgtcgttttcaaagatattttcagcctggaatagtgaatcggcaatggttgccagcgactctctaccgtccggcgtgcgcagggcatgaattgcatcggcgacggtattgtggctgacgatctctttagtcagtgccgccagatagcactcgtagatccagtctgcagtgaagctgtcatgttcgaaacgcgcctcactgctaatgcggtgatggaaatagagcgtcctgagcgaactggctaatttggcgtcgttcatgacctgctgatgtagcgtggaaggcagggtgaagctcagcttcagaccatccacccactgacgagtacccaccgcaaccggctgaccattctcaacccatctgaaattaacccaagcctgttgtttgcttttactgcgcagcgaagcactagcggctgtggtataacgcgttagctcaagtggtgtcatatgctgatgggtatagaacgtggcggactgcaacactgtgctccatggacctgcgggaatcgccatcgtttcggcctgagcatttgtggcaaagtgagtatgccacttcagctgagaattgcttttctcggtcagattttgtttgaaatcaagggcccgagtaagtacctgcagaggacgaataactttcattggtggcgcatccgcaagcgtaatcaaacactcaggcagccaggtatcaccaaatgcctcgttgatctcgaaatcgacttctgaaacttggtttagtaacagaacaaaattgtgtggcaccagccagtcggcttcaagatcggaataaatggcgtagcgtttggagatgcggcccggtgcaaactccttcagcccctgaataaatggtaggtattcatgttttgtaaaagggcgctcaagctggatgctcagctcaggcaaattcagctcgctgaagagggctgccggaataaacaaaggcagcggtgagcggcctggtgttctgtctgcgccgggaatgcccatcagtgaccattgggtagtcaactggcgcttcagggtcggaagtagttccatcataatggaacgcggcggtgaccacatgatgtgctgaagctgcgattcggtaatttttagcgcgtagaacaagtactgttccagcccctgttgccagacgttttgttccagcacgacagaaatcagattgagcatctgttccagatgcccgtgttgctctctgtttttgggcggcttgtttagcagtgaccagatgttactgccggggatcttcatactcagccagtccagggttgccatcgccgcctgcattttctggatgtggatattatctaatggtagtgattggcccttgatttccggtgtcaccagctcttcataacgctggtacaccacgcggtcgcggccgaattctgacaacactactatcatccaagggcgcatagttcttgaacgtccggcgcgacctttgcgctgaagataagaagcgacgttacgcggtgctttgtgctgaatcacaaccccgactgagggatcgttaaagccaacttccagcgaagctgttgccacgacaacttcggctttggggtccaccccggtgtcctgactggaggtacgcgctacgatagcccgatcggaattatcaagcgggtgtccaatatcaatagctattcgccagttttgaccagcaagggtcagcgcattggatacaccgttgcgttcgttacgctgagccgccagcgggggctcgttgggcacaagttgcttcccgcgtgtacgccatccctcggcgtcgcaaagttggtgatagaggcgattattgatatccagatcgtcggtaaagacgaaagttttacggccccaggtgccgtgcgatgtggctttgcgggtatccattagtcggcgcgccaacatgctggtctggatggtggtagagagcaaggccgtttgcgaaacagggtcaccccgcagtgctaacaggtattcagcccctttatcctccatctcttggtaagtgggctcaattagcatgacatgttttttgttggcgcccactaagtctgcgaagaagcgttctgcgtcactcagtgttgctgagaggccgacaaagtgcgggcgacagcgtgccagttgcatccagcggcgtagcaaatatgcggtttgagcaccgctattgcctgaataagtatgaacctcatcaagcaacaccatcggcggtgcaattacatttatgcccacgccgaacaagtggttggccttgttattgccgaggtgttggttaagcatttcggtcgtggtgaacaaaatatccggtggattgttcattagtgatacacgagtgagcactacttcgtcttcacccacactatgtgtgcaatgcgtacagcggaggatctctttgccccggctgatatcttccgctttccagcgcatttcgccttggcatttaggcgtgttacagcgcagtaagtcgaaaggaatatctttgtctttatcaatgtactggatgctgtggggggtatcgccaaagaaagatccgatgcgtattttacgtccagatagttcaactgactgagcgtccacttctcggcattttccccaagtttccataaactggtctttgagtagttccttacggggatacagggccagcgtacggacccgtgctgaacgatcgcgttgcaggtcattgatgagcgaagttagtgcaggcagatagaacgccagggttttaccgctgccggtgccggcacatacgatcgtagccgttgcttctttgacgcgcgtatgattgctatggaaatcccatgctcgcaggatgcgagcagttgcccgggattgaaaaccagcaattgagaaatcaccgatcagtgctcgcaaggcttgacgcttgatgtcattcatccattcgacatcgctcaattggctcagaaccttctcagccggatacttcctttccggatagcttcgagggcggcggataaaacgataatccgccaccaacgtccgggtacgactcagttgctgaccgcgaaaccactggcgttggtgacgaaacagatgaacggattctgccattcgcgtgcgataaagttgcgtacctttagtatttgggatgctaaacaacattgcggcatcctgcagatcctgcatcaatattttgccattttcgtcgggaaaatggtgggtaaacagagacagaatatcagcatctgtaaacgcgccttccgtgtctccccagaccagcagttcggcttctcgcccttcgagtacatcaagcgccgcgtgtagacgagctaaatcctcagcaatcatgtcgctatttccttgtaatcacaaagtcttccaacatgtcttcatcacgcagccactcaaaaacttctgttgtaagtgtgctgagggttggtttgccattctgtggcccgttgattcggtcaaagaagtgttgaaccgccaaaggccagtcggttttcatcatgccgcgtaaggtgttcagatgttccgccatcgagcggatctgagtaatgctgtcgccattctcaggtaaggactgaaccagtacatcgaatttattgcgtaagtttgagtactcatcggcaatttcttttagtttgccgactttctgctgagcctcgagagttttgttgtcaacatgaatctgttgacgcaactcttgctgccactcttcccatgcgttgttcagttggccactaagtgtacggtacaggccaagtgacaggttcatgcagttggttaaggagtcattctgaatgatgtcataagccgttggctcttttgtagtagagtcttcgtccaactgtggatcgggattttcggtgctgatggcagcgccagccagagtctgatttttcagccagcgactccactgggacagcagattattaacgctatttgcagcgtttttaagttcattacgctgattttcgttccaggtaactcttaattctggcggcagacgttgcagggccgggtactgatacttcagacgactataatgcccagcgactgtatcggttttcgacagtaccacaccgcatttttcaataattagcgtggccttacttgcctgaacactcaaatcaagttgtttctgcatgtctgcaagctgttggcgtaacgtactcattcattcgctccagaggcgctgatatcagccgccagatttttcagtcgctcttcaacctgcttgcgagcattttcaagttttggcgcatcacccttactgtttatctgttgcagattaaaactgattttcgattgaatattctgccactgtgtaagcaggttgccgatgcgattgacataatcgccatccagatgggagatgtcgtgccatagcatgaagacatcctgttgtctggtgagggaattaagtgtttgcagggtatgtaggctggcttcagcatccactttcagtgcaccgatttcatccaatagccatgttgaatttctaatctgttcggtttccgctggatagtactgggtgcgaaccacttcgataaacgttttccagtcatcgagaagggcaatgaattcatcctgatttttcacatcctcaaagagttgtgcattcgcgatcgttgatgcgatctcttttctggctgtctctgccgcgcgttgtatctccgcacccagcggctcttttaggatctctttcaatgcgagggtgacaacttcggcttccaaggctcggattgaactgagcccagaactcaactcaggaactgcgacctgagaaagccacgcgtctcgcgcctcgtcccagccctgaagggcaacttgccgcgcttcagccactttaatgctggtgtgaggtttttgattagcttcaagcccgtagaaacagagagcggaaggggtagtgtctgctgtacgtcctcgggtttttccttgggttctgccaacccctttctgcgtcaggcaaagcgtatcaatcagttccgctggattctcttttcctgtcatcagtcccagcagtagtgctttttggtaatgattgcgcagtgcgggtttcaattttcgtgcgcgggcatgattaattgctttttcagtggtttgtgggacccaccaactgacaaagttttcataatggacatagtcttccagcgcttcagggtagtctcccccttgttcaagatcgatataatgttgaatacgcagtattgccagggacacgttgtagatttcgatcctacgtaacgggtcgttcagatctttacgatcgtagaactttacaatggcgttggaaggatcggaagctgaaagcggcaggctaattaacgggatacgctcgagcaacgagggcttttctaccatgccgaaaaactccgcttgggcgtagagctcataacaactgttaagtccggctcgcagatttcgggcaatatcttggggtaaaacgactttgtcgtttacccaagctttgagatgcctgataaaaggcagagtcgtattttccactagtggttttggctgtggaggagataccggtggtttaggaactatagctattttcttatcagtgtcgccatttctggttgaagtttcaggcattttgcctttgccgttcaggtgttcggctaattcattcagaccgaaagctttggcgacgcccggtgatagttgttttctgacttcatcccaggagtgacagttgtagccccagagtccggtcagtgtcgccgcgctggaaactcgatgggtagttaattggcttattttgtactgaatttcagcatccgtggtaatgcctgcaagattaggcggtgggaatgaaccttgttctgcttcaacacgacaatcccgcagaatatccaacaggatacggctaattactacgcgaggattgtaaacaagttgattgctgccgtctcgacagtatttatttgccagtgcccggatagcattgcggttaaatgggaacagcggaacgccctgtttggctgtactaccaaaatcatccagccattctggtacttcttcgtcctgccagactggaggccagtcatttaaaccttgcgctcgcgactgcttcagggctgctgcaccatgacgcgccgcgttcaagtagcgaccgcacagtgaaataatactttcttcacaactgtcgcttttatgtgtgctttcaatgctccattcatagccagccctcgttaccagcgtgccttgtcgacgtttataacctggatactcgttagtgaccgctatgaccgaatgtaccgggcagagtgttctcaccccgtcacgaacgccttcttcgattaggctatcaatcaatacgtcttcgatcgctgaaatagcagccatatcttccactaggattaccaggcggcgatcctgcgcaagtaattcacggcggatctcttgaaatagttcctgaaaattgccgccgttaaaggtgaagagcttggcaaataaagatttcagtgctgcatgcatcgcttcattcagaacatttacggcctgaactcgcgccttttcattatcatgttcatcaatacgagaatgtcgaatatattcgcgggcaagcgacgacaggtcatcaatgttgtcttggaaaaagaggtcgctaggcaccagttcgtacttgtcgtgatcctcatcactagcctttagcccatcgctcatacgactggcgcgtttgtagatgcaatgctccggcttgagcagattcagcttgaagttaggatcggttatcaggttgccaatgccattttcgacttcttcaataatggtattaatgcgtttatcaatatcggcaggaatctctttcccctgcttttcgtattccataccaagtgccatcgattcgtcgtacatgctctgtagttggtgtgacatcatggtcaatagcaggtcggcgaggtctttagcggaatgcgcttgggccacatcgtcaacgcgtttgcgcgcgtcatcaaaaaggcctccgtgcaggtttttcaggatcagtaacagcacttggcgcaagctggcgtttttcggaatacgaacaatttcccactgtgtaagctgacctttcgtctccaggtagcttttgagacggcagtccaaccagcgcaccagatgtgattttcccatccctgagtcgccaatcagtgggatagcacgctcggtagtaagcagttggtcaaaaagatcctcatcttggaggatctcctgattgttattgacgtcgcgacggatgagagccatcttttcatgcacagctagaagcacgtcatcctgcaattcttcagcttctttacggatgcattgctcgatgttctcaagggatggccagtagttcataatgctcattatgcgatctccctgagactaaccttgcttacggggcggatttcactagtgggaagttgcagggataacgattcggcatcatcacttccgaaagtcagttggatctgttggctgatctccagacgacggagcgcaagcgaagtgctggtactgatgtttttgccttccggtgcggaccacccccgttcggccatcatttcctgcactgtcactctaaaatcgccaccatccatcattggcatcgcttctgccatattggccataaaggctttgatgggcagggttttctggtcgccaaaaatttgcggtaaaaagcatttaattgcccgggtaggatcagtgtaatatttttggtctggagctaattccaggaagccaaggtagcgaccatattctataggtaatttttcactattactgttgatcgttcctgctggcaaccatttatgtacatttttagcaacttcagttactgaaagaggttctgcccccatcaatgtatgttgttgcaaacttagcaaacacgacagcactcgccacataggttcgcactcattcccttcggcgatgcctttttctttgcaggcttcgatggtgcattgcagcactcgctgatagagcggacgtgtttcttctggttgcggtagtagcgcttcattttccataggccaaagtcccaaacgacaccagaaggcaaggttctctctaatctttccccaggcattgtcgttcgcggggagattgtttgggcgatagcgagctatgatcgcatcctgagaaagcgaaacacgggcgttttgtacaatgcgatcaaacaaagggagcagcaccaggctgctgccagggttggcattattgatgattgacatattgtgattgcctgataaaagtgtctaggggcagagagttttctgcgctatcccaccattttctgtacggatgcagtggatctgccagatgctgcggggcgataataatacgttcataacgtgaggctggtagtgtcggtagcactgtggcggtatttgccacgatcacaatttctgctccgtttgacgttggtgctgcaagtttttgtacgctccagaaacgagacacagaatctaaagcgcgttccagatgaataaagttaactttatctgctcggatggtttcgtaattgccggaaccgatcagatggcgaagggtaacgcgaagttctgacagcaaagttcgaatatccatttcttcgctgtaatacacttttttttcagctccaacgaagcgtgcttttttctttggtgtcgattgcaagatttttacatcggtgccaacggttggagagaatgaggccttgccctgagcccggcaacctgggcagcctccacaggttagctcaggttcattattttgataaatataaaattttcttaaaacctgacacaaagatggttcgagatccttcagccattctcttaacaacgtaaaagctgcttgcctcttattcaattcttccctacgggctttttccacaaagttattccagtactcttccgaaaggtgtgaatcgttgcagtgacgaatatgtacttggctataataattggcaaaccaaccacggatcgcctgatcgtttttttctccaccttctcgtaagctttccggtagttcaggtgcagcaaacaccagttcaatcagtcctgtacgctgcatcagtaagagggttctgcggttccaggcttggttgcgatctccctgatagtcgatgtaatcgggtttggtatccagagagatacaatagttggcgatatcacttggctgacgttgttcaaacatcgctttccagcgtaagaaacctttttcgacgctgatgagtttttcaactgagagattttccgccgtctccatctgcgctggatgccagaccagatgtgcctgacacgctttgccgtcacgccctgcacgtccgcactcctgatagtagcgatcaatattttccggaacagcggcatgaatgatcgtgcggacgttgcttttattcatcccaacgccaaacgcagaagtggcaatcattatatctagttgatcgttcgcccattgtgaaattagctttctacgcgtcagcgtttccgtatcaccatggaacaggccgacacggtgatattgttgtagttgaagtcgttgataccagctttctgcttcttcttgagtcgtgcaatagagaatgagtggacgtgggagtgacatcaacaactgttcaacacgttgcttatgtgaggtcggattaggctcggtatgcacgaagtattcaggttcgggacgcaggaagttcgccgtgatttcaatgagttcactgtcatctgcacggaattgctccacaatgacgtcacgagtgttctggctccaggtggcggagagcagcagggtgcggaaacggcaatcaggctgggctttcagtgaacggatcaatggcgcaatgagctgaaagtcagggcggaattcggctccccattgatcaattagatgtgcttcgtcgataatgacggcaccaatcagattattttttgccagctcaaatagcaccggaaccagcgatgatttagctgcttccggtgagcaaaacagggctcgctgggtgccgtttttcagccgctctttcagtgtctggcgcgtcgtctgatcctgcccgccaacccacgcgtagcttccgccatgatcctgttcggccttgcgcagcatatcccgcatcaaatcggcttgttcaatcgccagtgctactgtcgggacaatgactaaagttaaggaacaggcaggagcgctgatagcctggatttgagttatcaggcttttgccgcaactggtaggtagatttatcaccaacgtactgttgatgtctgaggtgagcaacgtgcggattgctgcctgctgcccaaagccgcgatagtgcgtatgtggtgtatctaccagcaggtttttaagcgccggatccatctccggttgtagtaaattacgccgggttctgcattggtaagtagcttttgtgctatctaggtgcatatctacagagagtgacaacgtctgccctgcgactgattttaccagaccccaaagaggatggggcatatcctttattgttggtggagaggggagccacggttcttcgatgccattcgcctgtgcggctcgaagggcatcggcgtaaccagcaaaaatatcattctgaccagcggaggaatcggtaataatattcattaaccgtttaagaaagggattttcaatcccttccgtaaaggtcacatcttcattaaaacaggttgtcagcgccaactgtagacgcgaccattgttcaatcattaggcgactccggataaaatattgctgctacagatgatgatcgcttttactgacattaactggatataagcgctgtctccgaccaaaccacgctgtttttgcaaagctttatcataaacctgctcgaccatttctttccaagcatcagcggaaatcagttcttctatttcctgccatcttgaggcgcgcaggttgagatcaacatagcttttcgttgctgaaggatttttgctgtactcgctgtttagtatcttaaggagttgtggactggtcacaagagaactgtcagcagcaacccactcctgcactatgcgtggcggtgcaagctcgtcgcttttacgaaggtaggcgtaagggctgagggggtcgcaaccggtaatgagccaagtcatctcgaagaagtagcgaggggcgttgagttgcgcgttaatcatacgcagcaatgccacagaacttccacgtgcatcttgattcaggagttgccaaattgcatcgacaaagggctgaccatagcgcaaaggatataccgctgtcccgtcaatagccgagatacgctttgcgctcatcagatgtgtggaaggagggtaacccccctctttgtcaaagctgagcatacaggtcgtgaggaatgttttaaagtcgactagcgtacctgaactgcgttcagccagttcgaaacggaaccgtatgccctcttcagtatttcccgatgagcggaagcgtaatccctcggtgatccagagcgtcagggctttgctctgttctacagcggttaggtcgtcattgcttaactgctgcgcgaaaagtgcagcttgcacgacgtcttcatccatcgccagcagtttttcctgcatgttgattttgttagtttctctgaacaacacgccgttttcgcctggcaattctgtcgcaaggttttctagtacttgtggaccttctcggaacaacctgctccaggcatcgccaatatagtcatcaagcacaaattgaaggctggcgatagtgttgttaaatacgccaatgctgttcaccagaagatctgcccacagattacgtaaaccttgggcagcataattctttagcaaaaggctctgaattggtttgatccttatcagattggcactatagcgattgaggcgcccaagtcgctgctcgatacgactgcaggaacgcggcaagccgtagtgaacagccagacggcgccctccatggagattcagcccatcctcgccacttttatcgcacagaagtacccgaatggggctttgcggttgggtaaattgcaaagtttgacccggtagataacgttcaaccggatagtccaacaggatacttagtttgaccgacagatgttgcgccaactcagggcgatcgcagaacacaattgctttaccctccgggaattgcttcagccagtcattgagtgctgcagctaacatattgtcgatggcctgtagttcgtttttggccgttgagactatgtgttccagcaatgcctgttcatcggaaggaagagggtttgaagatgcaagagtcgcttttgcacgctgcatcacgcacaatggactggaaaatagatcgtcaacccagtcgatatagctcgcttcttttagcgaccagttatggttttgcggcagcactgccatggcccgatattcttccagtaactcgtccagcgtcagcccttcggtttgccagtgatactcaatcaccccatccagtccagggaatagcagatttaaattcaggttcttactttcgtcctgactaagggcgacttggcggcggtttctcaacaaacgatgatggattcgataatgttcaccaaggtgcaggcgtatcgctttaatacccgcttcacgctcaggcgttggctgagagaatctgccaattaacggaaacaagtcctggcacagcgttgttaactgatggtcatccggaaattgcgcaagaatttcatcaaggttacggcggagactgatgttagacactgacggtacaagggccgagaaaacgccaccaagactttcacggtttttcaccaattcggtgaacgcctttagatggttctcgtcaatctgataagcctctggattgatacaatgcagcatcgacaggaagttacgctcatgtccatgaagcggtgttcctgtaagtagcaacacataatgtgctctgtggcacgcctgtgaaatcaggccgaaattatggcgttcgtcttcatctattgaccatggccagtttgcaatttggtggatctcatcgacggtaaccagagatggtttgaatcctctgctaagcagaaggctggcttcagtataactgcagataactatcccttgcgcgatcccatcttgccttaatgaagagagtgttgtcgtcacatctacgagcaactgtctcagctgaaaacgttcacccaattcttcccgccactgcttaacgagttggttgggtacggcaatgagcatgctgacatgactggcttcttctagcgcgtgttcacgaatgatcatgcctgcttcaatcgtttttccgagccctacttcatctgccagaatatacttcggcgttttatcttgcagtacgcgccgtacaacagctaattgatgaggttcaagttcaactgcgctgcttgaaagggaagccattccccgacatgacgctcgctgctggatatacgtattgataaaggattgacggcgagggaagaaaaacggagcatcattcgtctgagaggcaaggaaatgggccggattaatcgggatatcagaggctttattgagaacgtagactttatcgatcgggagagtcgcagattcgtcttctcgaaagattaccagaaaatcgccattgggacgggatccgccaaaacgcgcgcgtacccatcgctggctttctggttcgatacaatatatcactgcctcatcgtgaggaattgtcggaatcaacttatccagacgagtatcagtgtgccgggcgaaaggttgcaagggggactcaaaaaatgcaactgttgcgcggttggcatcaatatcaacattagtaactttgccaatgccgtcaaaactatccgaaataaccaacgacccaattggtaatacactcatccacacaatccttgaaaatgctttctcagacacatttgattgaaaaatgtacagtcatgggatgcgattagagattttccacgtctgagtgacaatgtaagggaaagcaaaatttacgtacatgaggatagaatactgtgataaaccctatattcaagtagaaaatgtaaaaaatctctttggtttcacagaacgtaaatcaatgtggttaaacacaataagatatgtgaatcgccacggataatctagacacttctgagccgttgataatataggttttcatattcagccggtggcatctgctcgctcgaaccatgccgacgcttactgttataaaacatttcgatataatcaaaaatatcgcttctggcttcgtctctcgttccgtagatacttttcttaatccgttcgcgtttcagtagtttgaaaaagctttccgcaaccgcgttgtcatgacagttaccgcgacgactcatgctgccttccagagcgtgcgatttcaggaacgactgccactcatagctcgtatactgactgccctgaacagagtgaaccagtaccggctttgagggttacgcctccacaccgccataagtaatgcgttcaggataatctcttttatcatgcggggttacattgaccagtcgataacttttcgggagaacaggtcaaccaccacggccagatacagccagccttcgtgggttcggatgtcggttatgtccgtcacccaacgctcatccggtgagtccggattgtactgccgctggagcctgttggatgtcacgatgctggcttcacctttacgtgcacgtgggctacggtacccaacctgagcttttattccggcacgcttcatcagccgccaaacccggttcactacgcactgctgtccggtatcacgcaaatcgagatgtgtcttgcgataaccatagatgcagccagacttaagccagaactgtttgatctgcccggtcagcatctggtctgtctggtgacactgtgaatgtggctgcttaagccagaaataaaatccactcggatggacatccagaaccctacagagcaaacgaacaggccagcaacggctgttgtcgcggataaaggtgtacctcagtcgtacagctttgcgaagtacgccgcggctttttttaatatgtcccgttcgtccgtaatccgcttcaactctttctgaagacggcggatctcggcctgagcatctgactgttcattatgagtggaagaaaccggaccgtacttctttatcttggcgtaaaggctgtgagtggtgatatcgagacatgttgcaacactggaaacagaatgaccacgatcaacaacctgtttgactgcttcaattttaaactcttcaggataacgcttaccgctcatgggcacctctctttaagtcatcttaaatgactctgagatgtctgttaaatccgtggcgattcaatgaaatttaatttcaactactatttatggtattaaattatttcgattgatgttttgtattgagattttttattattttatgacactatttgatatatgctaaatttttatgatggcggttattgaaggtgattttttattttaattttatgtttaagcatttagatagccacaatttagttcttggctatctaaatgagtcactacacaccgcgataaatacatcccgcagtgcatgtttctttcacgactacagcacttagtattggtaacagaggcttaacctgattccatacccattcagctaagacttcactagttggattttccagacctggtatatcgttgagataatagtgatccaaacgatctaatgttggtttaaaaatcgctttaagttccgcaaaatcgataatccaaccggtatttttattcacctctccagtaatctcaaggcgaaccacaaaagaatgcccatgtaggcgcccgcatttatgtccgtcgggtacattaggtagtcggtgtgcagcttcgaatgtgaaatctttatacagggtcgttttcatagttacctcgtcttttgttataatataacaaagtaagttagggataggaagtgctacgatcttagtgacgtggcgctagtgttcattaagtagttcatcttttgacgacattactgctgattagcaactctgcataaatagttaggctcctaaagatctaggttagagctagcaaactagcgtttatgaagatggataagtttgtaagttgatatgggttgcaatatttagtctttgcacttctctccgagagatataactttgtctagtaacgccactttttggcgctattgacgttcgctcgattaacgaataaccatcacggatgttcctattcttcaatctctgaatcacttaatgcttgccgtcagtaatttgcaaagtagcctgactttctgacgcgatttgctggggttgcagcttcatgctgagtgggataccggtgcttaccttacctgtggggacctttggatctgtctttcttatgacgtatcacgcaactacgtagccacgcaggaaggcgactacacccactatgcattcagcatcgcgccagaggattttgagtcgttctcgtataagctgaaacaggcgggagtgacggtctggaaagacaataaaagcgaagggcaatctttctattttcttgacccggatggtcacaagtcggagttgcatgtgggagatttagcatctcgactggtgcaatgccgtgagaggctttactctggaatgcgtttcggatctggaaagtaagcacgcaactttgtgatcttccacccagtattcaattttatgtcccattctgggggcaaacccccaaactaaaatctcataaccaatttattttcaacaaattaaacgaaaaggcgagtccagccttcgcccccactctcaagcatcaatatcaaaacaaccaataaataatccctttaatctaacaacgacgaatcattgatcaaccacgaaatcctctccgaaacacagtcacaatccctaaaccctacgctccacattaaaccccacacaccatcccccctcatcccctgaacacctcccgccggtgccatgccacaaacccttcctgcggatagcattctttcccctgcggcaaggtaatcggcttaccatcaaaatcccagaacagcctgccaacgatgcccccgccgttcaccgccggcgaaacctggatgcgcatatcctcatccagaccaatggatcctttatcaaaagccttatggtgaatcgcgcagagcgccaggccgttagggatttcacatgggccgccgtgctgcttccatttgatatgggccgcttccagggcgacggaggtattatcatggcgcatattgaagccgcagatcgcgcactcatagttataggcgcgcagcacctgctggcgaaaatgcgggtcgcgctctttacggatctgctgcagatcaaatcccatctcttcagccagttcttcctgaatactctccgggaaatgcgcctcgaggatcagatgggcgagggtattgatcagcctcttatttttgttgagtaacgcaaaatgcggctcatcgaagccgccggcgacgttacagagctccagctctttgccgggcggctgtcggctgccctgggttgaacactggtcgctgttgtgcagctcccagaagccgtcgcctttcaggcgccagaagggcatatccggccggtactggcggcgctgcgggccaaagcgttccagcaggctatgcagctcatcgcgtatctccgaggcgtagtcgaacatccgcgcatggccgcgccggtactgtgagaggacgtacagcagcaacagtggcttatgcggcgcacgctgttcgcctttgcgccagatggtgatgttttcgatcgcgtgttgcagggtcgtgctggagggcatagcgttacagtggcagctaaataaatgcgatgatgctcgcaaaatccttgccgatcaacccaccagatgcggcgattccaggtggatcactttttaagtattacgacggatcttgctgtgggagtggagaccgcgttcgccgcctgcgacgcaagcctgaaaaaatcggaagcgcataaccgttgcgttcccacagttcacaaaccccacgctacctcaccggtagcgtgggccagctttctcttacttatcccgcgtctcgccagcctcccagctgtagctgccatcggccgctaacctatcgcccagctcctgatactcgaactgataaaactcagcctgggtgccgtacccggcgtagtctaccgccgccaggccgacgaacgccccggtaaagaacccgccgtagctctgcaatacatagtcatcggacagtaccgcggcatccagctgaaccgggatctcggtgaaggtcacgccatcgaagctatattcatagctgtaggtctgcttgcggaccttggtccggaaccagacgtattccacgccgtccggcaccatgatggcgttatctttcaggtacgacgtgtattttccgcggttattttcgccgacttcgatgaccttgccgttaatttcattccaggtcaggaagacgaagctccagtggcggtcgttatagtagtttgttaatccggccatctgctggtagctgaagggttcgaatttcaccttcaccgcggcgtcaaaatagaaggcctgccagcggcgggcaatcagcgacaggtcatgcgtattggctaacgaaccctggccgattaaggttaatttgccgtcgccggtggtgcccattttggccgtaaacggcactcgcagggtattccagttcgggtcgagcgctggcgaggtaaagtcatcctgctggctattatcgctggcgctttcggtgaagatggcgtctttcggcccgtcgacgaaggttttcccgccgtgaccgccttcaatacgcggccagccttcgtcgtcccagtatactttctggatcgcggtttcccggccgagggttgaccagccgcgcgggtcgtagatagattcccccgggcgattccacggccgggcgcagagcgaggcgtaataccattcgccttccggggtggagaccagcgcgccatggccctgtttctggatgtagctgtccggggtatcgacgttggttaagaacacgtcgcccggctcggtttcgaagctgtcggcctcgagggttttcgaccgcgccaccacctcctggtgggtaaacacggtgccgccctgggcggcaaacagatagtagtagccgttcagtttatagaggtgcggcccctcgaccagcgccacggcggtgccgcggtagatggtgcgcgcggtttccggcattaacttcagcgtcttggtatccagctccgttaaggtaatgccatcgaaggggtgatggtactcccggtgatcccaggtttgctggacgatatatttccggccatcgtcgtcatggaacagcgaggcgtcaaacccgacgccgttcagcttgatcgggtcgctccacgggccccgaatatccttcgccgtggtcaggtagttggtcatgtctttaaaggcgccttcggtgaccttcacatcggtatacaccaaccagaattgcccgtcggcccaggagagcgccggggcccaaatgccgccggaggaggggttgcccttcatatccagcagggtggtggtggagagcggcgaaggcagcaggttccagtttttcaggtctttggactcatgtaaacgcacgcccgggaaccactcaaacgtcgagttggcaatatagtacgtatcctcgacgcgaataatactggggtcggcattaaagccgcgtaatatcgggttttgaataagtgacatttcattacaccttttaaaatggaaagttaaggatcggtctgatttataatttttttaactacacgcggatctcatccagctgacggttgatgtcggtcacatgtttatcggagatcggataaacctgcatgatcaccatcgaaatagcggccagcgcaattgggatccacaccgcggtcataatgatcccgtcgatggcgctggcgctctgcacggcgccgctttcattaaatccatacaccgccagcagccacagcgggatagcgccgccgatggtgaagccgatcttgaagaagagtcccataatggcattgataatggcggcattgcgtttgcccgattttaattcgccgtacgcgataacttccggtaccagcgcccacataaagccggtggcggaggttaagccccactgtttaataaaggtggcgatgtaggccagccacagggcgtcgtgcatcccttcgcgggaccaggcgtaggtcagcagttcgccgacgatgaacatggcgaggaacagatggaagaagccttttttaccaaagatttttttcagtttcggccagaacaccgggaaggcgatgccgggaatagacgcgacgaggcccacggcgcccatccattcggagtggccgacgacgaactggttgaagaagccgttaacggtgttcatgaagaacatgaaggtaaaggccagcataaagaacatgccgagaataaccagcggacggttatgtctgagctcgtggaaaaggtcggtagttttgacgttggcggtctgctcggcggtcgcgaccacgcgttctttggtgcatttgtagcagataaacagggccaccgcgccgatgatcatatagatggcgtacacgccgaaccaggcgtagttcgctgacggatcggtatagttccccagattcagctcaaggccgaaaaagccggtatctttcaggctgcgatctttcggcgccgccatctgcacaaacatcgggaacagggtatagaccagcaggttggcgctgttggccagcatcatgcgggtactggtcagcttatcgatcgattccgggtcgcgggtcagcgacgcattcagcgagccatagggaatattgactaaggaataaaccaggtccagcgccagataaataataaaggcgaaagccaccgaacctttcaccccagggattggcgcgaacagtaatgccgacaggatcaccagcggcacgccggctcgtaacagccagggtcgatatttccctgcttttgaggttcgtttatccacgtaggttccgaccatcggatcccaaaacacattaatgatacggacaaaaagaaaaataaagcctgccgttgccgtgctgatggtatttaccgtcagcatatgcaaagccagaaaacccccaattgtgccgaaaaccaggttttgcgcaaagtcgcccatgccataaccaattcgttctccacgggttaatttatgatattcatcatgccgactgtgcattatgtttttactcattctaagcagactccggtttgttttgtgtaggtgaaacactttctgacacagttgacctggaagaatctattacgtttttaaattacgtaattatgtttttttacttctgtgatcctcgaagcaaaggcctgtatcgcctgcgttgaaccgttatccgccgctaattttttggcaggcgggcattgtgacaaaaccggcattttaatttggtatggatacctgaattccccaggaagtgtacgctatacgcgcgcgaagcgagatatttaaaatagttttatttgcgagatggctcacatttgagcattttctcaatcgccgagtgaaataacgtaattgagcaaccgacgatgagaatacacgatgtgtcacagttgttaattttcctgtttctcaatttcggagttcatcatgcaaacctatttcgaccaggtagatcgcgttcgctttgccggacccaaaaccgataatccgctggcgtttcgccactataatccggatgaaatcgtgctgggaaaacgcatggcagatcatctgcgttttgccgcctgttactggcataatttctgctggaatggcgcggatatgtttggcgccggctcgtttgagcgtccctggcaggccgcgggcgatgcgctggaaatggccaaacgcaaagcggacgtggcgtttgaatttttctacaagctcaacgtgccgtattactgcttccacgatgtcgacgtctcgccagaaggcgcgtcgctgaaagaatatctgcacaatttcgccatcatgaccgaggtgctggcggaaaaacagcagcaaaccggcgtgaaactgctgtggggcaccgccaactgctttacccacccgcgctacggcgccggggcggcgaccaaccccgatccggaggtatttgcctgggcggccacgcaggtagtgaccgccatgaatgccacccaccggctcggcggcgaaaactatgtgctgtggggcggccgcgaaggttacgagtccctgctgaataccgatctgcgccaggagcgcgagcagattggccgcttcctgcagatggtggtggagcacaagcataagattggctttggcggcacgctgcttatcgagccgaaaccgcaggagcccactaagcatcagtacgattacgatgtcgcgacggtgtatggtttcctgaagcagtttggtctggaaaatgagatcaaggtgaacattgaagccaaccacgccaccctggcggggcactctttccaccatgaaatcgccagtgccatcgcgctgggcattttcggctccgttgatgccaaccgcggcgatgcgcagctcggctgggataccgatcagttcccgaacagcgtggaagaaaataccctggtgatgtatgagatcctcaaagccgggggattcactaccggcggcctgaactttgacgccaaagttcgccggcagagcaccgacaaatacgacatgttctatggccatattggcgccatggacgtgatggcgctgtcccttaagctggccgcgcgcatgattgaggatggcaagctcgatcagggtctggcaaaacgctatgccggctggcagggcgagctggggcagaaaattatgagcgggcagatgtcgctggataatattgcccgatacgctgagcagcataatctgaatccgcagcctcagagcgggcgtcaggaattactcgaaaatctcgtcaatacctatatctttggttaatttttgctgacatgcccccgcgggggcatgtattccgccgtctatccgctgccgggaaatagcgtttattggttcgtgctgtgttttttttgtcagtggcgaaagaccacctgtttaatatcagcgaaggaggaagggtaacgataattgtgtaacgcctctgtgaccgtacaaaataaaaaataacttgttctgatgatagcgacatattctgtcagctcagaataggctggttattgtctgaataaaattaacctatattgagaaactcatgacaatgataaaaaagcttccattaaccatggcggttatcgccgcgttttttccgcttacctctgtaatggcgcaagaatttactcaggaacagatcgacgccatcgtcgccaaagccgttgataaagcgctggccgaccgccaggcgaaaatcgacgccgcggccgacaaaaaggtcgacgtgatcaccaacccgcagaccaccgccgcctcgccggatatggccattccgtttggcctcaagttcagcggctacgcccgctatggcgcccacttccagaccggcgaccagaaatatgtcggcgtcgacggctcctataacggcgcctcggcgatcggccgtctgggcaacgaaagcaacg

SEQ ID NO: 81 - DNA, 39172 bp, Unknown
  source: /note="Description of Unknown: MKP2_coc_1 Mutant Bacteria sequence"
cgctctcctctcgggtctcgtgggctctgatatgtgtatcagagccagatgcctcctaagcgcattccggtggcctgcgcggcgatcctgaccgccgcccagcgtacgccggggctgatggcgacgctctacgccagccaactccagcagcatgagcgggcgctgggcggctggcaggcggagtgggagaccctgccggagctaattaccctggtgggcggggcgttggcgcaaagcgaggcgctggtgcgcgacatgcaggttttcccgcagaaaatgcgcgccgatctcgatatcacccatgggctgattatggctgaggcggtgactctggcgctggcggaattcattggcaaagccgaggcgcatcatcatatcgaggcgctgtgccgccaggcgctggaccgtcactgcccgctggtcgatctgctcgcggctgacccacaggtcagtcagtatctctctcgtgaacgcttaaccacgctgctggacccggcaacggcgaccggcagcgccgaacgctttgtgcgccaggtgctggcgcgttatcaggagcaacgtgatgaatcttgattatcaactcgacgggccggatggcgcgccggttatcgtcctctccaattcgctgggcaccacccgggcgatgtggcagccgcagatcgaggcgttaaccgcacatttccgggtgctgcgctacgacacgcacggccacggtaaaacgacgaaaaatggcaaagtgaccctcgcccagttgggtgaggatgtgattgcgctgctcgatcacctgaatatcgaccgcgcctggttctgcgggatctcgatgggcggtttgaccggcctgtggctgggacgctttgcgccggagcgttttcatggtctggcggtcgccaacaccgcggcgcgcattggcgatcaggccagctggctgtcgcgggcgcgggccgtacgtcaggaggggatggcggtggtggccgccggagcggcagaccgctggtttacccacgcgtttcgccagaaggcgccggaggtggtcgaggcgctttgtcaccagctgacccataccgatgctgaaggctatgccgcctgctgtgaggcgctggccgccgccgacctgcggggcgaagtggggcagatcccgctgccgacgctaatcatcgccggggaaagtgaccctgtcaccacggtcggtgacgctcatttcctgcagcagcagatccccgcctccgaggtggtggttctggcggcatcgcatctgtctaacattgaggcgccgaaaagctttacttcagcgctgctgagctttttccagggggaacgccatggatgataaacagcgctatcaggacgggatggcggtacggcgcaaagtattgggcgacgcccacgtcgaccgtacgctgcagcatctgacgccgttgaatgatgagtttcaggactttattacccgctatgcctggggcgagacctggacgcgtccggggctcgatcaccatacccgcagcatgatcactattgccatgctgatcgctctcaatcgcgaggcggagctgaagatgcatctgcgcgcgtcgtttaacaacggggtgacccgcgatgagctgaaagagctgatcatgcactctgcgctgtactgcgggctgccggcggccaatgccacgatgcatctggcgcagcaggtgtttgacgacatcgacgccgcgcagggttgagtcgtcgtccgggtcggattgcccggcagtcgttgtaggccgggtaaggcgcagtcgccacccggcgaaataacgtcacaactgaatatttccctgttcgcgctgcgtctggcagggctacaacttctatgttaattccgggcagattgcgctcccggttgatcttctgcgttatgtctcgtatggcgcagggagcgcacagggggcggccagtcgccgccgccccctgtacccccgggctccggccagcaaaatcgccactgcgtggtaccttcgacttatccctgcaggctgcgggtcgggccgaggcagcgtccctgcaaaacacggccctcagcccgcatccatgcgggctgccccggccttccgggaacgtctcagcgattttgaggccgccagcaccggcagtttcagtcgcgcaagtgggtaaatgagtgacaggccgcacgaacccctaggccgggtaaggcgcagccgccacccggcgaaatggcgggtacggcgccgatagattgcccggcggcgcagcgcttgccgggcctgggaagcgaagatcgcctgtataccccgtaggccgggtaaggcgcagccgccacccggcgaaatggcgggtatggcgccgatagattgcccggcggcgcagcgcttgccgggcctgggaagcaaagatcgcctgtagaccccgtaggccgggtaaggcgcagccgccacccggcgaaatgacggcacaaccggaaatgtccctgttcgcactatgtttggcaggaccacaacgtttggcagggctacaacttctatgttaattccgggcagattgcgctcccggttgatcttctgcgttatgtctcgtatggcgcagggagcgcacagggggcggccagtcgccgccgccccctgtacccgagaaagatgaccagcacagcatagagtcgaacttcaatattgccgagatagcgccgccagtgctgcggtatggcgctacgtttttcgaggatccgcagcaggaaaaaacgtcgcacccgccgccaggcgcggaaggcgccgtagtaaaacagcgccagcagcagcgccccggccagggctttaccggcggagatgaacagatagcggttgttgaactgctcctggaggctggtgcgctgggcttccatacgcgccagcacccgctgggctgcctggtcgagggttaaatcatcgccctcgtcgagatccgcctggctcagcagcagcaccggtttgccgttcatcagaaacagtctgcctggctgaccatagcggataaccggcacgacccgcagcggctggcgaatatcatcttcggtgaaggcgcgcagggcgctacgggtgcgcaaaacgcgctcttcgggcgtggtctggccaaaggtggcctgcaacatgacgacaggttggtggaaaatcgtgaccgtgcgtgcctgctcgcgcgcggttggctgctgtcgcggttcggcggccagcgccggctggagcaccagcagcgccagcgcccagaggataacgatgcttatcctgttcattgaggcacctgagataagaattattgttatttttcagcaaaaaacggagggcttgtagttgagcatagcctggtgcgaagtgaattcaagctggggaaacgcggacataaaaaagccgtcgcccaaacggcgacggcctgatatcagcgtcagaggatagcgttagccgtgctgtttacagcccgcgcactgcttattctggatctgctggaagaagtcgttgcctttatcatcgacgaggataaacgccggaaaatcttccacttcgattttccagatagcttccatccccagttccggataggccacgcactcgaggctcttgatactctgctgggcgagcactgccgccgggccgccgatgcttccaaggtagaagccgccgtgtttatggcaggcatcggtcacctgctggctgcggttgcctttcgccagcatcaccatgctcgcgccgtgcgactgcagcagatcaacgtaagagtccatgcggccggcagtggttgggccgagggagccggaagcgtaaccggctggcgtttttgccgggcccgcgtagtagatcgggtgatctttgacgtactgcggcagcgcctcgccgttgtcgataagctccttcagcttggcgtgggcgatgtcgcgggccacgataatggtgccgttaaggctcaggcgggtggagaccggatgtgccgacagctgcgccaggatctcgctcatcggctgattcaggttgatgcttaccacctcgccttcgccggcctgacgcagatgctcaggaatatattttcccggattgctctccagcttctcgatccagataccgtcgcggttaattttggctttgatattgcggtcggcggagcaggagacgcccatgccgatcgggcaggaggcgccgtggcgcggcagtcggatcacccggatatcgtgggcgaagtatttcccgccgaactgcgcgccgaggccgaggttctgcgcttcctgcagcaattcctgctccagctgcacgtcgcggaacgcctgaccgtgttcgttaccttcggtcggcagaccgtcgtaatagcgggtcgaggccagtttcacggtcttcagcgtcgcttccgccgaggtgccgccgattacaaacgcgatgtggtacggcgggcaggcggcggtgccgagagtgcgcatcttctcaacgaggtagtttttcagcttcgccggggtgatcagggccttggtctcctggtacagataggttttgttggcggaaccgccgcctttcgccatgcacaggaacttatattcttcaccgtcgacgctgtagagatcgatctgcgccggcaggttggtgccggtgttaacctctttatacatatccagcggcgcgttctgtgagtagcgcaggttatcttcggtataggtgttgtaaacgccctgcgccagggcggcttcatcgccgccgccggtccagacgcgctggccttttttccccatgataatcgcggtgccggtatcctggcaggtcggcagcacgcccttggcggcaatttccgagttgcgcaggaactgcagggcgacatatttatcgttatcgctggcttccgggtcgagcaaaatcgaggcgacctgttgctgatgggagacgcgcagcataaaggcggcgtcgtggaaggcctgctgagcgagcagggtcagcgcctgcggctctactttcaggacctgctggccgtcaaattcggcgacggagacgtgctctttgctgagcagatagtattccgtatcgtcgtgcgccagcggaaacggatcctgataaacaaacggtttagtcgacatagtcacttactccataaagataaaaaccgccggggtagtcccggcggttatgaatcagaacatcatggacatccacggatagccaatcagcagcagggcggccaggaagatggcgccaaagatggtgccgaggcgccagtaatctttggtcggcaggtagccgctgccgtagtagattgggcttgggccagtaccgtacggggtgatgatccccatcacgcccagcgaggtgaccatcagcaggacaaacacttccatattcattcccgggatagtcgaggcaatggtcagcatggccggcagcagcgcggtggtgtgcgcggtggtgctggcaaacagatagtgcagcaggtagaacgccagcagcaggacgatggttgccatccccggggagatgccgctcatcagcgcgccgccctctttacccagccaggcgataaagccggtggaggagaggccgtcggccagtgccaccagggtggcgaaccagacaaaggtgttccatgccgctttgttgttggtgatatcgctccaggagagcacgccggtccacagcatcagcacgataaccagcagggcagccagcgccggttcgatccagtcggcggcgaagatccacatcatcagcgcgaagcagacgaagaccagcagcagaatttcattgcgcgacagtttgcccagtttttccagttcacgcgcggcccacagtggcacttcgttattgactttcacttccggcgggtagaaccagtaggccagcagcggcatggccagaatcagcaggatacccagcggcaggaaggcgatgaaccaggtgccccaggagatattgatgccaacaatgcttttgaccagcgccagggccagcaggttcggggccagagccgacaggaacatcgagctggtaatacaggcggcggtgatcgctacccacatcagataggaaccgattttacgtgcgctcggatcgtttggctttgaaccgtacagcggcggcaggttagcgataatcgggtagatagtccccccgctgcgtgcggtattagacggcgtaaacggcgccagcagcagatccgcgaaggtgatggcgtagccgagcgtcaggctgcgacggccaagatatttcaccagaatcagcgccaggcggcggccgaactgcgttttatcgtagccggcggcgaacatgaacgcgccgaagataagccacacggtggagttgccgaagccgctcaccgcccacttaaaggaggcgccagccattttgaagcctggcgcggccatctgatccgggctgaacagcagccactggctgcacagggcaataactaccacgccggtgataccgataacggcgccgggcagcggttcaaaaatcaacccgacgatcaccccgacaaagatagcgaagtagtgccaggcgtacggcggcaggccttcggggaccgggacgaacaataacagcacggcaacgataatcggcagcgccatcatcaggagaggttttttattcgcagtcgttggcttgactgcaccggcaggcggtatggttgtctttttctctttcataatgagtatctgcaagttgttgaaaataacgtttacgccagcgtcttgctcagtggtttctttaattacaaaagttactttagtttttattttgcgtttctgagtatcgacagggcgcttatttaacgcgttttatgaggcgttaaattaaatttgttggttatttatatattgcgctttcaatggccgttgcaattgatcaagatcaataaaagccggtgatttcactatttttttattatcagtataaccctatatgatgaggtgttattttggcgaaaatatcgatagatgttaaaataaaaatgaacaataaatgctgaaattattttatgttttattatctttatgattctattgtattttttgttgtttccttgtcattgtctatgttaacaaaagtatcctaattgttatcacgcatttgtattatgtaaatgctatttattattttaataatacaatagaggtagcgatgttattgctggggttaaatagttttataactaacgtaattggtttagtaattaaaaaacgcgctatattattggcatgacaacaggaattaaaaaaccaaaaccattaatgattccgtcacctcattctgagcttttaatattttaaaatctggagcgtaacttatgaccagtaacgaacgtattttgcagccatttactttaccaaatggtaccgagctgaaaaaccgtttgctcatggcgccaatgaccacctgcaccggttatttcgatggtactgtcaccagcgagctggtggagtactaccgcgcgcgcgccggaagcatcggtaccattattgtcgagtgctgctttattgatgactacggtctggccttcccgggcgcgatcggcattgataatgatgaaaaaattgccggcctggcgaaaatcgctgaggcgatcaaagccgagggttcaaaagcgattctgcagatctaccacggcggccgtatggtcgacccgcagctgatcggggggcgccagccggtggcgccgagcgctattgccgcgccgcgtgagggcgccgccatgccgcgggcgctgagcggagaagaagtggaagggatgatcgccaagtttggcgacggcgttcgtcgcgccattctcgccggtttcgacggggtcgaaattcacggcgccaacacctatctcattcagcagttctattcgccgaactccaaccagcgcgatgacgagtggggcggtagccgcgacaaccgcgcccgtttcccactggcggtgctggatattacccacaaaatggcccgccagtatgctgacgatgcctttatcatcggctatcgcttctcgccggaggagatggaggtcccggggatccgctttgacgacaccatgtatctgctggaaaagctggccgcccgcggtgtcgactatctgcacttctcggtgggtgccaccctgcgtccgtctatcgtcgataccagcgatgcgacgccgctgatcgagaaatactgcgcgatgcgctctgacaccctcgcccaggtgccggtgatgggcgtcggcggggtggtgaacgccgctgatgccgagcagggcctcgatcatggttatgacctgatcgccgtgggccgcgcctgcatcgcctatccggactgggcgtcacgtatcgccgccggcgaagagctggagctgtttatcgacagcacccagcgtgaagcgctgcacattccggaaccgctatggcgtttctcgctggtggaagcgatgatccgcgacatgagcatgggcgacgccaaatttaaaccggggatgtttgttgagaccgtccacgatgacgccaatgagctggtgatcaacgtcagcctcgaaaatgaccatattgccgatatcgaactggcggcgagcccggtccagactgtggaattcaccaccagcttcgaagagatccgcgaacgtattctcaccgccaataccccgcacgtcgatgccatttccggggccaccagccagagcgaggcggtgaaaaaagcggtcgccaaagcgatgctgaaatcgagtaaagcgctggcggcggaagagggcggcaatgacgccgcgccgaaaagctatgatgtggtggtagtcggcagcggcggcgccggtctggcggcagccattcaggcacacgacgaaggggccagcgtgctgatcgttgaaaaaatgccaaccatcggcgggaacaccatcaaggcttccgccgggatgaacgccgcggaaacccgcttccagcgcgtgaagggtatcgaagacagtaaagagctgttctatcaggaaaccctgaagggcggccacaacaaaaacaacccgcagctgctgcgccgtttcgttgaaaacgcgccgcaagccattgagtggctggcggaccggggcattatgctcaacgacattaccaccaccggtgggatgagcattgaccgtacccaccgcccgcgcgacgggtcagcggtcggcggctatctgattagcggcctggtgcgcaacatcaccaaacgcggtattgacgtcctgctggatacctcggtggaagagatcctgatgcgcggggatgaggttagcggtgtacgtctgatcaacgacgaaaaagaggtcattgaagtacagaccaaaagcatcgtagtggccaccggcggcttcagcgctaacagcgcgatggtcgtgaagtatcgtcctgaccttgaaggcttcgtcaccactaaccacaaaggggctaccgggagcggtatcgcgttgctggaacgcatcggcgccggcaccgtggacatgggcgaaattcagattcacccgaccgtcgagcagcagacctcgtatctgatttccgaatcgattcgcggcggcggcgctattctcgttaaccagcaggggaaccgcttcttcaacgagatggagacccgcgataaagtctcggcggcgattatcgctctgccggaacactatgcttacatcgtcttcgacgagcatgtgcgggcgaaaaacaaagctgccgacgagtacatcgccaaaggcttcgtcaccagcgccagctcaccgcgggaactggcggacaaactggggatggattaccataccttcctcgccaccctcgagtgctataacggggcggtggaaaaacagcatgatgaacagtttggccggaccaccgcgctgcgcgcgccgattaacgaaggcccgttccacgctattcgcatcgcccccggggtgcaccacaccatgggcggcgtgaccattaataccgatggcgaagtgctgaatgtggcgcagcagccgattcgcggcgcctacgccgccggtgaagtggtgggcgggatccacggcggcaaccgtatcggcggtaacgcggtggcggatatcattatcttcggtaccctcgcgggccatcaggcggcgaaacgtgccagaggataacctgtaaccttgctcctgccgggttggcgctttcaccgcccggcttgccccttctaaggagagcccgatgtccgataaccgcgtctatagctactccgccgtgttgatgggctcgcccatcctgctcaaactctgttcccacgatgaggcgatggcctcccgcgttttccagcttatcaagcgctacgaagacctgcttaccgttaaccgcgccgagtcgcaggtgatggatatcaaccatgccgccgggcgtcatccggtcaccgtcagccgaccggtctttcagctgatccagtgcgccaaagccgccagcatggtgcgcgacagcgcctttaacctcgccatcggcccgctggtgaagctgtggcgaattggttttcacgggcacagcgtgcctgacgcggctgatatcagagcccgactggcgctgacccgcccacaggaggtgatcctcgatgaggcaacctgcagcgtgtttctccaacagccggggatggagctggatctcggggcgatcgccaaaggttatatcgctgaccgcgtgcgcgattatctccgtcagcagcaggtggagaaggcgctgatcaacctcggcggcaatgtgcataccctcggcgaatgggccattggcctgaaaaaaccatttgccgacgcgcaggcgctgatcggttccctgacggtcaacgggcaatcggtagtcacctccgggacctacgagcgctatttcgaacaggatggcaaacgctggcaccatattctcgacccgcgcagcggttatccgctggacaacgaactcgatagcgtgacggtcatttccgcggattctttagacggcgacatctggaccacgctgctgttcggcctcggcgtggagaagggctgcgcagcgctgcgtcagcggcaggatatcgacgcgattttcgttaccaaaaatcgcgacattattctctcatcgccgcagcggctgcgttttgcgccgctggacagcggctatcgggttattgactgtactgcttaagcaaactgtactgttcggcgaccaggcggtagcgatagaccggccgcccggtagcgccgtagtggatagtggtatagagaatattgatctgcgccagccaaatcagatatttgcggcaggaaacgcgggagatattcaccgccgccgccagctcatcggtagagaattcgacatccggatgggcgtcaatccactggcagagtgtgcgcagcgtttgcgcggttaaccctttaggcagcttgcgcgcgtcgctggcctccggcgcgccgccgtgcagcaggcggtcgacatcggcctgttcgtaatagggctggccggttattagcttacgcttctcccgccaggtggtgagcgcctcttcaaagcgcggaaactggaagggtttgatcaggtaatcgaccaccccgtaatgcatcgcggtctgtaccgtggcggcatccgccgccgaggtaatcatgataacgtcgatggcgcgccccgactcgcggatggtcggcaggagatcgagcccgctgtcctgctgcatgtagacatccagcagcaccagatcgatctcctgctgcggatcgttaatcatctcctgggcctgactgagcgtcgaagcgctcccgctgcaacgaaagccgggaacccttgccacgtacaggcgattcagttcggccaccatggcatcatcgtcaacaattaaaacatttatcacgcaggtttccttttactatcccaggggagatgaacaaaaaattgggtaaatacgccgggttccgattcgacggcgagggtgccgccgagctcgcgcaactgctggttggcaagaaacagcccgacgccgcgattctcgcctttggtggagaagcctttgttaaagatagcgtcgatgttgttctccgggatccccggcccatcgtcgctcacttcaccgcttagccagccgtcctggtagtgcagcagcaggccgatctcaccctccgcctggccgctcatggcgtccagcgcgttctcaataaggttgcccagcaccgtcaccagcaccgtgacctgtttctcgttcggacaatccggcaccaggctctcctccgccagcgtcagggtaaagccgcactctgtggcgcgctgaattttacttatcaggaagccggccaccaccggggatttaatgcgatgttgaatgtcgccgatgtccgcctggtagcggtgggcggtctgcagcacgtattcctcgagtttgccgtagcttttcatattcagcagaccgaggatcacgtgcaatttattcataaactcatgggaggtggtgcgcagggcatccacatagctcatcatgccgtccagtcgctgcagcaattggctgacctcagttttatcgcggaaggtacagatggcgccgacaaccgcaccctggctgcgaatgggcactgtattgccgatcagcagcagaccattgcaccccagttcgcggtcgtacattggctcgccgctttgcagtacggtctgcagatcgtcgagcagggggctgtgaacgagagtcttatccgggccggaaaagaggatctcttccgccgcggggttgatgagatttacctcgccatgggcatcgaccgccaccaccccctccttgagggcgtgaagcatggcctgacgctgctgaaactgggtggatatttcgtgcggctccagccccagcagcacgcgcttcaggccgcgaaccaggctccaggtgcccagcgcgcagaccagcgcgctgaacaggatggtcagcagcacgtcccaacggctgttggcgatctgttcgtccactttactcagtgaaatgccgaccaccaccacgccgatttgctgatgccgttcgttgaacaccggcgtaaacacccgtagcgccggggccagcaccccgtggttgatggcgacattctcttttccctgcagcgtcggctgaatatcgtggccgatgaacggtttgccgatgattgagctgtccggatgcgaatagcgaataccctgcatatcggtaacgatagcgtacaacaggtcgttgcggcgggtaatggcctgcgccagcggctgaatgatctgctgctgcgggggcgcctccagtccgcgcttcacctgcggcatatcggccatggtgcgcgccaccgccagcgcggtctctttcagaccgtcgcgggtggcgttgctgatctgcatataccacaaggcatacaccagcagcagcacggcgccgatgacgctgccgatcatcaaggacacggcggtgctcagctttaacggtaaggcgcgttggcgaacgcgaggcgggtgctctgaagccttcatgacgaccccgggtagattcagtgaaagattattatcgccgatagcgcggcatacataaagccgtgtaatcaaagcaaaaggccgcttttgctacggcagactcctccagcgcgcggtacactgcggcttttcgccacaggcttaagggagacactatggaactggcttctctggtccgggatatcctccggcagcggcacgttgaacgactggcccagcatcgtgaacaggataatgaagcggaagcagagtgggagatcgcccgctggcggcatcgcagcggggtggtgatccagcgccgctatgagctcgagatcgcgcagcaggatagcgcatcctgcccggagtgctggattgactggcaggttatcgacgccgccggccaggaggtcaacccgatgcgcaaacagttttataacctttgccagcaatccttctggctggctatgcaggcgggtggtgaagatgagacctcagacagaattgctcagataaccgtcaatcacccgtaaacgcgcgttggggacggtaaactgtgaccccgacggcggtaaagcgcagaacattccacttatagtggcggcagaggttaaatagtcctgatgaatataaggatatgcatcaggccgctgattttgccgagatgcgctttttctgtcgtaaatggaggttgttatgagcagttcgctaaccgcgtcaatgcaggctcgtcgtcacccggagaccacccacatcgatcgcctcgccaccgccgatatgctggcgatgctgcatcaggatgataagcagatttcggaggcggtcggcgcctgtctgccggatatcgcccggctgattgatatcgccaccgcgacgataagccggggagggcgcctggtcattattggcgccggcgcttcgggccggacggccattgaggcggtcagcgactattcgccggaaggtaaacacgcgctggtggggctgattgccggtgggcagacgacggcgatggccgagcgggagactgcagcgaataattatgacctgggcgcctttgagctgcagtcgctggacttcagcaaccgcgatatgctgctggcgctgaccgtcagcggcaagacgccatgggtgtggggggcgatgcgccacgcctggtcgctgggcgccccgatagcggtcatcacccagcagccgaccagcgaggcggcgcagctggcggatatcattattgctccgcagaccgggccggaggcggtggcggggttagccaatccgaaggctcagttggcccagaggcagatcgtcaatatgctgacaaccggactcgccatccgtgacggtcgggtgtacagcaatttgcgggtggacgtgcaggctgacaattcgcactgggcggagcggcagatagcgattgtgatggcggccaccgattgcacgcgcagtgaagcaaaggccgccctggccagctgtcatcagcactgccgcaccgcgatcctgatgctgctcagcgggcttgacgcctggcacgcgcgggagctgctaaccaaacatcacgatcatctgcgtctcgccctgcgtgaagcccagcgtagcgctgtcactcccgcccagtaatcccttctctgccaggcgcgcgatgagcatgcgcgcctggacttttgtaattaaagaaattcttatcttttattttacccggcaatagatattgaattttcgaccttattttttatccgtcttcgctctatttttaaaattgattttttaagttaaataactgtttggtttaaaatgcgagagtgtaaatgatattttaaaataaagtaaaagtgcgttaatatgctgcctcttatgaccgtgtgctacgtgataattctattatgcctgcaatgaaaaaaacgattatttccttaaccgcattagcgatgttcgtcagcgcggcgacgcatgctgaagcggatacctcgaaaaaaaccgacttcctgctgattggcggcgggatcatgagcgcctcgctcggcacctggctgcaggcgctgcagccggactgggatctgaccatggtggagaaactggacggcgtggcgctggagtcttccaacggctggaataatgccggtactggccactcggcgaatatggagctgaactatacgccggagcgggcggacgggtcgattgacgtcagcaaagcgctcgatattaacgagcagtttatgatttcccgtcagttctggtcggcacaggtgaaacgcggtattttgcacgatccgcactcgtttattaattccacgccgcatatgagcttcgtctggggtgataatgtggattatctgcagaagcgttataacgcgctgcagcagaccactttattccaggggatgaaattctccaccgatcacgcgcaaattaaacagtgggcgccgctggtgatggaaggccgcgatccgcagcagaaagtggcagccacctggacgccggtgggtaccgatgtcaactacggcgaaatcactcgccagctgatcggcagcctgaagaaaaataaccacttcaccctgcagacctcctctgaggtaacggatttcaaacgtaatgccgacaattcctggcacgtaacgattaagaatgtgcagagcggggaagcgcagactattgacgccaaatacgtctttatcggcgccggcggcggcgcgttgaagctgctgcaaaaaaccggtattccggaagcggacaactatgccggcttcccggtgggcggctcgttcctgatgaccgagaacccggcggtcactgcgcagcacctggagaaagtgtatggccaggcttcagtcggcgcgccgccgatgtcggtgccgcaccttgatgcacgttacctcgacggtaagcgcgtggtgctgttcgggccattcgccaccttctcgaccaagttcctgaaaaatggttcgttcttcgatctgctcagcactaccaccaccaataacgtgctgccgatgacccacgtcggtctcgacaacttcgatctggtgaaatacctggttagccaggtgatgctcagcgatgatgaccgtttcgctgcgctgaaagagtactacccggacgcgcgtaaagaagactggaaactgatccaggccggccagcgcgtacagctcatcaagaaagacgcagagaagggcggcgtgctgaagctcggtaccgaagtggtggtcgatcagcagaaaaccatttccgcgctgctcggcgcgtcgccgggggcttccaccgccgcgccgatcaccctgaacgtgctcaagcagatgttcccgcagcagtttaactcgccggagtggcagagccgcattcacgctattgtgccgagctacggccagaagctgaacggtaacgtggcgctgacccagcaggtttgggatgacaccgctgcgaccctgcagctgacgaaaccgccggtgatccagatgccagcggctgcgcctaccgcgaccgccaagccggcagagacgccgcgcgaggcctcgccgcagcacgatatggcgctgtaaaagcaaactcgacagtgaacaaaagggaagaccatggtcttcccttttttgcgttatttaccggctgaggccgcgcgctgcctgcaactttggcgtcataaaagatatactggtttgaattgaaataagaaaattaaaccaggagtgtggaagggccatgcaagaggatattaacaaggagatcaccttccgcaagctgtcggtctttatgatgtttatggcgaaaggtaatatcgccagaaccgccgaagcgatgaaactcagcagcgtcagcgttcaccgcgcgctgcataccctggaagagggggtgggctgcccgctgtttgtccataaagggcgcaacctgctgccgctgcaggcggcgtggacgctgcttgaatactgccaggatgtgataagtctgatgaaccgcgggctcgaggcgacgcgcaaggttgcaggcgtcggtcaggggcggttgcgcatcggtaccctctattctctgaccctggaaaccgttccgcgcatcattatggggatgaagctgcgtcgcccggagctggagctggacctgacgatgggttcaaatcagatgctgctggatatgctggaagacgatgccctcgatgccatcctgatcgccaccaacgaaggggagttcaataataccgctttcgacgtggtgccgctgtttgaggacgatatttttctcgccgccccggcgaccgaacggctggatgcctcacggctcgccgatctgcgcgattacgccgaccgcaagtttgtttcgctggcggaggggttcgccacctatgccggattccgggaagcattccacatcgccggcttcgagccggagatcgtcacccgggtgaatgatattttctcgatgattagcctggtgcaggctggcgtcggttttgccctgctgccggggcggatgaagaaagtgtatgagaaggatgtacagctgctaaagctggcggaaccctaccagatgcgccagctgatctctatcgtctattcgcaccatcgcgaacgcgatgccgacctgctggcgctggcagcggaaggacggatgtacgcccgcagtattaatcgctaagccgctgcgccagatggcgggcgacgtccaggccgctgcgctccagcgcaatggtctccccgcgccagcccgcctggcgggtcaggcaggtgagcacccccccggggggcatctcaatggctaagcgcgcatcgcgctcatcggcggcgaccatcgcctcctgccagtggaccgggcgcgccatgttcatcgccagatcgtcggcgatccgctgcggatcccacagcacgcgcgccgtcgagccgcttaaataggcgcaccgtgggcgccttaagctggcgccggcaaaagctttcgccagctcagcggcgggtttatccagcagcgcgcagtgcgacgggacgctgaccgccagccgctgggctttactggcgccagcccgcagcgccagctgcgccacctcggccattgcctcatcacggcccgcaatcacgaactgcgtttcggcgttcaggttggcgagataaacctcgtggccctgcatcagcgcctcaacccgcgggcgggtcaggcccataatcgccgtcagtccgtaaccttcaggatacgcctgttccattaagtccccgcgcagggccaccagccgcaacgcgctggcgaaatcgagcgcgccggcaatcaccgcggccggaaacgcgccgatagagaggccgctgaccatctgcggatccacggcctgacgctgtagctcgcgcgcccaggcgacaccggcgatcagcagacagagctggaccgcacgggtgtgttgtagcgcatcggcgctatcgagggtatcgacttcatcccccagcacggcgcgcgcctgggtgaggtttgcctcgcgatcggggatcatcgccagcatgccgggacgctggccgccctgaccgggaaaggtaaataaaatcttcattattcctccctgtgccacggcgtcgcggttaagcgcgcgccgcgggacgttttcagcagcgcgcgcccgtcgcgcagccattcattaagggcgaaggcgccgtacggcgtttcgacctgggtatcagcgcggcatgggagttgggccacccgggtctgccattccagcagcgcctcgcggtcaagcggctgtggcgcgcggatcagcagatccagatcgctggccgcatgcagcaccaggatctcggttgccagcgcgtagccggtactgccggtgacgccccagctccagggccagcggtgtaaggtgagggcgatagccccctggaccggcggctgagagacaaaaggcgaatggagtaagacctcacgatcaacaagcatctccggggtgacgctgcgcacgatattgcgcgcctgtacccagccggcggcgcgctgctcgcgcttcatgccccgcaccccaaccgggacgcgggcctggtcgtcaacgtcgcgcctcaccaccaccggcagcgcggctcgccactgctgagccacccacggctcggcaatgtcttccagggcgctggcgcggtttaaccaaactagatcatggggacgcggcgttgctgacatggtttacagtcctgaagtcaaagagataaacagcggtagcgacaggatacacagaaccgagctcaacagcagcacggcttcagcatccggagactggacgccgaagcggttgccgaagaccacgccaaagaagccggcggccagggcaatcatcaggatcgcggtaatggcaatggaaccgtgcagcccaagtaacatcaccagaccccaggcaataaacggctgcaccagcagtttcacgatggttgatgtagcgatcagcgcattgagctgcagtttacgcgccgacaggatcaccccggtgaggaacagcgcggcggcggtggcggccaggcccagcggtttgatcgacgccagcagcaggtccggcattttaatgccgatcgcggaaagcaccaccccaagcagcgggccccagacgatcggttttttcaccgaacgccacatcagcaccggcagcatcgccagcgtagaaccgctgttttctcccgcggcgcgggctttttcacgttccagaatcagcaggcagaacggggtcatcagcaccgagccgcaggcgatagagaccgctaccgacagtgaggttgacgcgccttcacccagcacgctgccgaggatcggcagacctaacgcggcatagtttggcagggcgacggtgagggtcagcaccgcggcatcctgcggcgtgcgtttgaacacgctggtggcgaggaagtagatcgcggcataggtgatccacatcgcgccggtcaacaccagcaccaacggcgactgggcgacgataccggcccacggcgtttgtaccgtcgcgctaaacagcgtggcgggtaaggcaaaatccattacaaaaatattaagcagcgagacgtttttgttatctaccatcccggccttaccggcccagaagcccagcagcataatgacgaaaatcggggcaagagcatgaataatcacataagtcataaatcacctgtaaataagatagagtactggcgcgattgttattttttctaaaagccgtcccttcccggcgcggttattacgcgctccgggggacggcttccggcaggttttcttctactacttacgtacgaacgtcttaccagctggcgcgcatgcgatcgcggaccagctgcgagctgcggcggttttccgcgcccagacggcacttcagtgaggtatcggtacgcgcgtcagcgatggcgtcgcgcagcgtgttgctgaccaacgacagatcgtggtcgtctggggcatccggattattaatatccagcagggcggagagcaggccgagcgtcgcatagttgctgacgtcgtaggccattggcggaatggtagccgccagtttctccagcgcctctacggtacgcagggtaatgcgcgccgccgacgctttacccatcgcgtggaccagcacgccgctatcgttaaaggcgatcaggcggttggcctggtagccgtgggccagaaacgccccggacatcgctttgccgacgatcaggccaattaccgggtggccggccaaacgggctttggcataagcgccagccgccccggccagcgcctggtgaatgccgaaagcttcttcgcggcggccataggcctggcttggcacatcgatcacggcgacgatcggccgtttgactggctggtcggcgtcggcggcaatggtttcattaaccactttcgccagcgtccagccttccagcaggccgacttcgccgccggcggcgcgcgggtagtggttgttagcatccgggaccacggcgataaaacgcacgttttcgccattaatctggccgtctgccacctggacggaagggcacaggccgctcatcagcggcgcgtcgggcgccagtttgttcagccacagcgcggcgcggtttgggaactgactcattatttatcctcccgggcaaaaagctgtttaatctgcgcggtatccgcctgctggcgggtgtcgaactggctcaagcgacgcagataatcgtcatagttgtcgctgcggtgctgtaccggtacgcctttggcgatcgcctcattcattgcggttttaacggcgttaacgccatcgttaaccagcgcgtcgaccagtccgctggcggcgcgaatttcgccgccggtcatgctccagataaacggccggttgcgggagtcgtactcttcaatgccggcttcctgctcgataacctgcgggccgttgagaccgagacgggcttcacgagtgacgataaggtaactgcacagcgcggcggcgatagacataccgccaaagcagccgacggtgccggcgatgatgccgaccactggggtgtagcggcgcaggtcgacaatcgcggcgtgaatatcggcgatggcggccagaccgaggttggcctcctgcagacgtacgccgccggtttcgaggcacagcaccgcctgcgtcgggataccgttgcggttatcttccgccgccagctccagcgcggcggccattttggcgccggacacttcgcccatactgccgccctggaaggtgccctcgatggcaatcaccaccgcaggctggccgttgatcgtgcctttggcgaccaccataccgtcatcggattgcgggacgatgccctgggcgccgagccacggcgacataataccgtcaaacggatccagcagttcgcggtagctgccgtcgtccagcagggcgtgggcgcgttcgcgagcgcgcagttcgataaagctgcgatcgttacgcatgagcggcctcctcaaaaacctgttcaatacgaatacgggcgacgcccggcgtggcgccgaagtcgtggataatcaactgcccggcgggcaggccgttgatcaggttcaacctgtcgaacagcgcctgccagcgcgcctggctgttatccactgaggtggtgatctgtacgttgagcgtggcgctctgtgcggcggtataaagtacttccatatcgcctgaacccacgactcctgccagcgctcggccgctcagggcgcggctggcaggaaatgacaatgtaatctgttccataacatcctctgaatgcgttagccggcaactctgtcgagaaacagggtggcggcaaggagatcggcggcgcctcccggcgaggcgtttagcgccagcatgattgcgtccaggcgggccagggcggcgcgcccggcgaaactggcgcaaccgccagccgccagcacctcacaagcgccttgctgcatggcctgcagcccggccataccggcgcgcgacagcacgcaggtatcgctcagcgaggtcatgatggccatcagcgcatcaagctgcgcctgcggctcactggcgcctcgcgcccggctgtgctgcagttgcggcagcgccaggcgggtgatatgcgggaaaccacactgcgcttcctcgcgggcgcctggcacctgccagcggcggctggcgcgaagccctttactaaagcttttcggcgcgaagccgtcgggcaggcgggcgagggcggcggcggcgtcggcgatcgcctgtgactgaccctctccacccaacatcgccaccgcgctgaccagcaggcctagcgcccagatagcgccgcggtgggtgttaaccccacccgtcgccagcatcatctgcgcttcgccttcgcggccaaggcggccgacggtttcgcgcagggcgatgtccgccgggcgacgccagctttgctcggccagcgcgtgaaaggtcggctgcaggctgcgggcggagcgctccatcagcgccagattcaggtcctgatgcgcgccgttgccgcggctatccaccagacccggtttcgggctcaggcgggcttcgtcaatcagacaggcgctggcggtatgcgccagccagctgacgcggctttctgcgtgcaggggggagagatttttcattaccagctccggaattttgccggtgggttgtacagtccgtcggaccactccaccaggtcggcgacgctgccggcggccagcagggagcgggtggcatcgctgcggcgaatcccgagatcttccgggtagaccactttgccgctctgacgcagcgcggcgacgcgtttggcgtccacaccaaggccgatatcggtgatcccggccaccgcggcgaccatcgcccggcgctcttcaaggctctccgcacggtacaggtaggcgataccctcttcggtcaggacgtgggtgacgtcatcaccataaatcattaccggcgccagcggcatgccggaggttttcgccacctcaactgcatccagcgtctcaacgaaggttggtttcacgccggcctggaaggtttcgaccatctgcaccaccagctttttcccgcgctgcatcgggtccggctcggtgatcatattgagccatgccggggtggcgtggcggcgaccgtgcgggtcgtggcccatgttcggcgcgccgccgaagccggaaagacggccgcgggtgacggtcgaggagttagccagaccatccacctgcagggttgaaccaatgaacatatctaccgcgtactggcccgccagctggcagaaggcgcggttagagcgcatcgagccatccgggccggtaaagaagatatccgggcgggcgcggatgtactcttccatccccagttcgccgccgaagcagtgcacgctctccacccagccgctctcgatggccgggattaaggttggatgcggattcagggtccagtgtttacagattttgcctttcaggccgagctgctcgccataggtcggcaacagcaactcgatggcggcggtattaaagccgataccgtggttaagcgactgcacctgatgttccgcatagatgcccttgatcgccatcatcgccatcagtatgtgttcttgcttaatcaggcgcggatcgcgggtgaagagcggttcgataaagaacggcttgtcggcaaccaccacgtaatcgatccacgagccgggaatatcgacgcgcggcagatcgcattcgtcgtccaccagttcgttgacctgggctatcacaatgccgtcgtggaaggcggcggcttccaccagcgccggggtatcttcggtactcggtccggtatacaggttgcctttgcggtcagctttatagccggcaatcagcgcgacgtttggcgacagatcgacgtacaggcgcgagtagagttcgatataggtgtggatggcgccgatttcgagcaggccatcttccagcagctgcgagatacgcaggctctgggtgccggagaaagagaaatccagcttgcgggcaatacctttttcaaacaggtccagatgctcgctgcgcccgacgctgggcataatcatatgcaggtcgtggattttttgcggattaacttccgccagcatgcgcgagaggaaatcggcctgtttctggttgttgccttccagcacaacccggtcgccgggggcgagcaggttttccagtacgctgaccaactggtcagtcgggatgaccttacctggcatgttcgcctcggccagccgccgctgtttttccgttcggcgacggttccagacccgccccgtcgtttgttcggcattcattaataacctcctgattcgacaaatcgttttgtttgtcctggtggagattagtgtgcgacgcgaggctatgagcatcaattaagcgcggtggccgatcgttagcatcagagtaacgattccgccgcaacgtttgtgatgcggatcaataatacataaggcgtagtggtctacggagagagtgtagggcagggagcaggccggcgaagcgccggcctgcggaaggactactgtttactgacatcgcttaataagaaagcgatactctgcccgccgctggtctgctcgagggcaattttgacgataatcgtcaacggcaccgagagcagcatgccaaccggacccagcaaccatccccagaagattaaggacaggaataccaccagcgtcgagaggcccagcccgcgccccatgatacgaggttcgagaatattgccgaataccaggttgacgatcaggtagccggccagcactaccagcgcctcgtacagaccaccgaacaccagcacctgcaggatcggcggaatggccgccagcacggaaccgatattgggaatatagttaagcgcgaaggccagtagcccccacataaaggcgaagcgcacatccagcagcaccagcatgccccagaccaccaggccggtgatcaggcttatcgcagttttcagcaccagataatgcgatacgctgtcgatggcccgctggatggcgcccatgccttctactggtctggacattaactgctgcagcttagcgggaagctgcggcacctccagcagcataaacaccaccgtcagcagcagcagaaaaatggaggacatggcgttcgacagctgagtgagcaggctggtgaccagggtcattacggcgttagggtcgatgtacttattgagctcgaccaccgaaacggtgaatcccatacgctgcagccagggcgcgatggtttgcatcggctcatagagatagttgcgatactgcggcagggtgcgtgccagctcgttgagcgaggtccccagcgaggccagcagcacaatggctaacataacaatcaggccaatcagtagcgagatcgccagcacgcgcggtacccggcagcggaccaggagctggaccagaggattgatgatcaccgccagaaaaagcgccaggataaacgggacgattatgtccgccgcaaagcgaatgccggtaaggatgatcaccagcatgcccaacatgatgaccatctttaatccgttaagtgtaataatgggtttagccataggatcccgacctcaaacttccttgcctattaacaggttgcgttacattagcataatgacgcttttttgcagaacaaacgcattgaagaaaaaccgcggcgtaaagaattgcaaagtctttgaattaaatgtagcactatgctacaaatctacctgtgtttaactactgaggacaattttcatccgcaccggacgagaagcaacaccgcggataattgtaattttatggacaatcagttcaggatgtatattttaaatcaccccgcagtatccctcactttttcccgttttgccggcgaacagcactggcattcggcgctatagtcaccttctttctgcctgagctggcgccaagcgcacagcgatatctacgtcagaaattttcctgtttacgtctcgcgtaaacggtaatggattatattctcaagcaggagaagggatcatgttttattggattttattagctttagcaattattgctgaaattaccggcaccttgtctatgaaatgggcaagcgtgagcggcgggcacaccggctttattttaatgctggccatgattgccctgtcatatatttttcttgcctttgcggttaaaaagattgccctcggtgtggcctatgcgttgtgggaagggatcggtattttactgattaccctgttcagcgtgctgctgtttgatgagagtctgtccctgctgaaaatggccggcttgaccaccctggtgatagggatcgtcttaattaagtccggcacccagagaaaagcgtcttcaaagcaggaggtggcccatgcagcagtttgagtggatccacgccgcctggctggcaatcgccattgtgctggaaattattgccaacgtctttttgaagttttccgacggtttccgccgcaagatctacggcatcctgtccctggcggcagtattgggcgcgttcagcgccctgtcgcaggcggttaaagggatcgatctctcggtcgcctatgcgctgtggggcggcttcggtatcgcggcgaccatcgccgccggctgggtgctgtttggtcagcgtctgaataacaaaggctgggcgggggttatcctgctggtagccggcatggtgttaattaaactcgcctgacgtctcgccgcctgcaaagccaggcggcaaacggaaacttccttcacgcctggccccgctgtaattgtgtcaggtgacgctgagggctgcgcaggttcactgctttcggctggcggaaaatcatttccgccaggacgatgtcaataatgatattcttcaccagcctcggtccattactcaccggcaagcgcctccagcttatcgcgaaagccagtcaccgcaatggcgcgattgtccgcccgccagcgatcctgcgggccgggggccgaactctgcacggcgatcacctgccagccgtcctccgttttcagcagcagcggcgagccgctgtcgccaggcagggtgtcgcactgatgcgacagtacgctggtttgcgcccaccctgtcacgatgcaatcctggtggctgtaaagattatcgagatgatcttcaggatagccagactgggtaactttacggtccgccgccttcagcgcggcggtgagatcggccttgctgcccggaaagagcgggatcggcgtaatgccagacggagcatagcgcagcacgatcagaccaaaatcggacggcgccgcagcggaagggacaatccagccgtcgccatcggctttcaggcgtctgcctaagctgggatcgactcgcccgtcaatgccgtggatctcatagacccagttgcccttgcgggaaataaagcgcagggcgaccgctttgtccggcttgccgcgcgggggcgttaacagacagtggcccgcggtcagcgccagatgcggagagatgagcgtcgccgtacacagattgccgctggcggtttccaactggccaatcgcgtcccacggactctcctcggggcggttcaccgctttgcggtcatcgtgaccgaaaaacaacgtcttaatatctttggcgctcagtccgctatcatcggcatgtgcgcccagaggtaacagataaaatgaacacagtaataacagaacgtctctacgcatatcactctctggggaggctatgatgtctattgacagtagcaggagatttaagtttttgaaagtaaacaataattctaaacaggccaaaccgtataccacatcagcgcgcggtggggtctggcgctggtaaaacctcctgatttcaagcggttaataccagtgttctgcttgtgctatttccgcagaaagtggcgtcttgcgcaacaaaattcatgtatcagaacgtactgaattcggttaataatgcagcaattcatccgtgggattattcctggtttgtcagcataatgcccaaaaataatacttttacccaccagatcttcaccggaattcgcacttctttacgcctctcgtaattattttcaatgcgaaacattttctcaccgaaaacgttgttaccgtcgccctgccgttgagtaaatagagaggtagtaccggcgatgatagcctgaactctatttcccctgcgttcggagggcttatgtctaaaaaaggtattcgcgcactggtttatgtttccctggtctcagtcgctatctggggcgcgaccggctatctggtgatggaagccgtgcgtgcattgtgatggacgcaccacccggcaagggccaggcgtgcgagatattacgactaacatgtctggcgtcttctggcgccggacatttttttgcgccgcagagagtcacaggataatgggaagcggggagcgggtcagcgatagccgcacggtattcattttaatgaaaagctggtagaagcagcaaaatgcaggcgcgggataaataattaagagaggaaaaaacgggttgcaaccactgcgcatataattagcaggatcaggatgagctcaaaacgatagcgccgcagcatagtgctctccagaaaaaacggcgctgaaacagcgccgattattaagaaggttggttcaccgggaggaattatgctgccggctgtgcagtcggtttagcggcctggtgtttagtggttttgtggtgttttttcgctgcctgcgctttctgggctgccggtttagccgcagctttgtgatgctttttcgccgcctgagctttctgcggagcagctggtttagctgctacttttttgtgttttttagcggcctgggctttctgagcagcggctggtttagcttctgcttttttgtgttttttggcagcctgagctttctgctctgcggccggttttgccgcggctttgtggtgttttttgtgatgggtggtcttggcagccgtgctgtgggtggcagccggtgcctgagtggtgcttactgcgtcagcagcgaaagcggcggaagagagacccatagcagcggcaacgaccagagctaatacttttttcattctgatatcctcgaaaagttttcttaatttcaaccccactgcggggccggtgaaatcactatatgcttgtcttttcgagctttccgtgagtgtttggtatcggcgtgtaaccgaatgtacaaggcaggaacgacaggacgcgccgggtagcccggcgcgtatgattacaggtagcgagtggtcaggtgctcgcggaagtagcggctattaagatcctcaccggtggcctgctgaatcaactgcgaggtggtgaagcggctgccatgctgccagatattctgccgcagccagtcgaacagggcgctgaaatcgccttcctcaatatcgcgatctaatgtcggcagcgcgcggcgggccgcggccatcagctgcgcggcatacatcgcgcccagggtataggaagggaaatagccgaatccgccgtcggtccagtgaatatcctgcatgcaaccatcccgatagttgccggtggtcgacagccccagccagtgctgcattttctcgtcccacagcgacgggatatcatctacctcaatctcgccgtcgatcagcgcacgttcaatttcataacgcaggatgacatgcgccgggtagctcacctcatcggcatcgacgcgaataaagccgggtttcacctgctgattccaggcgacaaaattatcctggctaaaggccggccgatcgccaaaccgctcgcgcaccgccggtaacaggcggttaagaaaccgctcgctgcgtcccagctgcatttcaaagaacaggctctgcgactcgtggatagcggtggagcgggcgagtcctacgggctggtcgacccacgggcgaggcagattctgctcgtagcgggcgtggccggtttcgtggatcacgccgaacagagcgctgagcaggtcgttttcgttgtagcgggtggtgatgcgcacatcctggggtacgccgccgcagaacgggtgggcgctgatgtcgaggcgcccgccgtcgaagtcaaagccaaggatacgcatcgcctgcaggcccagctcccgttgttcagcaatggggaaaggcccctgcggggcgattagcgcctgcttcgcctgcttctccaccgcctggctaagcagggaaggtagccacgatttgagatcggcgaacaggctgtccagccgcgcgctggtcatatccggttcgaaaatatccagcagcgcgtcgtagcgtgagccgcccctggcatcggcgcggatctgcgcttcctgacggctcagtctgaccacctcgcgtaggttgtcggcaaagcccgtccagtcattggcgggacgctggctgcgccaggcatgctcgcagcggctgccggccagcgattttgcttccaccaggctctccggcagcagcgccgcctgatcgtactgacgctgcatttcccgcaggttggcctgttcaacatcattaagatcctgctggcgggcctcctgtaaccattgtcccacttttttatcggtcaggatctgatgctgcagcacgccgagctcggccagcgcttcgccgcgggcgacgctcccgcccgggggcatcatcgcgaacatatcccagccggcgatggcggcgagatgcgaaaagcgcgacaggcgctgaaaggtacgggtaagctgctgataaggcgtattttcagtcatagtggcgttcggtccgtgacaggtgaataaagagattatcgctttgcctctacactatcctgatacgcccggcgggtcgagcgttgcgcacaggggaagggaaagacacatggcgggagaataagctcacctctgtgatcggtgtgacagaaaacggtaacatatcggtactaaactgtgatcgattacacaggtctggaggttcgggggtggtttatgaatccgttcacctggctgtttattgcactactgtccgttgatgccgtcagagagctgatgggcttgtcttccataatgggcatgtggtgaaacgtggcccgcaggccacgtcacacgcgactatttcagtcgctgatgtaagcaggtgccggtcaacagcgcggcaaggagcagcagcgcgataaacccaccgacgccgttccagccgtagtgatgccagaataccccgcctaacgtcccggcaagacttgaacccaaataatagctgaacaaatacagcgatgacgcctgaccgcgggcgcggcgggcgcgtgggccaatccagctgctggcgacggaatgcgcggcgaagaagccagcggaaaacagcagcatgccgatgaaaataagccacagggaagaaaagagcgtcagcagcaggccgcagagcatcaccgctgtaaagccaagcatcaccggcccgcggccaaagcgtacggtcatggcccctgccttcggtgaactccaggtcccggtgagataagctaccgacagcaggcctaccaccgcctggcttaacgaccacggcgacatcatcagccggtagccaatatagttaaacagggtgacaaaagcgcccatcagcagaaaaccttcgacgaacagcagcggcaggccacggtcgcgccagtgcagacggaagttaatcagcagcgttttcggtcgcagcgaggtcgggcggaaatggcgcgactcgggcaggatacgccagaacataatcgccgcggccagcgcaaagccgctgatcgccgccagcgccacgcgccagccgaagaaatcggtaaagaccccggtcagcaagcggccgctcatgccgccgatggagttgccgctgatatataaccccatcgaaaaggcgacgaaactggggtggatctcctcgctcagataggtcatgccgaccgccgctacgccgctcagcgacaggccgatgagagcgcgcataatcaggatgccgtgccagctggtcatcatagtcgacaacagtgaacagcaggcggccagcagcagggcggtgaccatcaccggcttgcggcctatagcgtccgacagcgggccggtaaacagcaagcccaccgccaacatcgccgtggaaattgaaagcgaaatactgctgctggccggcgacacgccaaactcgttcgacagcaccggcaggatcggctgcacacagtagagcagggcaaaggtggccagaccggcggagaacagcgcgagagtgacgcgcataaactgcggggtgccacgtttaataaacggatccggacgggatgcaccagcgacgctgacctcgcccgccggcacggtgtcaacggttgtagtacgactcacagagaattccttgcgtagaagttgctgcttaccaacagagtgttgtgaccattcagctcacatttttagggtatgaaaatgtaaatattctgtctaatatattaataatctcaaataagacgttttaaatataaatatcgagttgcgtcatttgcgctactttgtcgccgtcgccgaggagctacattttggccgcgccgcggcgcgactgaacatctctcaaccaccgctaagtcagcagattcagatccttgagcagcagaccggcgctcgcctgttttcccgtaccaaccgcagcgtcagcctgacggcggccggaaagcagtttctcgccgatagccgacaaatcctcgcccaggtggatgaggcggctgctcgcgccgcccgtctacaccatggcgaaacgggtgagctgcgcatcggctttacctcctcggccccttttattaaggccgtctccgatacgctatcgatgtttcgccaacgccttccggatgtgcatattctcacccgcgagactaacacccgcgaacagatagtgcccctgagcgagggggctctggatttggggctgctgcgcaatactcaattgccggacaccctggcgtgggagcgggttctgcgcgagccgctgttggcgatggtcccggcgaatcacccgctggcccgccagcactcggtcagcctggcggcgctggcgcgcgagcccttcgtctttttcgacccgcacgtcggcactggcctgtatgacgacatcctcggcttgctgcgccgctacggccacacgccgaagattgcccaggaggtgggggaggcaatgacgattattggtctggtggccgccggcctgggggtatcgatcctcccggcctcctttcagcgcgtccagctcagtgaaatgcgctggctgccgatcgacgaacaggatgcggtatcggagatgtggctggtgtggtctaaacaccatgagcaaggggcactggcaaaacgctttcgtgaggcgctgctctcctggaaaagcgagcataattgaggcgaaaaggggctggaaatgtgcggtaaatcacaaggctaagtaaaaatttgacgttcaccgtcgaagtgcttcaccatagccgaaagtttatttcgaagcgcgaaaataagggagtcaatggtggtagcggatagtcaaccaggccatatcgatcaaataaagcagaccaatgcgggcgccgtgtatcgcctgattgatcagctcggcccggtatcgcgtatcgacctttcccgatttgcgcaactggcgccggccagcatcaccaaaatcgtccgcgaaatgctggaagcgcatctggttcaggagaccgagatccaggagcccggcagccgcggccgcccggcggtggggctgatggtggagaccgaggcatggcactatctggcggtgcgcatcagccgcggtgagatccatctttcgctgcgtgatttaagcagtcagctggtggtggaggatcagctggagctggcgctcaccgacagcacgccgtttttgacgcgcgttatcgaccatattgatcgcttctttattcgccatcaaaagaagctggaacgccttacctccatcgccatgacgatgcccggtattatcgataccgaaaatggcattattcatcgcatgccgttttatgaggatgttaaagatgtcccgctcggcgaagcgctggccaatcataccggggtgccagtctatattcagcatgacatcagcgcctggaccatggcggaatctttgtttggcgcctcgcgcggcgcccgggacgtcattcaggtggtcatcgatcataacgtcggcgccggggtgatcaccgatgggcgcctgctgcacgccggcagcagcagcctggtggagattggccatacccaggtcgatccctacggcaaacgctgttactgcggcaaccatggttgcctggagacgattgccagcgtagaaagcgtgctggagctggcgcagatgcgcatggcgcagtcgatgagctcgctgctgcaccagcgtccgctgagcgtggagtggctttgtcaggcggcgctgcagggcgatttgttagcccgggacatcatcagcggcgtgggtaatcacgttgggcgaattctggcgatcatggtcaatctgtttaatccgcagaaaattctgattggatcgccgttcaatctggcggcagaaattctttttccggcaatttccagctgtattcggcaacaatctctcccagcctatagccggcatattaccgttgaaagtactcagttctccaaccgcggaacgatggctggcgctgcgctggtcaaagatgcgctctataacggatccttactcatacgactgttacagggttaacattttttcatagtcacaccaaaaattgcgctatctcaagctgacctcagacggcttcacgtagactttgcccaccgttgattatttctctcccgtatatttcatcgacaaaactgtggggttagtgatgtttaagcgtttctttattacaggtacagacacctctgtcgggaagacagtggtttcccgtgcgctgttgcaggcacttgctgccagaggcaaaagcgtggccgggtataagcctgtggcgaagggcagcaaagagacgccggacggtttacgtaacaaagatgcgctggtgttgcagagcgtctccacgctggcgttaccttatgaggctgtcaaccccatcgccttaagcgaagacgagagcagcgtggcgcatagctgcccgatcaactacggtctgctgtccgatggtttgcagcgtctggccgcgcaggtcgaacacgtggtggttgaaggcaccggcggctggcgcagcctgatgaacgacctgcggccgctctccgagtgggtggttcaggagcagctcccagtgctgatggtggtggggatccaggaggggtgcatcaaccatgcgctactgacagcccaggcgatcgccaatgacggtttaccgctgattggctgggtggccaatcggatcaaccccggtctggcgcactacgccgaaatcatcgatgtcctcagcaaaaagctgccggcgccgctgatcggcgagctgccttatctaccgcgcgccgaacagcgtgagctgagccgctacgtcgacttagacatgctcggcaacgtgatggcgatagatcgaatcccggcgtaacgtccgcgacagcacagacgacacgacgcaggttatcagtagaccgggcagcagcgtatactgcccggtcatctcgcaaatcatcagggttgacatgatcggcgcatgggtcgtggcggccagaaacgccgccatgccggtcagacccatcatgatggccatttcttcacttcccggtagccacagcctgctgaagcaggcaaacagcatgcccatcgccaggccgacaaacagcgtcggggtaaagaccccgccaggcgcgccggagccgctgctggccagcaccgccagcagtttgcagataaatacgcccaccagcagcgcaccggacggcggcagcagcaaatagctttgcactacgctgtagccgttgccccatactgccggggtgatgagcgataagccgccgacaattagcccgcccagcgccagctgccacggcggcgccagcttcagtttaacgaacccgcggtggctgtagtccatcagccagataaacagcggcccgcacagcccggccagcaggccagtcgccagcattaagccatagtgcagggcgctgaggttctgctgtaacacgacgtgatacagcggcgcggcgccgccattaagaaactgcgtcaacagcagggcgatcaccgccgagatcaccaccggcccaagcgaggccagcatcagcgtgccaaagagaatttcagcaataaacaggctgccggccagcggggcatgataggcgctggccatcccggcagccgcgccgcaggcgacccatagcttccattcactctgcggcgtgaagcgacgggcaaacagcgaggccgccagcgcggccagcaggatcatggcgccttcccggccaatcgcgctgccggtcaccacgaccagcaatgacgccagcgatttcaccaggcttgccggcgtatcgaaacagccgtcgccggtctccagggcttccatataatcggtggcggcatgcggacgcgcgacgctgcgtcgttgccagagccagagtaaggttcccgccgtcaggccgcccagcgcgggggtaaccagccgacgccacgccggcagcgactgtgcggcgttgaccaggctcccgctgtcattactgagcaacagcgtttccagcaccaccatagcgtggcgaaacagcgccaccgccagggcggcgagaaggccaatcagggtggcgatcagcaggcggcgaaacatcacctgcacatcaggatagggatgaagacgatgcattagtcacggcgaggttcggaaaacattggcttattgtgatagggaataaccttagatgcaaaagcgataagtgcgggtgaaaggctgggaagcggcaaaataaaaccgcgccggatatcggcgcggcgaagggttaacgatagagcggtttttgcgccacggcgatcggcagattctcctgccactgcgccagagtcgcctgcgccagctgacccagcgcctgatagaaggggtgggcggcatggtcgacaaagacgctcaggaaacgcccggaccacggcagcaggtgccaggccagcagctgagcgaacaacgcatcctgctccgtttcgcacaaccatgccgccaggagtagcacggtgccgaagtgatcttccggttcattgccatcggcctccagcgcgataccgttctcgcgcatccactggcgcagagccagcgtggaatcgccaaacagcacagactctttatccagccagacagagccccagggcggcgccggcagggcccatggcccgataaacaggcgctgccaggcttccggcaacgtttcttcagccgatgcggcaaaccctgacgccagcggggctgcgaccgggaagggccactgctgctgccagctcccgtcctggaaggcggcgaccagcggcgcaatttccgcgctattcggcgcataagagaacagcgcgcccagggtgcgggcgcttaacgcgacggcgtcgcgatttgggatcggcatcatcacttattcctttctgcggcgcgcgcctgcgcgccgtctcattaaccggcaaccgccataccgacggtcatatgcagaccataaaacaggccgcggccaatacattcggcgatcaagaccagcagcaggccgatcagcagccccgtagcgcgcggcggctggcggcggatcagcggacatagccagcagccgaggcccagcgccagcagtaccaggcgtagcgcctggagtttgccgtattctggcagcagggtggccgcctgctgaaccgagctgtgaagggtactgagcccggcgctttgcataatgataactgcggcgctgatgaccagcgcggccacgctcagtccggcaaaaaaccagccgttaaagtcgactttcgccagccgcagcagcagggcggcaaacagcggcccgctgaggagcaccgtcagaaagaacgcgctggtggtgtagccattgtaccatgttggcacggtattgatttggtaaacccgggtcattgcgaggacaaacagcagccctaacagcatggcgatcgccagccagactttacccagcgtcgccggcattttttccagcaccgccagcagccaccagaatccgcccacggcgaagaacagagcgccgctggcgatttcgttgctcagcgccgaggcgccgatgcggttcagcgagttaaacgcgcgcagcggtgaaccgagatgcatcaccgaagcaagaaaaccaatgcccatcagcagccagataaaaaacatattgcgcaccagccgccgcgcttcccgttggtcccccagcgccagccagccaagaccgctgacgatggtcgcgccgaccacgcactgacccagcaccgtaaaaagcaccagcggccattcatgccatccgtttcccatctcacacctccttcgggttcgccaggtaaccggtggtatcgccacacggccgggcattggcgttaggtttgataacgatactcggccgggtaaagtg

SEQ ID NO: 82 - DNA, 36316 bp, Unknown
  source: /note="Description of Unknown: MKP2_coc_1 Mutant Bacteria sequence"
gcgcgctgcgcgggcgctttgcgctgagcagccatgaacgtctgcgcctgagtcagcaactgattgatgcgaaggtggccgccggctactactttattgccatctatctggagcacggtgcggcagggctggcgcaggacccggagatggcgctgcgttactatcgtaaggcggcagatgaagggaatccccaggcgcaggcttttttaggcgaaaaactatttccggccaaaagagctcctcaggtagccatgcagatgtttcgatgcgctgccctacaaggtgagggaaaagcggctaattcgttaggaattatgctaacaattgaccagaaatatcaggacgctgtagatgtctatcagttaggggtggccgcaggagattcaggctccgccagtttccttgaacatggatttgcaggcccggcaccgaccgacaggctgtactatctggcactggagaaagacccggagcgtgcccgtcgctatgagcagataggtgctgtgctggcgaaatactcatgggcccatcctgtcgtcccggaaattaacgatatcgtgccgctgcccccggcgccgctgccggagtgggacggcaagctgaagtggctggaggaatgggaggccaatatcccgccgccagcgcctgatgcagtgctgatagagaaactggcgaaagcgaaacagctgaacccggcaacgggcagaccgctgccgacgtcaccggactttgagaaggacagcgtggcggctccgtaaaggactgaacgaacgtgccatccgtttcttccgcgagggagacatcataccgttggataaattaaatcttgtccgcctgcgctcctgctcgcttggcgataaatggctgcggggagagaggcaggtgctctggcgactgacgggcgaggcataaatctcctcttacggcgagttatcgctggcattaatacctataaatttaaggacaaatcatatgcgtaaatttttaatcggattttttattttcttctcaggaatagcaacggggcagtctaatttagaagattttaatcattcgccgaagtgggtggattcggctgggcaaataaatcctgacccgggattgatgaagtattttcagaatatgaaatttgtctgtcataacgcgtctggatttacacctaaagaaaataagagtgctgcaaaggcgttcagtgaactggttcagtatacttctgagggagatcaaataaaaggtttctggaacagtcctgaacataagcaaaaacgtgaaggactgcttgtaacagcaataaaagccggaagctggaaggccgcatatgtaaatagtgtctgggcaataaaatatccgagtgcggagactccgatagaggttgcttccaccaaactccacgaactcgtttctcggggcatccctattgctgcctataaatatgcgtcgtatttgtttggtcgcgattatgaaacaatgtactacttgtatgctgaagccatcaagcgtggcagtccacaggccatgtcagcagtaggaggaactattgttgtcagggttcaggaactgcacccattaggtaagcagttgctggaatgtgcggtagggcaaggttatgcagaggcttatgatcatcttggcttgcttgccgatatggaaggcaggagattagatgcctatcatttgtgggaaaaaggcattaatgaaggatgtgaaggctgcatcaaaaaaatgagtaatctggctaaagttcggcatggttattctgcggatgtgccgatgatggaattgatgcccgaactcatgaggattaaagaattcaatgaaaataatttcgtctatcaattgactgaattgccagatttctatcgtcgtctgccggaggaactgattttccatctaaacgattccgaacttttaagtctgcttaagctggagaaattttctcgcatgttgtaactctgaaactcaggaaatggctgcgcaaagaatttcgctaatgattgcagctatttattttccttaaatgctacaaggttaataaagttatgaaaggaattatccgtacaggcgatacgcataccgggggcgggaaagtgctccgtggttccagtaatatgaaatttggtggtatcggcgtggcgcggctgggcgatcccgtcagttgtccgatcaaaggccatggtccgacggtgattgccgaagggcaccccacttttagcgatcatggtataccggttgcgttccatggccaccgttgtgcttgtggctgcatattgctgtcgagcctgccacaagccagggtgcgctaacgatgcctgtcgatttaaaacgtattcccccgcctgctcaacggcctcgagcaccggtgtggtgggtttggttgctgtttttgctgtgttggctggcagcgggcacctgctgggccattatgagcaataaagataaactccaaatacacaccgcggatttttggcaaacggcgttgatattaccggcattattctggcttattctgctggcgttgcgtatcgcctggtataaaggattactgtcaatggctgatggctgggataacgatcgtgaacagcttttgagtcgtgaaatccagagagggcggcgtcacctggcaatcctgggcgtgagcttacacaccgcattacgtctcccggatgatcgggatggtaaggggcagcgagaggcattacgaaacaataccccggctttaaaaacgcagccttcctggtggagtgacgaaggtatacgacatagtcggctgttgcgtatcggcgacgaaacgcccgaacagttggttaggcgcatcatgagcaatacgttgaatgagctgacttctgtactggcatctgttcctgcagagacaccgctgtcattaatcatagagagcgacggcagtctgtccgtcagcgagatacagtcgacctggcgccagtgtttggcgaacagtcacatccggcaaccggtgacgtatctggaaggcaaagggctgcagatgatagaccactggctggatcagccgatgactgagccatccctgatgctgattgtggcgctacaggttgctcccaaacaggttgagggaacggcagaaacggtggttagcctgttgcttgccagtcctcaggtcgcggcggatcttatgccactggcgcttctccaccgaccagagcaggtgaaggggataagccacgaggcgtttcattatgcctttgcgcgcgcgtttgactgggccgcgttacccgcggaggccgtgcctgccggttggttggtgggtatcaagatgaactatcatcagcccatcgcaacgggattgatcgcgttgtcgagcccgatcaatatcggtcgtgatttctacaacctggacagtagcctgggttatccaggcgtcgcagccccctgggtcgcgatcgctggagcaatcgtgcggtacggtgacgataaatctcaactcattgtgagtggcgacggttttgccgaccaaccattatgggccacggtgatcaccccattaccactatcatcagagcttcaccaggccaggcccgttcgcgctgcctgagaggcggcaagcctcgtgactacacactatctcatcagacggtcatatcagcccctggtggtgggtctgaatctttctcgaatcttcttactgcaggaaataaggatgaatgcaacggatagcatattgcgcttaggtagccgttttggggtgctgatgctgatagctggcgcaatattgtgggggatatatcactatggcgacaagattggattgaatacgctgcaagcgaaactctatttctgcctgggcttagggatccttattctgctttttcgttatggcggccgtattgtgcagttcatactcggccgccatctgaaggggcagggggcgccattgacaagtggtcagcatctgaagccggcttcccagagtcaccgcgcagttattgagatgaggcagacattgcgtcgccagtatggtcgctttggggctggcaaaatgaccattctgatgctcacgggaagcgtggcggatgtcgaacgccttgcaccgggcctgagtagccagtactggcaggagaatggagacacattattgctttggggtggggaaccccagagcgcgtcggataatgactggctttttgctttgcgtaaacgcttttgcccccctgtgaatgggctggtgtgggtcacttctgcgtttgatcatctgcccgcagccaatcagcacgtatcccccgctttgttgtccatggaggatatagataacattgcccatgatctggctgaacgtttctcactgctagggtgggctgtaccactgtatgtctggtcgctgcatccccaggcggatgatcaggccgggcgcatcgtgcaatctgtcggcagtctcttcccgccagactgtcagtcgtcgcagatgcgccagttactttcggcgttgccctcaagactgttagagactggagtacaacagctcacgggtaatccgcagcatcattttcttctgggcctggcggaccaactcacgcggcagccggagcggattagtgttcccctgtcgacgtttctggaacctcatcgtgcgttaccgttagccggcgttgtgttcagcccgtcatcgccgcaggcgtcgcacagcctgaagcatcattggcgccacgataaacgctgggacgtgctactggaatctctcaggccatccggcttaaaagcacgaaagatcggctttccctggcgaagagctgtctctgcctccactgccgccctgatgttactctgggccgcctcaatgacagtctcttttatcgccaaccgccacctggtggcgatcgcacaggagcaggtgcagcaggcctcggcgggaaaacagccgctggccgtacgcctgcatgcgctctccgcgttacagaaaacgctttctcaactggaataccgctcgcagcacggagcgccgtggtacctccgcgctggtctcagccagaatgatgacctgctggcggcgctgtttccgcgctacggggagatggcgcaaccgctgctgcgcgatgcggcggcgcatcatctggaagagcagctcaccgccttcgtgcagctgccgccggacagcccactgcgtgagaagatgacgaagaccgcttacggacaactgaaacaatatctgatgttgatccgcccggaaaaaatggacgctacgtggttcgccaccacgctgatgcaggactggccgcagcgctcaggcatcgctgacgccgtctggcagggcagcggcccttcgctgctggcattttatgccgccagcctggcatcgcatccgcagtggcgtctgcctgtcgatgacggtctggtcagccaggtgcgcacacggttaattcgccaactgggccagcgcaacagtgagtccacgctttaccagaagatgctcgcgcaggtggcgaatcagtatgccgatatgcgcctggcggatatgactgccgacaccgatgcttcgcgtctgttcagcactgatgaggtggtgccgggaatgtttacccgtcaggcctgggagcaggccgtgcagccggccattgagaaagtggtcgcggaacgccgcgatgaaatggactgggtgctgagcgatacgaagcagactgccgcgcagtcgacgtcgccggaagctctgcgagccaggctggcggagcgttatttcgctgatttcagcggcgcctggctggatttcctcaacagtctgcgctggcagcgcgcggcgaccctctccgatgctatcgaccagctgaccctgatggccgatgtgcgccagtcgccgctggtggcgctgatgaacaccctgagcgtgcaggggcgaaccggccagaccggggaagccatcgccgattcgctggtcaaatcggccaggcagctgttcaaccgtgataactcgcccgtcatcgatcaacggtccggcgcgcgcggtcctctggatgccaccttcgggcccgtactggcgctgctggacaatcgcgacggcgggacacccaccagccgtcttagcctgcagaccttcctgacccgcgtcacccaggtgcgtctgcgcctgcagcaggtcaccaacgccaccgatccgcaggcgatgacccggttgcttgcgcagacggtattccagggcaaggccgtggatttaaccgaaacgcgcgactacggcagcctggtggcggcggggctgggccaggagtggagtggatttgggcagacgctgtttgttcgcccgatggaacaggcctggcagcaggtgctgaccccggcggcggaaagcctcaacgcccagtggcgcagcgcagtggtggaggactggaatagcgcttttggcggtcgctacccctttaaaaataccagcagtgaagtctctctgccgctgctggcaaaatacctcaacagcgagaccgggcgcatcgcccgctttctgcagacccggctgaacggcgtgctgcataaagaggggagccgctggatggcggacagtatcaatgctcaggggctgacgtttaacccggcctttctgcaggcgatgaataccctgagccatctctccgacgtcgcgttcgccaacggcgaagcgggattgcattttgcgcttcgccccggcacggcggacggcgtgatgcagacggagctggtaatcgacagtcagaaacttgtctatatgaaccagatgccggtctggcggcggttcagctggcccgctgacaccgaagcgccgggcgccagtctgagctggatcagtacccgggcgggcacccgccagtatggcgatttcccgggcgcctgggggtggatccgtctgctggataaggcggtggtcagcgcttatcccggaacgagcagcagctggagcctgagctggaaagcgccggatggtctgttgctgaactacacgctgcgtaccgaggcgggggaaggaccgctggcgctgctggcgctgcgaaactttacgctaccggagacgatattcagcgtgcgcgcgtctgctgaacgtgttccgctgaccgacgatatacccggcgaagagggatactgaaccttctccctcactgattggcgttaacctgcaacgccaggcctccttcgctcatggccgcccgacggccaactaatctgaccgcgcagccatgctgcgtgtctccctgtagacgaataatggaatattcataatggacgatttaaccctgcgatattttgacgctgaaatgcgctacctgcgcgaggcggcaaaagcgttcgcgcaggctcaccccgatcgggcggcgatgctggatctcgataaagccggtacgccggacccttacgttgagcgcctgtttgaaggctttgccttttccgtaggtcgcttgcgcgaaaaaattgatgatgatctgccggagctgaccgaggggctggtcagcatgctgtggccgcactatttgcgcaccattccgtcgttatcgatcgtggcgctgaccccaacgctgccggcgatgaagatagcggaaacggtgcccgccgggtttgagattagctcccgcccactggggccgaaaaataccgtgtgccggtaccgaaccacccgcgatctgacgcttaacccgctggcgatagatgaggcgatgatgacggcggagccggacgggcgttcggccctgcgactacgattcgcctgtagcgagctggctgactggtcgcagaccgatctccgccgcctggcgctgtacctgggggaagacgccgttaccggcagcgccctccatctgtggctgacccgacgccaggccgcgctgtacctgcgtctgccgggtcagacagagcgggtaagcctcgacggctatttttccccggggggattcagcgaggaggatcgtttatggccgaagggggagagcgctttcagcggctatcagctgctgctcgagtatttcacctttcgcgaaaaatttatgttcgtgcagctaaatggcctggaaaacatcaccctgccggcggggatatcgcatttcacgcttgaggtggtgttccgcgaggtctggcaaagtgatttacccgtcagcgcaagcagcctgcgcctgcactgtgtgccggtgattaacctgtttacccttgaggccgatccgttgaccatcagcgggctggagagcgaatacctcctgcgtccgaagcgcctgcaggacgggcataccgaaatctattctgtcgacagcgtgaccggctccgggcgcaccggggaggcgcgctatgtgcctttcacccgctttcgtcaccagggcgggatgatgcgtcgccatgctcctgagcgctactaccacacccgcgtaaaacggggcgtaaccggcatgcacgatacctggcttatcctcggcggacagcaatgggaggctgaccgggagctggcgcgggaaacggtctccttgcgcatcaccggcactaacggccagctgccgcgccgggcgctacagagcacgctgctggatcgctgtgagtcgatatcagccacgccgcttaccgtccgcaatctctgtaggcccacgctgccggcctatcccccggcggaagaccgctaccactggcgggtcatgagccatctgggcacccgttttctcaacatgatgagcagcgccgaggtgctgcgcggcacgctgtcgctctacaactggcgggaggatgagctcaataatcgccgtctggacgccattctggcggtcagccatcaccgaattcagcgtttcgagcagggcttcctgctgcgcgggctggatatcgaagtgacgctcgacggtagcggatttaccggtgcgggcgatgtccacctgtttggcgacatgctcaaccgctttttcgcactgtatgccgatatgaatcagttcaaccagctgacgctcattgttcaacctgaagggaaatgtatccggtggaaagagaatcacagtctgcgcctgcccggctgatggcgcagctccggcctcagttgccgtacatgaatttttaccgcttctgccagttgctggagaagaaccatccgaaggcgccgatcatcggcagcggctggctattaggtgatgaacccatacgctttcgcccgcatccggggatgggctttccggctggcgaaatccgtggaatggacgatcctgaaccgccccgtccgccggcggttcgcgtgacttttatgggactctacggcgtggaatccccgctgccgacccactatagcgatgacattgcgcaacggcgggaaggcgtcgaggccaccgaggatttcctcgatatctttaaccatcggctgatcgcccagtattaccgtatctggcgcaaatattcctacccggcaacctttcgggcgggcggcacggacaacatctcgcagtatctgctcggcctggcggggctgggcataccgggatgtgccgccgttgccgcagcgccgctgtcgcgatttctggcgctgctgccggtgatgatgctgccggggagatccggggaaggcatggaggcgctggtggcgctcctggccccggggacccgggcgacggtgtaccaccacgatccctgccggatccccttgtcgcagccgttaacgatgagcgtccgtcagccggttagcctgcaacataggccagtgatgggaacccacgccacggatgtgaacggtcaggtattgctgcagctggccacggaaaagcctcatgaggttcgcggctggctgcccggcggcgaactgttcagcgacctgatggcgcttctgcacgtctggctcggatctcatcttgacgtgcggctgcagctttgcgtcgcccgccatttactgccggatgcgcaactttgctgccagcaggagcatgccgtccagctcggccgtaccgctgtgctgcgtcctctggatgcgcagaaacaggctgacgacagagtcacgatttatctggggcgctatcagcgcgtccgggaaaatatccaccgcagggagagcgatgaagatggcgattaccgcagttaaaccctccgccaggttgctggcattcctcatggttaccgtcttaaccggctgcggcctgacgcagaccgtgaaagacggcgccgtttccgtgacccagtccattttttacccccaggtgaaaaccctgcatctggatcttcgcgcccgggaaggcgtgaataacaacgccaaaggcgcctccctggcgacggtggtgcgtatttatcagctgaaggaccggcaagcgttcgacaatactgactacccgtcgctgtttgccggcgatggccaggcgctgcaggcggaccgggtggcggaaaaagatgttcgcctgcgtccgggcgaatcggtgaccgtcgatatgcccatggaaaccagcgcgcagtttgtggcggtggcggccatgtttatcgatccagacctgacgcaaaacagctggcggctggtactcacccgggacgaacttgatccggcgaggccgcgcattatcgaagccagccaaaatcaactgacgctgcacccgtttaaggagaagtgaaaatgcctcgtccctccctgtatgacatcctgtacggcaatttcgccggcgggcttgacctgaatactgtcagcgaaacggatcaggtcatcctgtcggtgctcgataacatgcagcgcatcctcaactgtcgggccggaacgctggcgcatctgccggactacggcctgccggatatgaccgctgtcctccaggggatgccagcgtcggcgcatcagctgatgagcacgttgtcggcggtgttgctgaaatacgaaccgcgcctgcagcggatcgcggtggtgatgctcgatcagcatgcgcccggcgaactgcgctatgccattgatgcggagctgaaggatattggcctggtgcgttacggcacggagtttatgcccgagggcagggtgttgatccgccacctcaaacgtcagcagtaccttgacgcccgctccgccctctaatctctcgctgaaagacatcatgatgacaacacaccacgaccgtcactataaagccggtggcgacccgcgcacgctggctgattttatggccctgcgtgcggaaatgaacaagctcagccacccggcgcggccggatattaactggccgtatgccgagcagcttgcccgcgggctgttggagcatcacggcgcggacctgcagactgtcgcctggtataccctggcccgcgcccggctgggcggggtggcagggatcaatgaggggctgacgctgatggagtcgctgctggttcgtcaggggaaaaacctgtggccacaggcgctcccggcccggacagagatcttccgcaccctgagcaagcggctgcggcaggtgatccgtaccctgaatcttaccccagaggatgttgagtcgcttgagcaggctgaacgttcgctgcaaagcttcgacgcagtgctccagcgccttgagatcgctcctgaaaaccagctgagcgacctgcgggcgctactgcacagcacggcaactcgcttcgagagcctcgaccctgcgccagcgcttcccaccgcgccgccggtggcggtgtctgacgcggaacttcccggcactctggtcagcgaagaggatgcggcgaaggttgagccagtgccagacctaaaacgtagaccaaaggctcagccgctggctccgccttcacctgcaaagcggcccgcgccggtggcggcgtctactccggcagccgcgccgcgctggaagccgtttatcgccgggatggttaccatgctggcggtaacgggtatcgccgtcggcggatggctggcgctgcgtcagtccgacttgccgcccatttcggtcacccaaaatgccggaccgataccgggcctgccggcgacaacgcccccggggccggttgatctgccacagacgcagcgccagcttggcgagcttgcccgcctggcgccggactgggcggtcagctacggcgaccagctggtccaccaggccctgatccgctggccggatcaggcgcaaccgctggcgcagcagtggcggcagcagctgagtgctggcgcattgcccgcggaaaaccttaccggctggtcggagggcatgcagcagctgcagcggctcgccgaccagctcaatgccctcgacgagcagaaggggaagtacctgacggtgagcgaactgaaaaccgcagtatttgccatcacgcagtcgtttaaccgcgctgttccgctggaggagcagctgcgccagctggccgcgcttcccgttgatcaaccctggccagccgcgcggggaagcctcgcggagctgcatctgcaacagctgatagtggagtatgccctgctgaagcgaaaacagccggcgtcgccgaccgctgcgctccccgcaaccggtgagccctcggtgagtgaggcggtgaaataaagtgtgcgcatggcaacattttctttacatcaatattgcaagaaccgaacgcccttcgtagtctgaaaatgatttaaatataccgtttgtagttgtattgaaaattttatttcgatttctgagggcatactatgaagcactgtaaaatcatcctgttagtaggccttctggccagttccgcttcggcattagcagagaagatcggcgtctcaatggcctacttcgatcaaaactttctcactattatccgccagtccattgagaaagaagctcaagcccgccacgtcgacgtacagtttgaagacgcccgcggcgacaccggacgccaggccgatcaggtgcagagcttcatcgcctccggcgtggacgcgatcatcgtcgacccggtggactccgccagcaccccgcagctgacgaagatggcgcagcaggccaaaatgccgctggtgtatgtgaaccggacgccgggggataaaacgttaccgcccggcgtggtgtttgtcggttcggacgagcgggagtctggcacattgcagatggaggcgctggcgaagctggcaaactacaaaggcaacgtcgccatcatgatcggcaatctcaccgacgccggcgcgctgcagcgcaccaaagatgtggagcaggtggtggccaagtatccggcaatgaaagtggtgcagaaacagccggccaactattcccgcagcgagggaatggatctgatgcagaactggacgggtaacggagaagcgattgatattgtggcggcgaacaacgatgagatggcgattggcgcggcgatggcgctggagaaaagccagaagaagctgctgatcggcgggatcgacgccaccccggacgggctgaaagccctggccagcgataagattcaggtgacggttttccaggacgccgtcggtcagggcaaaacggccttagcggtagcgctgaagctgattaaaggagaaaaggtcgagtctcatgtctggatcccgtttgagttagtgaccaaagaaaacatgcagacctatgtggaaaagagtcattaacggcaaggcacaggtgcgcgaacctggctgataaaaccgggctgataatgcgacgcccgggcaactaaatcggaggaaaaaggcatggcaacggcaagaagcggctatacgctgcaggtgataaaggcaggacagcaggggcatgttgaaatgagatgggggcatctcgcagacgttgatacgcgcgcggcggcgacggctatcatgcagcatatcgggcgttcttcgtcctcgcggggccagctggagatcagcctgtcgctgaccaatgccgccagcggtatctcggtggagcttcatcacccggcctctggggaaagcgccaccccggcttttattgaggctgagttaaagaaaattgtgcagatcgttgatggctacgaggcggcagaagatacccatattgtggagtagcgtgtcgcctgggtaaaaaaaaatccacgccgctgcgtggattttttttgcgcggtggcggcgaaaacgccagccagcgggattagacgttgaacaggaagttcatcacatcgccatctttcacgatgtagtctttaccttcagcacgcattttaccggcttctttcgcgccctgttcgcctttgtaggcaatgaagtcttcataagcgatggtctgcgcgcggataaagcctttttcgaagtcggtgtggatcttaccggctgcctgcggcgcggtcgctccgaccgggatggtccatgcgcgaacttctttcacgcccgcggtgaagtaggtctgcaggttcagcagagcgtaaccggcgcggatcacgcggttcaggcccggctcttcgaggcccagctcagccatgaactcgtcacgctcttcatcgtccagctcggcgatgtccgcttcaacggcggcgcacaccggcaccaccacagacccttcctgctcggcgatggcgcgaacctgatcgaggtacgggttgttctcgaaaccgtcttcattgacgttcgcgatgtacatggtcggcttcagggtcaggaagctcagatagcggatggcctctttctcttctttggtcagatccagcgcacgcagcataccggcattttccagctgcggcaggcatttttccagcgcggccagctcaaccttcgcgtctttatcgccgcctttggcttttttggagacgcggtgaatcgcgcgttcgcaggtatcaaggtcagacagcgccagttcggtgttgataacgtcgatatcttccgccgggttcactttccccgcgacgtgaataatattatcgttttcaaagcagcgaaccacatggccgatggcttcggtttcacggatgttggtcagaaactggttgccaagaccttcacctttggacgcgcctttcaccaggcccgcgatatccacgaactccatggtggtcggcaggatgcgctgcggtttgacgatttcagccagcttgtccagacgcggatcgggcatcggtacgacaccggtgttcggctcaatggtacagaaggggaagttggccgcttcaatacccgctttggtgagcgcattgaacagggtggatttgccgacgttgggcaaaccgacgataccgcatttgaatcccatgatttaaatcaccttaatctttggataatcaatctgttacaaggaacagattgcagaaaattgaatagctttgcctattatacacggtgcgcggcaaaaatgccgcacgacaacggcttattgcgccttaaaggcgtgcaaacggttggtcgctttggtcagcccgtcctttaaccagatttcggtacagcgcgccgcttcgtcgacagcgtcatcgatcagtttctgctcgctggccggtggtttgccaagcacaaagccgacaaccttgtttttgtcgcccggatggccgattccgacgcgtaaacggtgaaagttcgggttattgccgagcttactgatgatatccttcaggccattgtggccgccatggccaccgccaagcttaaatttcgccacgcccggcggtaaatccagctcgtcatgagcgaccagaatttcatccgggttgatgcgataaaaggtcgccatcgcggccacggctttaccgctgaggttcataaaggtagtggggaccagcaggcggacgtcctcgcccgccaggttgatgcgcgaggtgtagccgaagaatttgctctcttcgcgcagcggcgcacgatggcgatccgccagtaaatccacataccaggcgccagcgttgtgccgggtggcggcatattccgcaccggggttggccaggccgacaatcagtttaatggtcacgttttctatcctgcatggggcattctctgccgcgtagtgtactgtctgcgggcgcgcttgacaaaattctggctattagacaatacccgcattgatgatttactcactaaatcattagaatttgatatggttcatagacttatttgtaaatttttgtctattcgctgttcactaatgtgatcgtggacgcactccgcagaagagaccttgtctatactacacctataagatttggggacattccctggcaacccaaagtccggaggtgacacatgaaacgcaaaaacgcttcgttactcggtaacgtactcatggggttagggttggtggtgatggttgtgggggtaggttactccattctgaaccagcttccgcagcttaacctgccacaattctttgcgcatggcgcaatcctaagcatcttcgttggtgcagtgctctggctggccggtgcccgtattggcggccacgagcaggtcagcgaccgctactggtgggtgcgccactacgataaacgctgccgtcgtaaccagcatcgtcacagctaaccgtagcatgatttcgcgcatcggccgctgaaggccgatgcgcttttctgtgtctcactttatctcttcctctttttcccgccatattacgcccccattccgtcctggccttcgtgctgctatggttgccagcaaaaatgaatagcaagcgcggtttttgcttgaccctgacgttacgtcaggctgcagagtagcggacctggccacagagaggagcagtcatgttaattcaggtgggagagctggcgaagcgtgccggactgacggtacgtacgctgcatcattatgaacagacggggctgttaacgccttcggccagaagcgaggcgggctatcggctctataacctgtccgcggttcagcgcctgcatatgataaaggcgctggcgcaggccgggctaacgctcgccacaatcaaggactatctcgatcggcaaacgctgtcgctgcccgagctgctgacgcagcagatagatatgctcaacgcccagctacgcgatgttggcaggctgcgcgaccgactattggtgctgcgcgaggcgctggcgagcggcaatgaacccgatctggagtcctggctacagacgctggagttaatgaaaatgtacgatcgttggtttagtcaacaggagttagccgcgctgccgtttgcggcacaggatgaacagagggcgcaggcgtggcgcgagctaacggaggaggtgcagacgctgatggcgagcggctgcccgacggacagtccgcaggcgatgcgtctggcgacgcgctggatggagcgcctggagcaggatacggccgggcgtccggagtttctgacccgcctgaacgagatgcatgccgccgagccgcagatggttgaacagaccggcgtcacgccggcaatcatcgcctatatcaccgaggcctttgccgaaagcaaactggccatctgggcgcggtaccttgacgaagaagagatggcgttcacccgccagcactattttgaccggctacaggagtggcctgcgctggtggcgaagctgcatcaggcgtgccgggagggcgtagcgccggactcggcgtcgggtcaggcgctggcccgggtgtggcttgaactgtttcagtcctacgccggtacccggccgcagacgttgcagaagtttcgtcgggcaatggagcaggagccgcatttgatgaagggcacctggatgacgccggcggtgctgagctggctgcagcaggcgaccggatccttgatgcggcaggcgcagggacctgccgccgggtgatcacaggtcagccagcgcggcctgacgatcggggtagaagctcaggcgtccgggcagcggcttgacgccggcgcgcgctagcgtgcgtagcggctgaaactcgaggttagatacgcgcaattcacagccttccggcagcttgttcacaaagcgctggaaggcatccaggccaccggcgtcgagaaccggcaccgcgtcccatttcagcaccacgatgcgcttgccggcgatccgggtctccagatcgttgaacaagccttcggcggcggcaaagaacagcggcccaattacccgcagcaccagcacatcgtctggcacctcgacgttgaccggcgccagatgagtcatgcgtgcgatacggcgcataaacaacagcgaagccagcacgatcccgacgctgatagcgatcaccatgtcaaacagcaccgttagcgacatgcacatcagcatcaccacgatgtcgtccttcggcgcgtggcgcagcagattgatgactttatgcgcctcgctcatattccatgccaccatcagcagcagggcggccatcgccgacagcggcagccaggagagcagtggggcgaggatcagcagcgccaggatcaccagcagggcgtggatcacggcggcaaccggcgatgtggcgccggcgcggacgttcgccgccgagcgggcaatcgccgcggtggcagtgatcccgccgaagaacggcgcgacaatgttgcccagcccctggccaatcagctcgctattggctttgtgcttggtgccggtcatgccatcaagcaccaccgcgcacagcagagattcaatggcgccgagcatcgccattgagaaggcggcaggcagcagagcctgcagcgaggcccagctcagggtaaagtttgagcccggcatatcccagggcaataccagctgcggcagcagctgcggaatgccattgccctgagtgccgtccgccagctgataatggaactgcgagccgatcgtcgcgacatcgccgccgagcaagttgaccaccagcatgaccgcgcagccgcccagcagcgccgggaggtggcccggcaggcggatacccagccgcggccagaggatcagaatgccaagagtaacgacgccgatggcggcatcgccaacgttaatggtcggtagggccatcgccagcgccgccactttctgcagataatgctccggcacatggggcatctgcaggccgaggaaatctttaatctgcatggtgccgatggtgataccgatccccgaggtgaagccgagggtgactgacagcgggatatattcgatcaggcggccaaagcgcgccaggccaaagaggattaaaaagatccccgacatcagggttgccaccagcagtcccgccagaccaaactgctgggaaaccggatagaggatcaccacaaaggcggcggtcggaccggaaacgctaaagcgtgacccgccggtcaaggcgatcacaatccctgccaccgctgaggtatagaggccgtactgcggcggcacaccgctgccaatcgccagcgccatcgccagcggaatcgcaatgatcccgacggtgatcccggcgatcaggtcacgcgtgaagcgggcggtggtgtacttttctttccaacaagcgtcgatgagggcgcggaaaggcatcacatgtgaggaaaataatctgttcacaataatgtttcatccatgagcgcatcatctgtcaactaaatggcaggtgaaggaggcattgatcatacaaataaggtgcggagacaaaaaaacccgccgcagcgggtttttgtgctgggctcgattaatgttcgaacatagcagagatagattcttcattgctgatacggcgaatagcttcagccagcataccggagagcgtcagagtacgcactttatccagcgctttaatttctggtgccagcggaatggtatcgcagacgacaaattcatcaatgacagagtttttgatgttctggatagcgttgccggagaagattgggtgcgtcgcgtaagcgaatacgcgtttcgcgccacgctctttcagcgcttctgccgctttacacagggtgccgccggtgtcgatcatatcgtcgaccatcacgcagtcacgaccggcaacgtcgccgatgatgtgcatcacctgggagacgttggcgcgcggacggcgcttgtcgatgatagccatatcggtatcattcagcagtttagcgatagcgcgggcacgcacgacgccgccgatgtccggagaaaccacaatcgggttgtccaggttcagctgcagcatatcttccagcaggattgggctgccgaacacgttatcgactggcacatcgaagaagccctggatctgttctgcgtgcaggtcaacggtcagcacgcggtcaacgccgacgctggacagaaaatccgccaccacttttgcggtgattggcacacgagcagaacgaacacgacggtcctgacgagcataaccgaagtaagggataacggcggtgatacgacctgccgaagcacgacgcagagcatcaaccataacaaccagttccatcaggttgtcattggtgggagcacaagtggactggatgatgaaaatatcaccaccgcgtacgttttcattgatttgtacgctgacttcgccgtcgctaaaacgacctacagcggcgtcgccaagagaagtgtacaggcggttggcaatacgttgtgctagttccggggtggcgttaccagcaaaaagcttcatatcaggcacgagaagaacctcaggcatgcgtccagtggtggatgaatgggccaataatgtgcgggatggcgccattcgatccagtcggtgtatttaaagagcacgatgcaacgtctggaacagggtgacgttgtcaccgtaactcaatttccccggctgactcattatcaatgtgccatcacggcgcaggattcagagcagggcctgcttgagcggcgaaaggttaactccgcgcgccacaaagccatttagccatgccggggcagtgtccagcacctgacgggcagcggattcggtgttaaattcagcaaacacacaggctcctgtgccggtcaggcgtgacggcgcatattctaacagccaggaaagcgcggcatcaacctcgcgaaaacgttttcttgcgataagctcgcaatcgttgctgaattcacaatttaataacgtattaattgaccggcgcggggtatttcgtggtagctccggatcgcgaaaaatgatcggcgtcggaatactgacccccgggtgggccaccaggtaccatttttcctcgggttctaccggcgtcagtatttcacccaccccctcggcgaaggcggcatggccgcgcacgaaaaccggcacatcggcccccagctgaaggccaagagtcgccagctcatcttccgagagaccgcagccccacagatggttgagcgccaccagcacggtggcagcattggaggagccaccgcccaggccgccgcccatcggcaggcgcttatcgatactgatatcggcgccgctgcccgccggcaggcgatcgctttcgctggcggcatgcatcagcagacgcgcggcgcgaacgatcagattctcctcgtccggcacgccggccaccggcgtcagcaggcgcagttggccgtcagtacgcggttcgatggtcaacgtatcgccgtaatcgagaaactgaaacagcgtttgcagggtatggtaaccatcggcccgctggccggtgatatataaaaacagattcagttttgcaggagagggccagcgggtcatcatttcacgatccagttatccatcttcagcttgatgcgctgagcgccattgttcagctcgacattggacggtagggctggctgggtatcgctggtgtagccgccgtaggtcacgtgccaggttttgccgttttgcgtatagttcagttcacgcagacggtaccgatcgtccagcgaatagtcggtggcgtcgcccggtaggccgatgatccactggcgcaggctgttcaacgggatcggcatcccggtcagacggccaatcatctcttcggcatcagtggcggtataggtctggcctttgttatcgatcagctgcacgctgcccggctgcgcggtcagcgacagctcggtgctgcccagcgggttggtcagcagcaggcgatagcggtcctggccggtttgctgccagaagaagcgggcatagactttttgctcatcggaaagataggcaaacgccccgcgggtctggaactgattgaggctgcggacagcctgctggtgctgacgccactgcggcgaatccgggcttttgccaggcccttgcggcgtatgaagagaacaggcggtgaggacgaggctggccagcggcagcaggcggaacagtcgattcataatgatgacaaatccttgatgtctacagggaaaaacggcgacagggaacagcgggccgatttgtgtagcaggttacatttataacccttaatgctagcgtcgccgggcgatagcgtctacgttcaagttgtctgaaatcaaaaaattaaccttaatggcggtcttgctttaactattactccaaaaggggagcctctcttttattgattacgcgcatcctgtatgatgcactcagactaaccttagcaacgctggtactactccctcacaatgacccttttagctcttggcatcaatcacaaaacagctccggtcgccctgcgagaacgcgtcacgttttcgccggaaacgctcgataaggcgctggagagcttgctggctcagccgatggtgcagggtggggtggtgctgtcgacctgcaaccgcacggaactctatctcagcgtcgaagagcaggataacctgcaggaagcgctgatccgctggctgtgcaactaccacggcctcaacgaagaagacctgcgaaaaagcctttactggcatcaggataatgacgccgtcagccatctgatgcgcgtcgctagcggcctcgattcgctggtgctgggcgagccgcagatcctcggccaggtgaaaaaagccttcgccgactccagccgcggccatcttaacgtcagcgagctggagcggatgttccagaaatccttttcagtggctaagcgcgtgcgtaccgaaaccgatatcggcgccagcgcggtctctgtggctttcgccgcctgtaccctggcgcggcaaatctttgaatcgctctccagcgtcaccgtgttactggtcggcgccggggaaaccattgagctggtagcgcgccatcttcgcgaacatcacgtgcgcaaaatggtgatcgccaaccgcacccgtgaacgcgcccaggcgctggcggaggaagtgggcgccgaggtgatagccctcagcgatatcgacgaacggctgaaagaggccgacatcattatcagctccaccgccagcccgctgccgatcatcggcaaaggcatggtggagcgtgcgcttaaggcgcggcgtaaccagccgatgctgctggtggatatcgccgtcccgcgcgacgttgaaccagaggtcggcaaactggctaacgcctacctctacagcgtcgacgatttgcaaaacattattcagcataacctggcgcagcgtaaggctgccgcggtgcaggcggaatcgatcgtcgagcaggaaaccagcgaatttatggcctggctgcgcgcgcagagcgccagcgagaccattcgcgaataccgttctcagtctgagcaggtccgtgaggagctgacggcgaaagcgctggccgcgctggagcagggcggtgatgcccaggaaattatgcaggatctggcgcgcaagctcactaaccgcctgatccacgcgccaaccaaatctcttcagcaggccgcccgtgacggggacgacgaacgtctgcatattctgcgcaacagcctcgggctggaatagcgcacctttctcttattttcaggacagggtgaattcacgcctatgaagtcttctattgttgccaaactggaagcgttgtacgagcgccatgaagaagtgcaggcgctgctcggcgatgccgcgacgattgccgatcaggataaattccgcgcgctgtcgcgggagtatgctcaactgagcgatgtggcgcgctgctataccgactggcgtcaggtgcaggaggatattgaaaccgcgcagatgatgctcgacgatccggaaatgcgcgaaatggcgcaggaagagctgcgtgacgccaaagaaaaaggcgaccagctggagcaacagctgcaggttctcctcctgccgaaagatcctgatgacgagcgtaacgccttcgtggaagtgcgcgccgggaccggcggcgacgaagcagcgctgtttgccggcgatctattccgcatgtacacccgttacgcagaatcgcgccgctggcaggtagagatcctcagcgccaacgaaggtgagcacggcggctttaaagaggtgatcgccaagatcagcggcgacggcgtttacggtcggctgaaatttgaatccggcggccatcgcgtgcagcgtgtgccggccaccgaatcgcaggggcggatccacacctccgcctgtacggtggcggtgatgccggagctgccggaagccgaaatgccggacattaacccggcggatctgcgcatcgataccttccgctcctccggggcaggcggtcagcacgttaacaccaccgactcggctatccgcattacccacctgcccaccggcatcgtggtggagtgccaggacgagcgttctcagcataaaaacaaagccaaggcgctgtcggtgctgggcgcgcgcatccgcgccgccgaagtggccaaacgtcagcaggcggaagcctccacgcgccgcaacctgctgggcagcggcgaccgcagcgaccgcaatcgcacctataacttcccgcagggccgcgtgaccgaccaccgcatcaacctgacgctctaccgtctggatgaggcgatggagggcaaactcgacatgctgattgagccgattgtccaggaacatcaggccgatcagctggcggcgctgtccgagcaggaatgatgacctttcaggcctggctgcagcaggcgatcgcccgcctggcggagagcgacagcccgcgacgcgacgccgagatcttgctgggacacgttaccggccgggcgcgaacctggattttggccttcggtgaaacgacgctctctgctgacgaggcggcgaggctggaggcgctcctggtgcgacgccagcgcggggaacctattgctcatctggtcgggcagcgcgagttttggtcgctgccgctgttcgtctccccggcgacgctgatcccccgcccggataccgaatgtctggtagagcaggcgctggcgcgtctgccaaccgcgccgtgccgtattctcgacctcggcaccgggaccggcgccattgccctggcgctggccagcgaacgtccggactgtgaggtcaccgcggtggacgtgatgccggacgccgtggcgctggcgttgcgcaatgccgaacatctgggcatcgctaacgtgacgataagtcaaagcgactggtttagcgcgctggacgggcagcgcttcgccacgatcgtcagcaatcccccctatatcgacgccgccgacccgcatctcgccgaaggcgatgtgcgctttgagccgttgacggcgctggtcgcaggcgaccaggggctggccgatctggcgcatatcatccgcgagggacggcagtatctgcagcccggcggttggatgctgctggagcatggctggactcagggcgaggcggttcgcgcgctgttccgcgaagcgggctatctggacgtcgcgacctgtcgcgactatggcgacaatgagcgtctgaccctcggacgtttacccgacatggagaatgttggctgatgaacttattcacggctgtcctctacctgcacattgccacagtggcggtgtcggtaggattgttcgttttacgttactggtggatgtatcaccagagcccgctgctgaaccagcggtgggtgcgaattgcgccgcactgcagcgatacgctgctatttctcagcggcgcagggttaatggcgataacgcactacctgccgttcacagaagacggcgcatggctgactgaaaagctgtttggcgttatcatttacatcgcattaggttttatcgcgttgggccgtcgtcgtccgcgcagccagcagagccgttttatcgcgttcctgctggcgctggtggtgttgtttatcatcattcaactcgccatcacaagaataccgatactggggtaggtcatggggtcattagcggatttcgaatttaacaaagcgccattgtgtgatggcatggtcctcatttctgaacaggtccgcgacgattttccgtcgcgttttgtcgaggaagagctgcagcgattgctgcgcctcgcgcaggaggagattgcgccgtcgtgggaccaggagcgccagatagaacgattgctggagctgttttatgacgagtggggctttggcgcctcgcagggcgtgtatcgtctttccgacgcgctatggctggataaagtgctggttaaccgccaggggagcgcggtgtcgttaggcgcgatcctgctgtggatcgcccagcgcctggcgctgccggtggtgccggtgatcttcccgacccagatgctgctgcgtgcggacccggaaaccagcgaagagatgtggctgattaatccgtttaacggcgagaccctcgacgagcataccctggaggtatggctgaagggcaacatcgggccggtggcggaactgtttaatgaagatctcgacgaagcggataacgccgaggtgatccgcaagctgctggacaccctgaagtcggcgctgatggaagagcggcagatggagctggccctgcgcgccagcgaagcgctgctgcagtttaatccggaagatccgtatgagatccgcgaccgcgggctgatatacgcccagctggactgcgatcacgtggcgctgttggatctgagctatttcgttgagcagtgcccggaggatccgatcagcgagatgatccgcgcgcagatcaacacgatttcgcataaacaaattacattgcattagtctggaaccattccggttacaccctgataaggcgaacttatgaaacaaaaagtggttagcattggtgatatcaacgtagcgaacgacctgccgttcgtgctgttcggcgggatgaacgtgctggagtcgcgcgacctggcgatgcgtatctgcgaacattatgtcaccgttacgcagaagcttggtattccctacgtcttcaaagcctcctttgataaagccaaccgttcctccatccactcctatcgtgggccgggtctggaagaagggatgaagattttccaggagctgaagcagacctttggcgtgaaaatcatcaccgacgttcatgaagccagccaggcgcagccggtagctgacgtggtggacgtgatccagcttccggctttcctcgcgcgccagactgacctggtggaagcgatggcgaagaccggggcggtgatcaacgtcaagaagccgcagttcgtcagcccgggtcagatgggcaacatcgtcgataagtttatcgaagggggtaacgacaaagtaatcctctgcgaccgcggcgctaacttcggttacgacaacctggtcgtggatatgctcggcttcggcgtgatgaagaaagcctccaacaactcgccggtcattttcgacgtcacccacgcgctgcagtgccgcgacccgtttggcgcagcctccggcggtcgtcgtgcgcaggtgagcgagctggcccgcgccggtatggcggtaggtatcgccggtctgtttattgaagcgcatccggatccggaccacgcgaaatgcgacggcccgtccgcgctgccgctggataaactggagccgttcctcaaacagatgaaagcgattgacgatctggtgaaaagcttcgacgagctggataccagcaagtaagcctgactgcatcagtaaaaaagcctgccggcgtcaaaaccggcaggctttttttcgcccggactccgccgggtgggaaaacggggtcaggcgaaaatggtcatcagataggcggcgaacagcgccatgtgggccgcgccgttcagcacattggtgcgtccggtggagaaggagatatggcacagcaccagcgaggcgaccatcaccaccatctccggggcgccaaggccaaagcgcagctcattgccggtcaggaaggcgatgagggtgaccaccgggaccgtcagcgagatggtggccagcacggagccgaaaaacagattcatcgcccgctgtacctgattgttgagcaccgctttcagggcgccaaggccttccggcgacaggatcagcagagccaccaggaagccggtaaatgccaccggggcattcatgctggtcaacagcgtttccagcgggttagcgttcattttggtaaccgcgatcactgccaccaggtgcaccagcagccaggcggtatgccacccgctgctgtgggcggacggtttaccgtggtgcgggtcgtcatcgtcgctgtcgtcttcatgctcataaacaaacaggctctgatgggttttggtctgaataagcaggaaaacgccgtacatggccgccgaaattaccgccaccagcagcgattgcccggtgctgaagttcgcgcccggcagcgccatcggaaagaccagcacgataatcgctagcggaaacagggcgataagatactgcttaatgccgaacagattcatatattgggtggcgaatttacgcccgcccagcagcagagagaaaccgaccagaccgccggtgacgatcataataatggagtagagggtatcccgcatcaaggtcggcgcggcgtcgccggtggccattaaggcagagatcaaactgacctcaaggataaccaccgacaggcttaaaatcagggagccatagggttcgcccaggcggtgggcgaggacgtcggcgtggcggaccacgctgaaggcgctgctcaaaatgccgaccagtgcgaggatattgatcgcgatgaccactggcagtgactggctgctgccccagaaaaacagccccgccagcgccagcaccggaaagacgagggaagactccttatggcgggtttttaccgcctcatgtgcatgggtcatgaaccatctccatttatgcaggtgttataattataaaaacgtagggcggtaaagtaacagatcttgctaaattaccgctggttttttacttaaatttacgggtatcgagggatatcttgattagtttattataatttatgtttacttatatttagttcttattattcagataattactaaaataatttttctactcattttgaccttgatagccagccgactgcgtaccagacttaaacttaatgctcaaacaggaggtcagtatgccctatcgcagtaaacaagaactccccgacagcgttcagcatgtactgcctgcccatgcgcaggaaatttataaagaagcgtttaacagcgcctgggatcaatataaagataaagacgagcggcgcgatgacgccagccgcgaagagacggcgcacaaagtcgcctgggcggcggtgaagaacagctatgagaaaggcgatgatgataagtggcataaaaaaaaataatcgctgacgccgctttttcgcttgccagcgccccgctgattgcttattgaaagataaagctggataatatttcagcaatattgacggatgcatgagacgaacgccgggaagcgggcagtggcggaggtagtaaacagtgttaactcgtgatttcttaatgaatgcggattgtaagacagcgtttggcgctattgaggaatcgctactctggtcggcagaacaacgtgcagcctcgctggcggcgacgctggcctgccgcccggatgatggctcagtatggatctttggctacggttcgcttatctggaacccggcgctcaattatcgcgagtcctgcaccggcacgctgccgggctggcaccgcgcgttttgcctgcggttgaccgccgggcgcggtagtgcctgccagccgggacgcatgctggctctcaaagagggcggccgaaccaccggcgtcgcctatcgtctgcctgacgacacgctggaggaggagctgaccctgctgtggaagcgggagatgatcaccggctgctatctgcccacctggtgcaagctggagctggacgacggacggacggtgaatgccctggtgtttattatggatccgcgccatccactgtttgaaccggataccagtgcccaggttatcgccccgctaatcgcccgggccagcgggccgctcggcaccaacgcccagtatctgttttcgcttgagcaggcgctgcgtaagctgggcatgcacgatgccagtctcgatgacctggtggccagcgtccgcgcgctgttgggcgagagtccgacgccgggcctggcctgagcgcgcgcaaaagaaaacgcccggcatgaccgggcgtccgattgctgaccagtaaggaaaaagcgtggtttttccttactggtggttatcagccgaaaatcaataaattgattttccttgttatttttctggtgcaatctgcaagtacaatgattgcatggggtttgtcatgaatctcacgcccggcatgaccgggcatgtgttctggcagtgacggtcaggccggcacgtagctgatggagtgctccagcgactggctgtgactgtcgataagcacgttccaggtgccgctgtagggcaccgtcagataggcgctgtcccgatcctgcacgctcagaatatccgcatgactgtcgcccgggaccttcgcgctcatcagatgaatatggcagcgctctgagcaccgcaccaccagcgtgtcaccaccaaataacgtcaaacttgctttaaccatcgccattttataccccgtttctgtcccgctacagcatcctgcccacccagtcctcgcgtgatattgttcacactttgctctgtgcatcacaccaaacggcgcgggtcgggatgctgattttgatcaaaaaaagggataaagattaaacaaaaatgacgttgttcctgaaagcattcagctaacgttttttttacctctgcaggcggcgaaacctgatatttcctgccgtttggcgccccagattcagaaggtcagcactttatctgccgccagggtccactgggccagctcaacgagagtgccaacctccacgccgtcaaccagcggcagtgcgctgaccccgcggccgtccgcgcaggttttacacagcttcacgggaacctgctgggcggtgaggatctccagcatctgctgcacattatacccttctgccggcttctgcccccgcagcccggcggtgacggcgtcggacatcagaaacagcttgagatcgaggtcggactgctgctcgcgcagggcaatggccaggcgcaggctgttgaacagggattcgctgccgtaggcggcgccgttggcgatgatcacaatacgttgcatacaaactccttcttaaaggcacggttattgctttaggcagtataaagcgttaacccggaggaggggtatgaataatacgactggtcatgcgcacgatgcgacggcctggctgcagctggcgcgtcgcctgcaaaaacaacagcttcagcagcttagccaactgggggaactggccagccagctcagcgcgctggtgcatatgctgcagtgtgagcgcggggcgtcgaatatctatctttgctcgggcggcttgctgtatacagcggagtgtcgggcgggaggggcgctggttgacgagcggctagccctgttttatgccagcctcgaacgggcgcgcgcggtagccggcagcgcgctgtgctggcgtatcgccagagcggttgacgagctggcgcagctcccggcgctacgcgcgcagatcggccgccggcaaattgccgctgaagccgcgacggagcagttcagccgcgtcatccgccatctgctgaacatcgccccgcagctcaatgacagcattgacgatccgccggtggctggtcggatggtcgccctgtacagctttatgcagggaaaagagctggtgggccaggagcgcgcgctgggagcattgggctttacccgcggcgagttcagcgacagcctgcgccagcagctggtggaccgtattgacggtcagcagccctgcttcgacagctttcaggcgctgggcagcccggcgaccgtccagttgttcagaacccagtgccacgccggtctggatattgaacagctgcggcggatcgcctgtacccgtcagccggctgccgacggcggggaaacggcgctgcgctggtttggtctgcaaacccaacggcttgagcaactgcgcgaagtggaagagcaactgatcgacgatctgctggatgccaccgacgcgctgttagcagacgacgcgcctggctggcaggccggagaggaagacgatagcgtgacgccacggctcgataaacagctactgccgctggtgcgccagcaggcctatgagctgcagcagctctccagccagctggcctcgctgaaagacgcgctcgaagagcgcaagctgatcgaaaaagcgaaaagtctgctgatgacgcaccagggaatgcaggaggagcaggcctggcagacgctgcgcaagatggccatggacaaaaatcagcgtatggttgagatagcccgcgcgctgctgatggtgaaggcgatttggccgctaacaccaaaggagtagatgcacaatcgatgggcattctttgcatgccggcggtgcacttttaggtgaaaaaccggctagcgttgggaaaaagcccgccagcgcgctattgccaaagctggcatcccgtttgcattacttattaagtgaataaaagtccgggcaacgaaccaatggcggttcgggtgtccgtggataaaggcgtcctgcagtgcgtatgcactgtcgggcgctttttttttgcgcatggtggagcggatatgggcgacaaattttcaatttcccggcggcgcttgctgcaggcaggggccgcgctgggcggcgcgatgctgctgccgggcgtgatgcaggccgcctgggccggcggctcggacaaaccggagcaaacccgcgtgcgggtcggatttattccgctgaccgattgcgcgccgctggccatcgccgcggcgaaggggtttgaccaaaaatatggcatcaccctggtggcgagtaaggaagccagctgggcggcggtgcgcgacaagctggtggccggcgagctcgacgcggcgcatattctctatggcctgctgtacggcctcgaactggggatcgccagcaagccgcaggcgatggccaatttgatgaccctcaaccgcaatggccaggcgattaccctctccagcgagctgcaggagaaaggggtgaccgacctcggcgggctgaagcggctgatcgaccgcagcgcgccgggcagttacaccttcgcccatacctttcctaccggcacccatgccatgtggctttactactggctggcgagcgccggcatcgatcccttcaacgatgtgcgcaccgtcgtggtgccgccgccgcagatggtgatgaacatgcgcatcggcaatatgagcggcttttgcgtcggcgagccgtggaacgcccgcgctattaacgaccgtatcggcttcaccgcggccacttcccaggatatctggcccgagcatccggaaaaggtgctgggcacccgtcgcgactgggtggaacgcaacccgaacaccgcccgcgcgctggtggcggccctgatggaggcgcagcgctggatcgccgcctcgccggagaacacccgggagacggcccgcctgctcgccagacgcggctggctcaataccaaggagcaatacctcaccggccggatgcttggagagtatgacaacggccttggccgccgctggcaggatgcccatccgatgcgcttctgggccgggggcgaggtgagtttcccgtggctgtcggacgggatgtggttcctcacccagttccgccgctgggggttgctgaagcaggccccggattacctcgcggtggcgtcgcgcattaaccgcatcgatgtctggcaggctgccgcccaggcggtaggagggatcagcgcgccggcagccaggatgcgcagcagcacactaatggacgggacggtctggaacgggtccgacccggaaggctacgcccgccatttctctattcaacgtaagggggcatgagatgaagcaggcacaacgtaagcaaccggtcgtcagcgtggacaacgcgcctggcgaagtgattatcctgccgccggtgcaggtccggcgcaccacgccgaccgtcacgcgctggctgcgtgagctcacccagcgcctgctgcccccgctgttggggctgggtgtgctgctgctggcctggcagctggcggcgatgcatagcaaaggctttcccacgccgctgagcacgctggactcggcgctgaccctgtttgccgatccgttctatcaggacgggcccaatgacatgggcatcggctggaacgtgctggcctccctgcagcgcgtggcggtgggcttcggcctggcggcgctggcgggcattccgctggggtttttgatcggccgttcgctgttcttcgcccgcatgtttaatccgctgattgctctgctgcgcccggtcagcccgctggcctggctgccgattggcctgctgctgttccagaaggcggagccggcttccagctggaccatttttatctgctccatctggccgatggtgatcaacaccgcggagggtgtgcggcggatcccgcaggactatctcaacgtcgcccgcgtcctccagctctcggagtggacggtgatgcgcaaaatcctctttccggcggtgctgccggcggtgcttaccggcgtgcgcctctccatcggcatcgcctggctggtgatcgtggcggcggaaatgcttaccggcgggctggggatcggcttctggatctggaacgagtggaacaacctcaatgtggaaaacatcatcatcgccatcgtcattatcggcgtcgtcggcctgctgctggagcagggcctgatgctgctcgctcgccgctttagctggcaggaaaaataaggagccaacatgaaaccattaattcaggtgcaggccgtcagccaacgcttcaacaccgccagcggtgagttcctggcgctgcagaatgtctccttcgatatcgtcgaaggggagaccattagcctgatcggccactcgggttgcggaaaatcgaccctgctgaacctgatcgccgggatcaccacccctaccgagggcggactactgtgtgataaccgggaaatcgccggtcccgggccggagcgggcggtggttttccagaaccactcgctgctgccgtggctgagctgtgtcgacaatgtggcgctggcggtggatcaggtgttccgtcgcaccatgagcaagagtgagcgccgggagtggatcgaacacaacctggcgcgcgtacagatgggtcatgcgctgcacaaacgtcccggggagatctccggcggcatgaagcagcgggtgggtatcgcccgggcgctggcgatgaagccgaaagtgctgctgcttgatgagcccttcggcgccctggacgcgctgacccgcgcccacctccaggacacggtgatgcatatccagcaggagctcaataccaccatcgtcatgatcacccacgacgttgatgaagcggtgctgctctcggatcgggtgctgatgatgaccaacggtccggtggcgacggtcggcgagatcctctcggtcgatctgccgcgtccgcgccaccgcgttcagctggcggacgacagccggtatcaccatctgcgccagcagatcctccatttcctgtatgaaaaacagccgaaagcggcgtaaggaggcggtcatgacgcggcgactggtggtgatcggtaacggcatggcggccacccggctggtgcagcggctggttgagcgcgaccccgcgcggtttgccattaccgtcgtcggcgacgagccgcacccggcctataaccgcattcagctctcgccgctgctggcaggtgaaaaaacggcggcgcagatcccgttgctgccggcggagtggtacacccggcacggggtgtgcctgcggtctggcgaggcggtcgatgaagtcgatattcagcaacggcggctgcgcatcgcggaaacctggctgccgtgggatgagctggtgttcgccaccggttcgcggccctttatcccgccgctgccgggcattgatcgtccgcaggttatgcccttccgcaccctggcggacgtggaacgtattctggcgatacccggcccggcggtggtgattggcggtggggtgctgggggtggaagcggcggcggcgctgcgtcgtcacggcggagaggtcactcttctgcatcgcggcagcggattaatggcgccgctgaccgacgcttttgccgccgatgagctcaggcagcagcttgaagcgcgcggcattcgctgcgtgctggcgtgccgcatcgccgccatcgacgccgatggcgtgcggctggcggacgggcgcgtattccgcgccgccagagtggtgctggctaccggcgtgcagcccgacagccgtctggcggcgcagtccggcgtgctgtgccagcgggggatcgtggtcgaccgtcaga

SEQ ID NO: 83 - DNA, 34967 bp, Unknown
  source: /note="Description of Unknown: MKP2_coc_1 Mutant Bacteria sequence"
cggcgagggtgtgcggcggcagcgcgttgcggttcagtttgccggtggcggtcagcggcggttcagcgagctgcatcagcaccaccggcaccatatgcggcggcagctgttccgccagccgcgctttcagcgccgcggtatccagcggcaggccggagtcagagaccagatagcccaccagctgtcgcgcatcaccgccggtcgccgccgcctggttgaagacgcaggcgtgactcaccgcctgccccacgtccggcagggccaacatcacccgatcaatctcgccaagctcgatgcgctgcccgcggatcttcagctgatcgtcgctgcggccaaggtactccaccgcgccgttcgtcagccagcgcgctacgtcgccggtgcgatacatccgctcgccgggggcaaacgggtcggcgataaagcggctggcggtgagatccgggcgccccagatagccctgcgccagctggatgccggtgagataaagatcccccgccacccccggcggcaccgggcgcatcgcggcatcgagaatgcgcagcccggtgttccacaccggccagccaatcggcacgctgctgccggtcaccgccgccagctcagatccgcaggccgggtaccagctgacgtccaccgccgcctccgtcgggccgtacagattatgcagcggcgcgccggttaagcgctcccactcgcggcacaattccgtcggcagcgcttcgccgctgcagaatacccgccgcagcgtgcggcaggcggccacgctgtcggcatccagcgaggcgacaaacgccgccagcatcgacggcacaaagtgggtggtggtcacaccgtagcgggcgaagaactgctgcatcgcctgcgggtcgcggtgcgcctccggctcggccatcaccagctgcgcgccggcgataaacggccaccagaactcccacaccgacacgtcgaaactgcacggcgttttctgcgccaccacgtcgtcggcagataacggatagcgatcctgcatccacagcaggcggttgacgatggcggtctggccgaccatcacccctttcggccgcccggtggagccggaggtaaagatgatgtaggcggtatggtctggttttgacagcgccagcggcgcctcatccccggcggccagcggctgctggtagcagaggctttccagcccggggatatcgctgaagcgggccagttgatcctccgtggcgatcagcagcgacggccgggcgtcttccagcatcatccgcaggcggtcgtccgggtagccggtgtccagcggcagccaggcggcccccgcttcgacaatgccgtgcagcgccagggtcaggaacaccgagcgcggcagggccaccgccacgctgtccccaggcttcacgccgcgctgacgcagcagctgcgcgagcgccaccacctgctgacgcatctcgcgatagctgaactgccagcgggcgtccgccagcgccggcgcatccggggtcttccgcgcctggtcggccaccagcgcgctgagggtggtggcaggcagcggcacaacggtatcgttgaccgccgccagccgggccagctcgtcggcggagagcatctctgcttcgccgcagcgcagcgccggatcggcggcgaactgcgccagcagcgcggtcagtcgcgccatgtggcgacggagctcggcttcgtcgtaccgggccttgttggcgaggatctccagcgacagcccgccggtctcatccgggaacagcgccagctcgagatcgttgaccgggccggtggcgagggtgtgggtcactgcctgcacaccatcgatatccagctggtaatcaaagactttgacgttcagcaccgggccgaacagcggttcgtcccctgccgctttgccgctgtcgcggacgatctgctcggcgtcatagcgctgatggcggcgcatctttttcagctgaccggcgaggcgcatcgccaggtccgccagcgtctcccgggcgtcaatatgcaccgccagaggcaggacattgagcaccggccccgtcgaggtcagcgcggctgaacccatccggcgcataaagataaagcccgccgcgtagtccatccggttgcacaggcggcccagccacagcgtggtgagcgccagcgccaggtcagcgggctgacactgcggcgcatggctggccaggcggcggaagccgtcggcgttcatctctagcttcatccgccagatatcgctcccggcggcgcgcccgcccagcggcgcggcagagagtgaggcaggcgccggtaacgcctggcgctgggcctgccagaaagctttatcccgctgccaggcctcgctgccggcgtagcgctggtactcgtccaccacctcggcgaagggggtgaaaggcgactcaggagtagcttccccccgctgccaggcgcgataaatggcggcgatctgccgggttatcgccgggaagctgaagccatccaccagcaagtggtgataacgctgataccagtaccagcagtcgtcgccgacgcgcagcagttgatggcacaccagcgggttgccgccgtcgacgcgcagatcctgcgccagatccgcctgcatccgctccgtggcggcgcgatgcggatccggcgccgtccgcaggtcaatgatcgacggttcgccaaaggtgcggtcggccgccagccactgccagacttccccctcctcttcctcaaagcgcaggctgagggtgtccgcctgctgcagaccggcgacaatcgcttttcccagcagcgtcgggtcgagggcgccgcgtagttcaacatagtgggccacgctccaggcgcctggcagagtggagaggcgctcggccatccagatccccggctgcgcggcaaccagcggtaaacgagtggtcattgtcagctccttatgacgcatgatgggcgggggtcagtgtcgaccagttggccgccagccaggcgttgcaggcctcggccgactgcggggggcacaccaccgtccagccggcaggcaggtcgcagtgcgccggccacaggctgtactgctgttgatcattgcgcagaatgtaaaactgcccttgcggattgtcgaaggggttactgaattgcatatcaaactcctgtcgtaaaacgcgatgctaagggtgcgacagcagaggctgccagagctggataagccctgccgtcagcccgccgcgccagcaaagcgcatcatgcccgccgtcaacctgacgccagaaaatcgtctgctgtgttgtggtgagttgcgccagtagcgcctggttcgcgcgaaaaatgatcggttcgcgttggcccgcttccagccagacgcgcagcccggccgcggacacctcaccctggcgaagctgttcgccgataaagcccatcccgcggccatcgcggtgcggccaccagtaggagcctgactggctgagcacgcagccaaagcgctgcggccagttgagagcggcgaacatcgccgccagaccgccgaagctttgcccggccaccaccgtccgatccgggcggtcgctgaacggggcatagccgtggaccagcggcaggagctcctcctgcaccgccagccagaaatcgcggtgacagggcagctcaaccccgcggcgctggttgtcgatcgcgtcgatcagcaggtagaccgccggtggcagtcttccctcgcgggtcagggcggccagcggcgaccacaccggcatgctctcggcccagaactggccgtcgagcaggatcgccagcggccgcgtttgcgggtcgacggcctcgccggtggtgtagatccagacccggcgatggttgcccagacgcgcgctgcgccactcaaggcaacgggcggcaggatgcgcctcattaagcgggtcccagccgggctgcgcgggggcctgcggcatctccagggcggacacgccatggccgcgtccgccccgccagctgtgcgggttcagcggatcggctatcgcccgcggcagcagtttgcgccagccttcgcgtagcagcgcgcggtcgggcgcatcagcgctgaacacctcaggggaaaaatcatcgtcacggtcggagggaataaaacagtagctgccgcgccaggtcggcgacagcgtagtgcgccagaaccaggcgtcggtcccggggagacgttgcagcgattgcggacgcgcattctgatggtggtcggtcacgccggtgatatagagccatacccgacgatggggagagcaggtttcatcccccgccgggtcccgccaccagaacgttacctcgatggtgtcatccactgcgcggcactgcggcccccgcagggttcgccaccactcctcgcttcctgtccttaacattctgtaattaaccctatgtatagcgtgacttttttaattaattgtcattatttattgataatattattgataactatttgcatttgcaatagcgtattagcgcgccgtgggaagcgcgtctttcatcagaacatgtcaaatcgggcctattcagccagcgacggagtgcctttgcccgcttttggcaacatttatgccgcctcccctcccggtgggaaggggcgtttggggaacgtggcgacaaaaagcaggaataacaatgaataacaggatcaaatccctggccttgctggtcaatctgggaatttacggggttgcttttccgttaagcgcagcggaaaccgccaccgacgataaaaacagcgccgctgaagagaccatggtggtcaccgccgccgagcagaacctgcaggcgccgggcgtctccaccatcaccgccgatgagatccgcaaacgccccccggcgcgcgacgtctcggagatcattcgcaccatgccgggagtcaacctgaccggcaactccaccagcggccagcgcggcaacaaccgccagattgatatccgcggcatgggcccggaaaataccctgatcctgatcgacggcaagccggtcaccagccgcaactccgtgcgccttggctggcgcggcgagcgcgacacccgcggcgataccagctgggtgccgccggagataatcgaacgtatcgaagtgattcgcggcccggccgccgcccgctacggcaacggcgccgccggcggcgtggtgaatatcatcaccaaaaaaaccggcgatgagtggcgcggctcatggaacacctatatgaacgccccggagcacaaggatgaaggctccaccaaacgcactaacttcagcctcagcggcccgctgggcggcgattttagcttccgcctgttcggtaacctcgacaaaacgcaggccgacgcctgggatatcaaccagggccatcagtccgagcgtaccgggatctatgccgatactctgccggccgggcgcgaaggggtgaaaaacaaaaacatcgatggtctggtgcgctgggaattcgctccgatgcagtcgctggagtttgaggccggctacagccgccagggcaacctctacgccggcgatacccagaacaccaactccaacgacctggtaaaagagaactacggcaaagagaccaaccgtctgtatcgcaacacctactcggttacctggaacggcgcctgggacaacggggtgaccaccagcaactgggcgcagtacgaacgcacccgcaactcgcgcaaaggcgaaggcctggccggcggcaccgaggggatctttaacagcaaccagttcacggatatcgatctggcggatgtgatgctgcacagcgaagtcagcattcccttcgactatctggttaatcagaacctgacgctgggcagcgagtggaatcaacagcggatgaaggataacgcgtccaacacccaggcgctgtcgggaggcgaaattccgggctacgacagcaccggccgcagcccgtactcgcaggcggaaatcttctcgctgttcgccgagaacaacatggagctgaccgacaccaccatgctgactccggcgctgcgtttcgatcatcacagcattgtcggcaataactggagcccgtccctcaacctgtcgcagggcctgtgggatgacttcacgctgaagatgggcatcgcccgcgcctataaagcgccgagcctgtatcagaccaacccgaactacattctctacagtaaaggccagggctgctacgccagtaaagacggctgctatctgcagggtaatgacgacttaaaagccgagaccagcatcaacaaagagattggcctcgagtttaaacgcgacggctggctggcgggcgtcacctggttccgcaacgactaccgcaacaagattgaagcgggctatgccccggtctatcaaaacaataaaggtaccgatctctaccagtgggaaaacgtgccgaaagcggtggtggaaggtctggaggggacgttgaacgttccggtgagcgagaccgtcaactggaccaacaacatcacctatatgctgcagagtaagaacaaagagaccggcgatcgtctgtcgattatcccggaatacacgctgaactccaccctgagctggcaggttcgcgatgacgtttcgctgcagtcgaccttcacctggtacggcaagcaggagccgaagaagtacaactacaagggtcaaccggtcaccggcagcgagaagaacgaggttagcccctacagcatcctcggcctgagcgcgacctgggacgtcaccaaatacgtcagtctgaccggcggcgtggataacgtcttcgataagcgccactggcgcgcgggcaacgcccagaccaccgggggcgccaccggcacgatgtacggcgccggcgccgagacctacaatgaatcgggccgcacctggtacctgagcgtcaacacccacttctgatagcgggttctccctcccccgcccttgctggacaaagggcgggggcaaccgcggtaaccttatcctatgcgccaccatcgcaccgttttgcctctggccggctataccatccagcagatcgacttcgacccggcgactttccagcctgaagatctgttctggctgccctatcacgccagcctgaccgggtggagccgcaagcggcaggcggagcacctggccggacgcatcgccgcggcatacgccctgcgcgaggtgggggagaaacggcttcccgccatcggcgatcggcgccagccgctgtggcccacgccctggttcggcagcataagtcattgcggccagcgcgcgctggcggtgatcgccgatcggccggtgggcgtcgatatcgagcgccggtttaccccacagctggccgcggagctggagagcagcattatcagcccggcggaaaaaacggcgctgctgcgcagcggcctgcccttcccgctggcgctgacgctggcgttttcggcaaaagagagtgggtttaaggcctggtcctcacacgcttccggcctgcccggcttccacagcgcccggattgtggcactcactacgcagcagatccatttacgttttaccgccagcttctccctgcaacttgctgatttcccccttaaaatcaatcatctgataaaagacgatctcgttattacctgtacctgcccgactcgcgaagcgtgatccttttcgctttttaagaaattacctgtgcaaaccgtagacagttctgactggccgctttatggttacattgaataataaatcattattgaatatatattcaatgcggagataataatgaaaactaccctgataaagtctgttctgtttgcctccatgatggccgcatctggctcacttttcgccgccgataatggcctgatcgcaatcattaccccttcacatgataatcctttctttaaagccgaggctgacggcgcagcggcgaaagcaaaagaactgggttacagcaccctggtcgcctctcacgacgacgacgtcaacaaacaaaaccaactaattgaaacggctattgcgcggaaagccaaagccatcatccttgataatgctggcgcggatgctaccgtcggcccgctggaaaaagcaaaagcggcaggtgtgccggcatttttaatcgacagggagatcaataaaaccggcgtcgccgtggcgcagatcgtctctaacaactatcagggcgcccagcttggcgcagaaaagtttgccagtctcctcaacggtaaaggcaagtatgtcgaactattaggtcgtcagtcagacactaacgccagcgtccgctcgcagggttatcacgatgtgctggacgactatccggaaatgaaaatggtcgcccagcagacggcgaactggagccagacggaggcctttacccgtatggaagccattctgcagacgaatccggatatcgtcggcgtgatttccggcaacgataccatggcgctgggggcggaagcggcgctgaaagccgcgggtaaaaacgacgtgattgttgtcggcttcgacggcagcgactacacgcgcgactcgatactcaagcagggcaacattaaggccacggttctccagcccggctggaagcaggcgcaaatggccgtggaacaggcggactttttcctgaagaacgggaaagcccagaaagaagagaagcagttgatggactgcatcctcatcgatagtggcaatgcgaaaaaactcaacatgttcaacctcagcgagtaaggcggaaatgatgcggttaaaacaatggggcgccgtgctgatgggctgcgccgccctgttgctgacggcctgcacggtggtggacttagatgagaatggcaagccagtgctgcctgccgacccgaacgcgaaacccagcttcgaccatctcaccccgcagcagatcgcgcaacaaacctggcaatctcgagtgattgacgcagcgaaccaacatgcgctggacgcgactgcgctggaaaaagtgcgccaggcgtctggcgctacgccacagagcgtctttgtccgcctgaacagcgaggtgaccgggactgacgtcagcaacccacgcgagcaaaagctcactcttacgctactgggccagccgttggtcgtgcagttgggtcctgtcatgagaggcaacgccattcgcgatgccagcggttttaaatttgaagactttaccaaccaggtgcagtttgcgcagctttcacgcgcctacaaccgggaggcaataaaatcgttgccgacagtggacgcgagctgggcaggcaaacctgtcgatattctctttgcggccacggtggttaacggcagcctgcaggatgcggccgctcttgcgctaaaacaggaggcgcgctgatggccagttcacccacagaggagatcattttacgcacccgtggtatttccatgctgttccccggcacggtggccctggataacgtcgactacaacgtctggcgtggcaaagttaacgtgatcatcggcgaaaatggcgcgggtaaatcaacgctcatgaaaattctcgccggtgtgcaacagccgagcctgggcgaaatggagctcaacggtaagcttgtccatttctccagcacccgcgaggccgccgcccacggcattggtatggtccatcaggagctgaacctgtttgaaaatcttagcgtcgcggaaaatatctttcttggtcgcgagctacagcgcgggcttacgccaattaacgaagcagagcaggaacgacaagccgcggagctgttgcagcgactcgatcagccgatctcgccgcgggagctggtgggtaacctgaaggtcggtcagcagcagttggttgagatagccaaagcgctggcggaaaatgcggacattctgatccttgatgagcctacatccgccttaagcaaaaccgaggtggatatcctgtttcgggtcatccgcgagctgacgcgtcagggggtgtccatcatctacatctcacaccgtctggaagagctgatggccatcggcgacgtcattaccattctgcgtgacggcaaattccaggcggaggccagggtgagtgaaattgatgtgccatggatcgtccgtgaaatgctgggaagcgatccggtaagtcattttcttcccccgaatcgccgcttcggtgccccactgctggaagtggagaacctgacctgcgtgaatgccgcgggcaatacggtggtggataacgtcagttttaaagcacatgccggtgaaattattgggatctacggtctaatgggcgccggacgaaccgagctgtttgaatgtctgctggggacagcgcgccactactttggcaagatctggctggacagcaaaccggttccccagcggttaaccacggccgaacgcatccgcatgggcatgagtctggtgccggaagatcgtaagcggaccgggatttttccgatctcttcagtcgccagcaatctgaccattgccagcctgtggcgtcgtcttcagcgcggggtaaccattgccaataaagaggaagaggccgtcgtcgccagcacaattggcaatctatccatcaaggtctcatcaccaggagtcgagatccaggcgctcagcggcggcaatcagcaaaaggtggttattggccgttcgctgttaaccaatccgaaggtgctgtttcttgacgagcctacgcgcggaatcgacatcggcgccaagggggatgtgtttcgcatgatggtgcaattgtcgcagcagggaatggcggtggtgttctccacctccgatttaaaagaaatcatggcggtctctgaccgtatcctggtgatgtcaggcggcaaactgaccgccgatatcgttcgtgaccaggccgaagagtcggcgctggtttcagcaagcgctcaggggttctaagatgaaaatgacacaatcggtcgcactggcgccgcgcggcggagcctctctctcccgtgaaaatatcctgctgttgttattaaaactgcgcacctttatcgcgctgttcctgattgtcggcttcttcacgatgaccgtgcccggttttttatccgctggcagcatggtgattatgattaaacacattgcgattaacgcctttctggcgttggggatcacctttgtcattatcactgccggtatcgacctttcgattggcgctacgctcggtctctgcggaatgatagccggctggcttatcaccaaagggatcgtcttgccgatgttcggcatcgccatttttccaagcgtgtgggtcattgtgcccctggtgctgctgataggcgcgctgattggcgccgttaatggctggatcattacccgctacaatgttgcgccgtttatctgcaccctcggtactatgtatgtgctccgcggagccgcgatgctgacctctgatggccaaaccttccccgggctcgcgggcaatccgcagctgggcaacacgggtttcgatgaaattggcgcaggtgcgctctttggcatcccgtgggccatctggctgatgatcctcctggcgctgatcatcgcctatatcgcccggcgtttgccttttggccgccatgtttatgcgatcggtgacaatgagcgtgccgccgagctatccggcgtgaaagtgaagcaaattaaagtgctggtctacacgctgtccggcttttgcgccgccatagccgggatcgtggtctccgcacagctgctggccagccatccggctaacggtaccgcttttgagatgaatgctatcgccgccgtcgtactgggcggaacatcgctggccggcggccggggaaccattctgggtacgctgattggtgcgtttgtcatcggttttctcgccgacgggctggtgatgatgggggtaagcgagttctggcagatggtcatcaaagggatcgtgattattgtggcggtcattatcgatcagatgcaaaaccggatgcagcagaaggcggcggtggtcgcccagaaagcggtcatggagaataagtaaccgcaagacctcctgtggctcaggccacagggggagcgggcctgactcacgatgcgcctttctccgaggcgcttcgcaaaatctcatcgaaaaatcctgcccgacggcaagcagtggtagcatcccgccattctgctctgccaggcaaggaagccatgaaaaaacgtcctcactcgaccccgcacgacagtctgtttaagcgctttctgcgcgacagcgaaaccgcacgcgattttctggatattcatctgccgcccgcgctgcggcaactgtgcgacttaagcactctgcacctggaatccgggagctttgttgaggacaacctgcgcgccagctattccgatattctctactctctgcataccagcaagggagagggctatatctatgtcgtcattgagcatcagagcaccccggacagccatatggcgttcagactcctgcgctatgccctcgcggccatgcaacagcatcttgatcgcggccataaagcgctgccgctggtaattcccatgctgttttatcatggcagcatttctccctatcccttttcactgtgctggctggacgagttcccacctgactcaccggcaaaacagctttatctcggggcctttccgctcgtcgatgtgaccgatattcccgacgacgccatattacagcatcggcggatcgcgcttctggaactggtccagaaacacatccgtcaacgcgatctcagccatatcctccagcagttggtggaggtggtgctgatgggatacactgaccaccagcagttcaaaacgttatttacctatatgtcgctgcatggcaatagcgccgacccggaaaactttatcgaccagctggtcgaacgtctgccgcaatatgaggataccctgatgacgattgccgagtacctgaagcagaaaggtcgcgaagagggaaaacaacgctggttacaggaaggcttgaacgaaggtttacaagcgggtgaacatcgcgaagcctgccgcatcgcgctgatgatgttagagaacggtatggacactgaaaccgtgttgcggatgactcgcctcagcgcggacgaactggcgacgctggcgcgccaggcacgccagtcttcacccccgcttaacccttaattaacgcgcgcgcggtcgggaagtcggtgatcaggacatcaatatagtcgccctgcaacgcgccgcggatggcgttctctttgtccacgccgccagccagcgcaatcacctgcggacaacgacgaatttgctcaagctccataccgatcaccggatcctcatcctggctcagtaccggtttgcccgccgcattatagtaatgcaggcagatatcccccaccgcgccgcgcgccgccagcagctggagcatggtttcattataatagttaccggaatttttcagcagctgcgaaggctccagttcacctataccgacgatggccacatccacttcggcaaatttcgccaccaccgccgcgacgtccggactgtttaccagacggctgcgctcctccacggagtgctcaatactctgcgacggcaacagccaagccgggcagcctaaatgagccgccagctgctgggttaaaatggtagcctgcacgttgccgttgggaccgacgccgcccaacagctgaatcaccccggcggcgcgaatgttctgcggatgcatctcatccaccatgcagcggatcgtactgctccaggacgagatccccacgaggtcttccggccgcagccgcgtttcgacatagtgcgccgctgcgctgccgatggcatgctttacctgactgtaactggcgttctcgcccacatccacgactatcgcctgtcgaatgccaaaacgctcctcaatcgccttttccagatcgacaaaaatgtttgtcggctggaccacggtaattttcaccagcccctctttctgacagcgggtaagcgcccgtgaaacaaaagactgggacagatgcagcagcgaggcgatctcggactgctttttattctcgctgtagtaaagcgtggcgatcttcaccagcaaccgctgttcatcctgcttcgacatggcattcccctctgttttctgctcgttatttttatgcatcattgaatagataacaagcgcagcgcccttttcccgacgatccaaatgtgatcgttttctccttttttagaaaataggccgtacaaatcgtggacaaaccccgtcgcagggcatatcttaccaatgtgaataataaatcagtagtgaatatatattcaatcacttattaataccttgttttgtcgacgataaaaggtagtcaggatgggaagtgtttctttaccctgctggaatatttattcacacaagaatttactttcaagaggtgttttatgaatccgttttcactctccgttaaggagttagaacaaaaagcacgcgccatccgccgccgcatcatcgtcttaaatgcggaaagcccggctggcggccacaccggtgccgatctgtcacaagtcgaacttctgaccgccctctattttcgtatccttaactgctcccctgcgcgaaaagagagtgacgaccgcgatatctatattcagtcgaaggggcacgctgtcggtggttactactgcgtgctggccgaagcaggctttattcccgttgactggctggcaacctatcaacacgccgactcggctctgccaggacacccggtaaagcacaaaacgccaggtattgagctcaataccggtgcgctgggccatggtctgcccgtggcggtaggcattgcgctggcagcgaaacgcgataacaacccgcgtcgcgtatttgtcgtcaccggcgatggcgaactggcggagggcagcaactgggaggccgcgctggtcgccgcccactaccaactggataaccttattattatcaacgacaaaaataatctgcagctggccggtgcgaccaaagagatcatgaataccgatccgctggatgaaaaatggcgcgctttcggcatggaggtcacacagtgcaacggcaacgatatggcggaggtggtcgccacgcttgagcgcttgcagccgaacgggaaaccacacgtcgtgattgctaacaccaccaaaggcgcgggtatttcctttattcagggacgccccgagtggcatcaccgggtaccgaaaggagaagaaattgaactggcgctggaggaactgaaagatgagtaatagcgaacatctcgccacggtgatggtgaatgcctttattgatgccgtagaccgcggcgtggatctggtgccggtggtggccgactccacctcaacggcgaaaattgctccgtttatcaaaagattccctggccggctggtcaacgtcggcatcgccgagcagacgctggttggcgctgccgccggtctggcgctgggggggaaagtggccgtgacctgcaacgccgcgccattcctcatctcacgagccaatgagcagattaaggtcgacgtttgctacaacaacaccaacgtcaaactgttcgggctgaacgcgggcgccagctacggtccactggccagcacccaccacagtattgacgatatcgccattctgcgcggttttggcaatattgaaatttacgcgccgtccagtcccggcgagtgccggcagattattgattatgcccttgcccacgtcgggccagtgtatatccgcctcgacggtaaagcgctgccggaactgcatgatgaacgttaccggtttgttccgggcaacattgatgtgctgcgtctggggcgcgatattgcgctggttgccatgggctcaacggtacatgaaattgtggaagccgccgcacaactcgctgcagaaggtattgacgccaccgttatcagtgtcccatctattcgtccttgtgatacccaggcgctactggcggcaatccagtcctgtccggccgcgatcacggtggaagaacacaacgtcaacggcggcgtcgggagcctggtggcggaagtgctggccgaggccgggtgcgcgatcccgttgcggcgcttaggtattcctgacgggcaatacgccattgccgccgatcgcgccgccacgcgcgcgcgccatgaaatcgatgccgccggggtggtgaagcacgcccgcaagctgcacataaaaaaagcatcctgaaaaataacaagaacatcttactggagagaacgcaatgtcccgaattcctcaacaactcaccatgggcgtcattattggcaaccggggatttttccccagctatctggtcgccgaagcgcgcgaacaggcggtagccctgtttagccgtcttgggattaacaccattatgcttgatccatcccagacggaactgggtggcgtggaaacccggcaggatgccaaaatttgcgccgagctgttccgcagccaccgcgacaatattcacggtgtcgtggtgctgttacccaactttggcgatgagaaagccatcgccgaaacgctgcgcctctccggtctcaacgtcccggtgcttattcaggccgaagaggataatctggataaaatggggttgtcgacgcgccgcgatagcttctgcggcaaaatttccctttgcaacaacctgcgccagtacggtatcccgtttacgctgaccacccagcacgtctgcgcgctcagtggcgaagtgtttgagcaggatctgcggcgcttcacgcagatatgtcgcgtggtgaacagtatgcgcggcgtgcgcgttggcgcgatcggcgcccgtccagcgggctttaacaccgtgcgctacagcgaaaagctgctcgaacgtttaggcatcgcagtggaaacgttagatctatcagaggtgtttacccggattaaagccctgcgtgatgacgatattcgtgtggatgagaagcgccgcctgctgatcgataatgccgacgccagcggtattccggcagataaactggtcaccatggcaaaactgtttgtggtcctgagcgagtggattgttgccaacgacatcgacaccaccgcaattcagtgctggacctcgctgcaggaaaatctggggattaacgtctgctccatcatgagcgtgatgtccggacaactgatgccaagcgcctgtgaggtcgatgtcatgggcgcgctctccatgtatgcgctcgccagcagcaacctgagccccgcctcgatcgcggactggaacaataacttcggcgacgatcgcgataaatgtgtgctgtttcattgcgggaactttgcctcggccagccttgagtcgccgcacatgggaacggccgatattatcggcaccaccgtcggcaaagaaaacacctgcggtgccgtgcatggtcgcatgaaaagcggcgcgctgacctattttcgcctcagcaccgacgacctgactggcgaaatcaaagcctacgtcggcgaaggtcggtcggttgacgatcccctcgatacggtaggctgtcgggcggtcattcaggttccccacctggaaaatctgctgtcgtggatctgccgcaatggctttgagcaccatgtcgcgatgaaccattccgccagtgccgcaattttgcacgaggcatttacgcgctacctgggcgtgtcgacctatctccaccagtgaggccggaggccgctatgtcggtaaacaaggatattattattgccctcgatgagggcacaaccaatgccaaagccgttgccttcgacagccacgggcgggtaattacgcaattttcccgcgcgcttgagatcgctacgccgcaggaaggatgggtagaacagtcagcggagcttctgcttgccgcgtcgctggaggtgatttctcgcgcagtggccgccgttggcgcggagcgtgtagccgccctggcgatcagcaaccagcgcgaaaccgtcgtgggctggtatcgggaaacgggcgaggctatagcgcccgccctgagctggcaatgtgcacgtactgccgcattttgccacatgctgcgtgaacaaggtcatgagccgcagatcaaggcggtaaccggcctgccagtcgccccgctcttttccgcctcgaaaatgcgctggctgctggaccacactccggatggtctgaaccgagcgaaaaatggcgagatttgcctcggtacggtggatagctggctgctctggcacctgacgcaaggccagcatttttgttgtgattatgccaacgcgtctcgtacgcagctcatgaatttgcacacagcggactgggataccgatatgctcgccctgtttggcattccgcgtgcagcactcccggtgattaaaccttcgagcggcctgtttggttacaccgcgggtttagccaccctccctgatggcattccggtaatggcgatgattggcgattcgcatgccgcccttttcgcccacggtctgggcgccgccggttgcgttaaagccacttacggtacagggacctcggtgatggcgcccgttgattcggtggcgtgtcacgtcagtaatctcgccaccacggtggcctggcacgacggagaaaaactggtctatgcactcgaggggaatattccccataccggcgatgcggtggcgtggatggccgacagtaccggattgagcgaacgcgctcccggcgaactggcccaggcgctgaatgatctgccgcgctcggtcgactccaccttaggcgtcttttttgtcccggcgctcaccggcatgggcgccccctggtgggacgataaggcccgcggtttgatccatggattaagccggggcgtgaagcgggcccatctcattcgtgccgcgctagagtcaattacctaccagattgccgatgtaatcactgcgatgcgtgcccatcatggctttacgctcaacacgctgctggtggatgggggccccaccaaaaacgactggttaatgcagtatcaggccgacctgctggggtgtccggtgatgcgcagcgatgtggccgagctgtcggcgaccggtgcggcactgctggcgcgtaaagcgttgcacaagctgacggtggcagagcttcagccctttttaccagaacacatcacttatgcgccagacctgatccggcatcatcggcttgtgcagcgatggcagtcctggcaacacgcggtgacgctggcaagacgctgagcgcaacccagccgggcgataacgtcttcgtccggctgcaatccaacgccccctgccgttaacccagcggatactgttgaaacgccggcagcgcctcccccttctccgccagcgcgcgaatatgcggaaacgccgcggccgacaccaccgccgggatcatcaactggataaaggaccagaccaccgtgctggtgaccagcacctgatccggctgcgcggcggcggcgcggtctgccagccgggcgtcccactcccgacaggcggccagcagctggccggtcacccgggctatccacggctgatgctgcttctcttccggccgcagacggtgctcataaacatgctggaccgctttttcacaggcggcgaggatcacccccagcaggtgcagatcgcgggccagcgcctcgggatgcgcgggaagcagccggcgcccggccggattggtcgtttcgaaatagtggaggatcagcgtggagtccatcagctgcgtcccgttatcgagcaccaccgtcggcgccttgaccaccggattaatgcgggaaaattcgtcaaagccgctaaagaccgatagcggcaggctctcgaattccacgccatagagcgccagagaaaccgccacgcgtcttacataaggtgaatccatcataccaatgagtttcatcgtcactcctgcctgcgataaagaggttgcggctttaccttactggaaaaccgatgccgcgaatatcaccagatacttaccgcaatggttagtaaaactaacagataggcgactcgctgtagccctccagttccccttgtgctataccgactgaggcagcatttagcccctttttcagcctgttcgcggcggctataaaacccgctaacccggtagtaacgttaacgtatcgactcactgactaagagatcaccatggcagattttccccctgtcgccagcctgcgcagctttgaggcggtggcgcgcctcggcagcgtaacgcaggccgcccacgagatgagcgtgacccattcggcggtcagccagcacatcaaacagctggaagccctggtcggcgtcacgctctttatccgccacggccgcggagtgcgcatcacggaagaaggacggctctatgccctgcaaatccgcgaggcgttacagcacatcgccgacgccacgcgcatggtgcagatcaaaccccgcaccctggaagtgaccctggcgacgctcccctcctttggctgccactggctgctgccgcggctggcgcgctttcaggcgcggcatccgcagatcgcggtgcgcctgctgaccagcctggcggtggttaacctgcaacaggagggtatcgatctggccattcgcatggggcaaggcgactgggaggggatggaaagccggcatctgtttgccgatgaacagctggtggtcgccgcccccggctatcgcggcggtaacctgccgaccaccccgcaggcgatcgccgccagcgatattattttttccatggagtcctggaacgcctggtgcagccaggcggggctggaaaagccgatcgtccccgcgggcctgcgcctgaacgactctaatctggtgctggaggcggtccgcctgggggccggcgtggcgctggagcggcgctccctggtggcgggggcgatagcccgcggcgagctggtgcagctcaccgccgtcaccgtcccctacccctggcactactggctaaccgtctccccgcaggtggagaaccggccggaagtcgcccggttcatcgcctggctggaggaggagatcgccctctggcgccagcagatcagcgcttagccttcggccgacggcggcaggcccgtccgggcggcgtgctcctgggagagacgccaaaaatcgtgcccggcgggatactgatagaggcgcagggaaaactgtccggccaccgcggtaatgtactcaaatatcgccgactgggtgttttcgtagtctttccacagcgttgaggtggtgaagcagtaaatctccagcgggatgcccgacggcgacggtttcagcgttctcgccacaatgtacatctccttaataatatccggccgctcggcgagatagtgcatcagatagtggcgaaacagggtcaggttggtcagcccgttatcgataaaccagcggtcggccacgccgccgggatcccggccgtcaagcagcgtcgccagaggctcactcaccccgcggatggtcagcatcgaggagagcatctcctggtcgagaaaacgcaccgagtgctgatcgatggcgatactgcgcatgatccgccgcgccccggaggagaacatcgcctgccagttggtataggtctcggtgaggaaattcttggtcgggatacgggagatggtattgtcccagttgcggatggtaatggtgtgcagcgcgatatccgtcacctcaccgctgaggttcttgtcaggcatttcaatccagtcccccagctggagcacgtcgttggacgacagctgaacgttcgccaccagcgacagcagagtatgctggaacacgatcatcagtaccgccgccacggcccccagactggagatgataatgatcggcgatttgttcgacatcacggcgaggatcatgatcgccgccaggatgtggactaagattttgcctatctggatatagcccttaatggaatgatttttacgtttggtctttcgcagataggagctgttgacaatatccagcatctcgttgaaaaacaccgacataaaaataaaaaacaagatcccgcagatagtattaatcgccgtcaccagcgatgccggcatcgccggcataaactgcagaacgtaatagacgataataaccggaatgaaattggacagcttttcggcgatgcgtcgatccttctccagcggcacatcctgtttgtggctactaaagaagaccttacgcaccactttaatcagcaagaacttgcataaaagatgggcaaatatgccggagagcagcagcagaataagattaaaccccaccgccagcgccggattactctcaataaacgtcagtagatgattcacatacgccatgctttatcgcctgaataactatgccacttcgctaactgctttatcccaagggcatatatttggaaaataaatcaatccgcatcatggcatatcgcttagcgtaacgtccatgcgcgcaccgcttctaatcattcacagaaaatatgtcagagtttgcattaatcattctctacgctcactataaagaggcttgttatgaggacggaataagtccaggaggaaacatgtttaaagctcttaccgctatcgtcgccttagccgcctccgccagcgttatggcgcaaggcgatgtcacgctgaacagtctggctcacgatgccgccacccgggcgtcgtttaaccagatggtcaaaggccatcagctgcccgcctgggtgaccaccggcggcaccggttcgcccgcgcagacggtgaaactgggtagcgaatcctggcaggtgttaagcgcctgcaaaccccacgactgcggccatgaacgtatcgcggtgatctggtcggaaaaaagcaaacagatgtccggcgtttactcggtggtcgatgaaaaaaccgaccaggagaagctgacctggcttaacgtcagcgatgccctgtccatcgatggcaaaaccgtgctgtttgccgccctcagcggcagcctcgacaaccacccggacgcctttaactaccagtaacgaccatcgcccccgtcagcctttccccgacgggggcttccctgattagccatccgggaacatcacgctgttccccggcgcttcccgatgcagatggataaagttcaggtgccgctcgtactggtcgagaatatcggtgatcacctgctctttgctgtagtccatcaggtcgttaccctgactgccctccagcaggaaggtctccagccggtaataggtggatttcccgctgcgcgcccgataggtaaagcccggcaccgagtactgctgcggccagatcttgtagataaagttctgctcgtcgcccatgtgcaccagcagatcgaggtggccaaggttctcaccctcttccggcggcaggctcttcagttccactgccgcgccgcgcagccgcagctcctgggccacctcctccatcgccgggtagcacaccgtctccatcatcagtttggtatagcgcgtgccggggtaattcatcagccgcgacaggcgcttcttccagctcagacgatcctggaggcccatcgggcgcggggcggtgtcgcggctggcgctgacccggcggtaatcttccactttcagagatttatacagtccggccatcacgaagaaaatcacaaagctgaacggcagccccatgatcaccgtggtgttctgcagcgccgagatgccgttggtcatcagcatcccgagggtcaacagaccgatggccaccgaccagaagatgcgcagccagttcggggcgtcgctgttgatgtccttcagcttcgaggtgaagttccccagcaccagcgcgccggagtcggcggaggtaacgtaaaacagcagaccggtgatggtcgccaccgacgcgctaaaggtaaacgccggatactgcgccagcaggctgtagaagccgcgctccgggtgggccatcgcctcctgggcaaaggccgcgtcgccgtggatgatctcatacagcgcgctgttgccgaacaccgacagccacagcagggtaaaggtgaagggaataatcagggtgcccatcacaaactggcggatggtgcgcccgcgcgaaatgcgcgccaggaacaggcccacaaacggcgaccaggccacccaccacgcccagaaaaagagcgtccagttgttcatccattctaccggccggtcgaaggcgaagctgttcagcgtcatgcccataaagcgattgacgtagtcgccgacgttgagcactaacgcattgagcaggaaggaggtatcgcccatgaacagcacgaacaggatcagccccagcgcgagggcgacgttcagttcggagagcacgcggatgcccttgtccaccccggaggtgaccgagatggtggcgatgatcaccgacagcgcaatcagggccgctttcgccgccagcgagtccggaatatcgaacagcacgctcagaccgtagttgagctgcacgacgccgataccgagggtggtggcgatgccgaagatggtgccgatcaccgccgcaatatcgacgctgtggccgatgggcccattgatccgtttgccaaaaatcgggtacagcgccgagcggatggtgagcggcaaattataacgatagctaaagtatcccagcgccatgcccatcagggcatacattgaccatccggttaagccatagtgaaacagggtccagaccatcgcctggcgcgccgcctcgatggtctgccccgccccttccggcggctgcatatattgcgtcaccggctcggcgaccgagaagaacatcaggtcgatgccgatgccggcggcgaacagcatcgccgcccagctcagcaggctgaactcgggctttgactgctccggcccgagcttcaccgagccgaagcgcgagcaggcaatgcagacgacgaagacgatatacagcgtcgccgccagcagatagtaccagccgaaggttttcgacacccagtccagggtgcgcccaatccactcggcagaaaaatcgcgaaaaaagatcgtcatcagggaaaacaacaaaatcagtccggccgaggtataaaaaaccaccggattgattttgtccttttctctgctttgcgaaagatctgtcatccagtatccccactgtttttgtaactattaaaatccaaatccgcaacaattaagacacattttatattgaacgtccaatcaaaaaccgctttaatagttaaccaacgctgatgaatggagtggcaaaaatgcccaaactggggatgcagccgatccggcgcaggcagctgatcgacgccacgctggacgcaataaatgaagtcggaatgcacgacgcgaccatcgcgcaaattgcccggcgggcgggcgtatcgacggggatcatcagtcactatttcaaagacaaaaatggtctgctggaggcgaccatgcgcgacatcaccagccagctgcgcgacgcggtgctcaaccgtctgcacgctctgccggacggcagcgccagccagcgcctgcaggcgattgtcggcggcaactttgatgagacgcagatcagcagcgcggcgatgaaggcctggctggccttttgggccagcagcatgcaccagccgatgctttatcggttacagcaggtcagcagccgtcgcctgctgtcgaacctggtgtacgaattccgccgcgagctgccgcgcgagcaggcgcaggaggccggctacgggctggcggcgctgatagacggcctgtggctgcgggcggcgctcagcggcaaaccgctggataaaacgctggcgcagtcgctgaccagccactttattcgtcagcatttaccgaacccataaccgaggaggcgttatgtcccgaatggcagaacagcagctttatattaatggtggttatacatcggccaccagcggtcgcaccttcgagaccatcaaccctgccactggcgaggtgctggcgaccgttcaggctgccggacgcgaggatgtcgaccgcgccgtcgagagcgcgcagcgtgggcaaaaaatctgggcggcgatgaccgccatggaacgctcgcgcatcctgcgtcgcgccgtcgaccttctgcgccagcgcaacgacgagctggcgcgactggagacgctggataccgggaaacccctcagcgaaaccgccgccgttgatatcgtcaccggcgccgacgtgctggagtattacgccggattgatcccggcgctggaaggcagccagatcccgctgcgcgacagttccttcgtctacacccgtcgcgaaccgctgggggtggtagccgggatcggcgcgtggaactacccgatccagatcgccctgtggaaatcggcgccagcgctggccgctggcaatgcgatgattttcaaaccgagcgaagtcaccccgctgaccgccctcaagctggcggaaatttacagcgaagcgggcctgccggacggggtgtttaacgtcctgccagggatcggcgcggaaaccggccagtatctgaccgagcatccggacatcgccaaaatatccttcaccggcggcgtcgccagcggcaaaaaagtgatggccaactcggccgcttcatcactgaaagaggtcaccatggagctgggcggcaaatcgccgctgattatcgccgacgatgccgacctcgacctcgccgccgatattgccatgatggccaacttttacagctccggccaggtgtgcaccaacggcacccgggtgtttgtcccggcgaaacggaaggcggaattcgagcacaagatcctcgagcgggtggcccgcatccgcgccggcgatctgtttgccgatgacaccaacttcggcccgctggtcagcttcccccatcgcgacaacgttctgcgctatatcgagagcggcaaacgcgaaggcgcgcgcctgctgtgcggcggcgaggcgctgaaaggcgacggtttcgataacggcgcgtgggtcgccccgacggtgtttaccgattgcagcgacgagatgaccatcgtgcgcgaagagatcttcggcccggtgatgtcgatcctcagctatgccgacgaagcggaggtcattcgccgcgccaacgccaccgaatacggcctcgccgccggcgtggtgacgcccaacctcaaccgcgctcaccgaattatccaccagctggaagccggcatctgctggatcaacagctggggggaatccccggcggaaatgccggttggcggctacaaacactccggcattggccgcgagaacggcgtcatgacgctgcagagttacacccaggtgaagtccatccaggttgagatgggtaaattccagtccatattttaaccgggaggtttttttgcaatttgactacatcattattggtgccggctccgccggcaacgttctggcaacacgactgactgaagatccaaacaccaccgtcctgctgctggaagccggcggccctgactaccggttcgatttccgcacccagatgcccgccgcgctggcttatccgctgcagggcaagcgctacaactgggcctacgagaccgaacctgagccgtacatgaacaatcgccgcatggagtgcggacgcggcaaagggctcggcggatcctcgctgatcaacggcatgtgctacattcgcggtaacgccatggatctggataactgggccaaagagccgggtctggaacactggagctatctcgactgcctgccctactaccggaaagcggaaacccgcgatatcgggcctaacgactaccacggcggcgatggcccggtgagcgtgacgacgccgaagccgggcaataatccgctcttcgaggcgatggttgaagccggggtgcaggcgggctatccgcgtaccgacgatctcaacggctaccagcaggaaggctttggcccgatggaccgcaccgtgacgccgcagggccgtcgcgccagcaccgcccgcggctatctcgaccaggcgcgcggtcgcccgaacctgaccatccgcacccatgcgctgaccgatcacattatttttgccggcaagcgcgcggtgggcgtcgagtggctggagggagagagcacgatcccgtcaaaagcgacggccaacaaagaggtgctgctgtgcgccggggcgattgcctcgccgcagatcctgcagcgctccggcgtgggtaacccggagctgctcaggcagttcgatatcccggtggtgcacgatctccccggcgtgggtgagaacctgcaggaccatctggagatgtatctgcagtacgagtgcaaagagccggtatcgctctacccggcgctacagtggtggaaccagcctaagatcggcgccgagtggctgttcggcggcaccggcatcggcgccagcaaccagttcgaagcgggcggttttatccgcagccgcgcagagttcgcctggccgaacattcagtaccacttcctgccggtggcgattaactacaatggctccaacgcggtgaaagagcacggcttccagtgccacgtcggctcgatgcgttcgcccagccgcggccacgtgcgcctgaagtcgcgcgacccgcacgcccatccggcgatcctgtttaactatatgtcccatgagcaggactggcaggagttccgcgacgccatccgcattacccgggagatcaggaaccagccggcgctggataagtatcgcggccgcgaaatcagtccgggaatagaatgccagagcgatgccgaactggatgagtttgtgcgcaaccacgccgagaccgcgttccacccgtgcgggacctgtaagatgggttacgacgagatggcggtggtcgatggcgagggccgcgtccacggtctggaaggattgcgggtggtcgacgcctcgatcatgccgcagatcatcaccggcaacctcaacgccaccaccattatgatcggcgagaagatggccgacgccattcgcggccgccagccgctgccgcgcagcaccgcgacgtattatgtcgctggcgacgcgccggttcgccgctaacaggtcaatgccgggcggcgactacgccttgcccggcctaccctgaggcgatgtaacgtagccccggtaagcgcagcgcgatcggggtgccgttccgggttttggccccataggttgatgttagcgaaacgcctccaggcgcttaatctgctgaccgtcggcagtaaagttctccgccgccagccacgcccgcagcgccgcatcgcgcgcaggccactcgccgtcgatgatggacagcatatcgctgtcgcgcgtccgccctttacgcaccagcctctgccgcagacgtccttcccagctaaagcccagccgctcggcggcgcggcgcgaggcgacattcatcgaatcgcatttccactccagccgacgatagccatggtcaaagccgtttttgagcagcagccagaccgcttcggtacccagcggggtgtttttcatccgtcgcgaccaggtgacatggccgatctcaaccgtgcccatttcccgttcgatcgccatatagctaacgatgcccaccgcctgctcgctacgcaggtcaaccaccgcatacggcaccagggcatcatcattcaccttgcccgcgatccagtgggcggtcgccgccacgctctccggccgcgtagacgccagccacgtccagtcgctgttgtcgccgagcgcataggcggcaaacagatccgccgcatgacggtcaacgtccagcggctccaggcggcaaaaacggccatttaacgccgtccggcgcaggacttgcgccccctgccagccagggaccaggtcgttcacctgctggccatactcattgatttccggcacacccacctcctcgcaatagacaatgcgttatagcaagaaccccgcagcggagaaaggcgcttctgcgcgaccggcaataacctgtcgttcttgaatatgcatttttagcataaggatatccttattttgactttacgccttatggcaagcggcctaacgtagcgaggcataaaacaataaaataaccattcttcagggattgcacatgaccaaaaaactgttgcctttactgctactgtcggcgctctccgccgccgcgcatgccgccacgccgcccaacacgctggtggtcgcccagggtctcgacgatatcgtcagcctcgacccggcggaagcgaacgaactctccagcattcagacggtccccagcctctatcagcgtctggtgcagcccgaccgcaacaaccctgaaaaaatcgtaccgatcctcgccgaaagctggcaggccgatccggcggcgaaaaccctgaccattaaactgaagccggatgccaaattcgcctccggtaatccgctgcgcccggaagatgtgattttctcttacacccgcgcggtgacgctgaataaatcgccggcgtttattctcaacgtgctcggctggcagccggacaacatcgccagccagctgaaaaagattgatgaccataccctgacgctgcactggaccgccgacgtcagcccggcggtggcgctgaatattctctccacccccatcgcctctatcgttgatgaaaaacaggtggcgccgaacgcgaaaaataacgacttcggcaacgactggctgaaaatgcactcggcgggcagcggggcctataaaatgcgcgtctaccagccgcatcaggccatcgtgctggaggccaacgccagctcccccaccggcgcgccgaagatcaagagcatcattattaaaaacgtccccgacccggcttcccgccgcctgctgatccagcagggggatgccgacgtggcgcgcgatctcggcgctgaccagattgccgccctgcaggataaacccggcgtgaaggtgctgagcatcccgtccgccgagcagaactacctggtgtttaataccgccaacagcgccaacccgctgctcaataacccggccttctgggaggcggcgcgctggctggtcgattatgaaggcatcaccaaaaatctgctgaaaggccagtactttattcaccaaagcttcctgccggccggcctgccgggggcgctggagactaatccgttcacctttgatccgcaaaaagctaaggctatcctcgataaagcgggcattaaggatgcccacttcaccctcgatgtggagaacaaaccgccgtttatcaccatcgcccaatcgctgcaggccagctttgcccagggcggggtgaaggtggatctgctacccgccgccggcagccaggtctatgcccgggtgcgcgcgaagcagcatcaggcggcgatccgcctgtggatcccggactactttgatgcccactctaatgccagcgcctttgcctggaacgatggtaaatccagcaccgtggccgggctcaacggctggcagatccctgagctgaataaagccaccctcgccgcggtggcggagccggacccggcgaaacgcctcggcctgtacaaaacgatgcaggaaaccctgctccagcattcgccgtacgtcttcattgaccagggaaaaacccagatcgtggtgcgtgacaacgtgaagggctatcagcagggactgaacgccgacatggtctggtacgataacgtgaccaagtaagcgggttttgtcaccgggtacggcggccttgtctgcccggatgaccgactcctcacccaggcccggtcggcatcgcgccgccgggtacaatgctgatataccaggaatttccattttccatgccatcgtttcccactcaccttacccgcctgctgcaggggctgtttacgctgctgctcacgctgttcgggctgttgctggtcaccttctcgctctccgcgctgtcgcccgtcgaccgcgtactgcagatcgtcggcgaccatgccagccagtcgacctatgaccaggttcgccatcagctgggtctcgaccagccgctgccggtgcagttctggcactacctggtcaacctggcccatggcgatcttggcatcgccagcgctaccggccagccggtgctccacgacctgctggcggtctttccggcgacccttgagctggcgaccctggcgctgatcgtcggcgcggtactgggcatcgtcgccggggtgctgtgcgcccgttacgccggttcgccgtgggatctggcggttcgcacctttaccctgttgggcaactcggtgcccattttctggctcggcctgctgatgctggccctgttttacgcccggctgcagtgggcgccgggcccgggtcgcctcgacgatatttatcagtacaccgtcgagccacgcagcggttttgcgctgatcgacacctggctctccggcgataccgcggcgtttaaaaatgcgatcggccatctggcgctgccggtgctggtgctggcctattactcgctggcgagcatcacccgcctgacccgctccgcctgtctgagcgagatgaacaaagagtacattctgctggcgcgggccaaaggggccggagagatgacgattctgctgcgccatgtcctgcccaatatccgcggcactctgctgacggtaaccgctctagcctggacctccatgctcgaaggggcggtgctcaccgaaaccgtcttctcgtggccggggatcggccgctacctcaccacggcgctgttcgccggggataccacggcgatcatgggcggcacgctgctgatcggcgtgagttttgtgctgatcaataacctgaccgacctgctggtacggttaaccgatccgagggtgcgctgatgccgacttatctgtttttacgccgtctgcgccgctcacccgccgccttcagcggcctgaccctggtgatcctgctggtgctgaccgcgctgttcgccccgtggctggcgccgcacgatcccaactggcaggatgccgccgctcgtctgcaggggcccggggcgggacactggctcggcaccgacagctacggccgcgacctgctgtcgcgcttgctctacggcgcccgcccggcgctgggtctggtggcgctggtgaccgccattaccctgcccgtcgggctgctggtaggtatcctctccggttactatggcgggtggctggagcggatactgatgcgctttaccgacgtggtgatgtcgatgccgcgcctgatcctcgccttcgcgttcgtggcgatgcttggcccggggctggtcaacggcgcgctggcgttagccctgaccacctggccggcctacgcccgtcaggcgcgcagcgaaattcagcgcctgcgccatagcgactacctcgccgcggcggagatgctgggcattcgcggcgggcggctgctggtcggccatattctgccgctgtgtctgccgtcggcgattgtccggctggcgctcgatctggcgggcattatcctcgccgccgccgggctcggctttctcggcctgggcgcccgcccgccgatggcggagtggggagcgatgattgccgacgggatgcaggtgattttcgaccagtggtggatcgccgccatccccggcgcggcgatcctgctcgccagcctggcgtttaacctgctgggcgatggcctgcgcgatattctggagccgcaacatgactgacatccgactgaccgtccagggactcgccgtcgactatcccaccgcccgggtggtggacaacgtcagcttcaccctcggcaacgagcggctggcgctggtgggcgaatccggctccggcaaatcgatgaccgcccgggcgctgatgggcctggtgcgcaagcccggggtggtgagcgctgaacggctggaggtgctggggcgcgatgtgctgaccctcagcgcccgcggctggcgcgcgctgcgcggcaacgatatcgccatggtgctgcaggacccgcgctatgcgctgaatccggtgcagaccattcagacgcagctggaggaggcgttaaccctccatcagcgtctcagccgccgcgcgcgcgccgaggcggtcaaagacgccatcgccgccgtcggtctggatctgccggtcctcagccgctatcccggcgaactctccggcgggatgggacagcgggtgatgatcgccctcgcgctgctcaataacccgaaggtgctgatagccgacgagccgacctcggccctcgacgcccgcctgcgcaaccagatcctcgagctgctggtggagcagagcgcgcagcggcagatgaccatgttactgatcagccacgatctaccgctggtagccgcgcattgcgatcgcgtgctggtgatgtaccaggggagacaggtcgacgagatgccggcgcgggcgctgccgagcgcgacgcacccttacacccgcaccctgtggacctgccggccaaatgcgcacacctacggccagatgctgccgaccctcgacagaacccaggactttacggagacagcccatggcgatcgttaatcttcaggatttacaggttacattcggcgcgaagacggcggtctccgccgccagtttccgtgtcgccgccggggaaaccttcagcctgatcggcgcctcgggctgcggcaaatcgacgattttgcgcgtgctggccggattgcagcgtgaatggcgcggcagcgtggatctgctcggccaggccattatgccgggcgcccgctttcagggcgatctgcggcgcaacgtgcagatggtgtttcaggatccgtacgcctcgctgcatcccaaccataccctgtggcgcaccctggcggagccactgcagatccacggcatccgcgacgttgccccgcgagtaaccaccgcccttgagcaggtgggtctggccgccgacgccgtgcgccgctatccgcatcagctctccggcggccaacggcagcgcgtggccattgcccgcgccctgctgctgcgcccgcagatcctgctgctggatgagccgacctcggcgctggatatgtcggtacaggcggaaatccttaatctacttaatcgtctgaaacaggagcacggcatgacctatctgctggtcagccacgatgccgacgtcatcgcccatatgtccgatcgggcggcgtttatggcggagggcgtgatccagcgctttttcgatcgcgaagcgttggtcaacggagagcaccggatgaggtgaggtcagcggatgtgcggttgttttgtcgggtggcgcttcgcttacccgacctaggattcgcgcaacctgtcgttaatttattcaccagtcttgctgaaactgccggtgttgcggcctcaacatcgctgagacgttcccggaaggccggggcagcccgcatggatgcgggctgagggccgtgttttgcacggacgctgcctcggcccgccccgaagcctgc

SEQ ID NO: 84 - DNA, 34652 bp, Unknown
  source: /note="Description of Unknown: MKP2_coc_1 Mutant Bacteria sequence"
taggcctgccgccagcgttcaatctgagccatgatcaaactcttcaatttaagtttgatgctcaaagaattaaacttcgtaatgaattacgtgttcactcttgagacttggtattcatttttcgtccgaggacgttaagaatccatgtcactttgagtgcccacacagattgtctgataaattgttaaagagcagttgcgacgcgctttagcgctctgtcgcgaggtggcgtatattacgctttcctctttcagagtcaacccgtttttcaggatttttctctgcaaccgaaccggctgtttgtgtgaagtgattcacatccgccgtgtcgatggaggcgcattatagggagttctcgagcgtccgcaatagaaaaatggcagaaaaatgactgactgctgcattccccagcaaaaccccgctttatacctcgttacacacagaattatccacaggagagcgtaaaaacatgaccgctagccccgtggatcgccagctatatagaaggagaatcaccggcctggagagaaacataaaaattcgcgagcgttgcgcaaacgttttcgttacaatgccgcgctatgacacggatgcccggttgggtgcgttaggtgagtttttaggcaaaaactcacctaacgctctctgtaatgttcaaatcctggggatttaataccatgcaacaacgtcgtccagtccgccgcgctctgctcagtgtttctgacaaggccggtatcgtcgaattcgcgcaggcgctttccgctcgtggtgtcgagctgctgtccaccggcggcaccgctcgcctgctggcagataaaggcctgccggttaccgaagtctctgactacaccggtttcccggaaatgatggatggacgcgtgaagaccctgcatccgaaagtacacggcggcatcctcggtcgtcgcggtcaggatgacggtatcatgcagcaacacggtatcgcgcctatcgatatggttgtcgtgaacctttacccgttcgcccagaccgtcgctcgtgaagggtgctcgctggaagacgcggtggaaaacatcgatatcggcggcccgactatggtgcgctctgcggcgaagaaccataaagatgtcgccatcgtagtaaagagcagcgactacgacgccatcattaatgagatggacgccaacgaaggttccctcacgctggccacccgcttcgacctcgccattaaagccttcgaacacaccgccgcttacgacagcatgatcgccaactacttcggcagcatggttccggcctatcacggcgaaagcaaagaagccgctggccgcttcccgcgtaccctgaatctgaacttcattaagaagcaggatatgcgctacggcgaaaacagccaccagcaggcggctttctatatagaagagaatgtaaaagaggcctccgtggcgaccgccactcagctgcagggcaaagcgctctcctataacaacattgccgataccgatgcggcgctggagtgtgtaaaagagttcaacgagccggcctgcgttatcgttaagcacgccaacccgtgcggcgttgccgtcagcaactcgattcttgacgcctacgatcgcgcttacaaaaccgacccgacctccgcgttcggcggcatcattgcctttaaccgcgagctggatgctgaaaccgcgcaggcgatcatctctcgccagttcgtcgaagtgatcatcgcgccgtccgccagcgaagaagcgctgaaaatcaccgccgcgaagcagaacgtccgcgtactgacctgcggccagtgggatactcgcgttgccggcctcgatttcaaacgcgttaacggtggtctgctggttcaggaccgcgatctcggcatggtcaccgcaggtgaactgcgcgtggtcagcaaacgtcagccaaccgagcaggaactgcgcgatgcgctgttctgctggaaagtggcgaaattcgtcaaatccaacgccattgtgtatgccaaagataatatgaccatcggcataggcgccggtcagatgagccgcgtctactcggcgaaaatcgccggaattaaagccggtgatgaaggtctggaagtgaaaggttccgccatggcctctgacgctttcttcccattccgcgacggcatcgatgccgcagccgcggtaggcatcacctgcgttattcagccgggcggctctatccgtgacgacgaagtgattgccgccgctgacgaacacggcatcgccatgatcttcaccgacatgcgccacttccgccattaattcatggagcagcagatgaaagtattagtaatcggcaacggcgggcgcgagcacgcgctggcctggaaagcggctcagtcgccgctggttgataccgtctacgtcgcgccgggcaacgccggtaccgctctggagccgtcgctgcaaaacgtcgccatcggcgtcaccgatattccggcgctgcttcgcttcgcgcaggatgagaacatcgatctgaccatcgttggcccggaagcgccgttggtcattggcgtggtcgacgcgttccgtgccgccgggctgaacatcttcgggccaaccgaaggcgccgcgcagctggaaggctcaaaagccttcaccaaagattttctcgcccgtcatcatattccgacggcggaataccagaacttcaccgaagtggagcctgcgctggcttatctgcgcgagaaaggcgcgccgatcgtcatcaaagccgacggtctggcggcgggtaaaggcgttatcgtggcgatgaccctcgaggaagccgaagcggcggtcaaagatatgttggccggcaacgcctttggcgacgcaggccaccgcatcgtgattgaagagttcctcgatggcgaagaggctagctttattgtgatggtcgacggcgagcacgtcctgccgatggccaccagccaggatcacaagcgcgtcggcaacggcgataccggcccgaacaccggcgggatgggggcgtactccccggcgccggtggttactgaggaagtccaccagcgcaccatggagcggattatctggccaaccgtgaaaggcatggccgctgaaggcaacacctataccggtttcctctacgccggtctgatgatcgacaagcagggcaacccgaaggtgattgagttcaactgccgctttggcgacccggaaacccaaccgatcatgctgcgcatgaagtccgacctggtcgagctgtgcctcgccgcctgcgcgggcaagctggacgagaaaacctccgagtgggatgaccgcgcgtcgctgggcgtggtggttgccgccggcggctatccgggcagctacaatacgggcgatgagatctacggcctgccgcagcaggaagtcgcagacggtaaggtcttccacgccggcaccaaactgtctgacgaccagcgcgtggtcaccaacggcgggcgcgtgctgtgcgtcaccgcgctgggtgactccgtagcgcaggcgcagcagcgcgcctatcagctgctgaccgacattcgctgggacggtagctttagccgtagcgatatcggctggcgcgccatcgaacgtgaaaaggctaacggctaagtttcgccagcagcgttttgcgcgtaatgcctaactgacgggcggcttcagttttgttgccgcccgttttttccagcgccgccagaatcacctctttctccacttccactaacggctgaattcccccctcctcgctcccgcctgatggcagcggcgtaccggcgatcgccaggggcagttctcgctcagagatatagtttccggtcagtagcaccaccgcccgctccaccgcgttttccagctcgcgaatattgcccggccaggggtagtggatcagcaggtccatcgcctgtggcgtgaacccctttaccgtcttacgattgcgttcggtatagcgtttgagaaaatgctgcgccagctgcggaatatcttcccgtcgccggcgcagcggcggcatatcaatagttacgacattcaggcggtaatagagatcctggcgaaaacgcccggcgctcacctcctccgccagattacgatgggtggcggcgattagccgcacatcgacagaaagcgtctgattactgcccacgcgctgcacttcgcgttcctgaatcgcccgcagcagacgcacctgcatcagcggcgagatatcgccaatttcatcaaggaacagcgtgccgccatccgcctcgacaaagcgtccttcccgtcgccgatccgccccggtaaacgcccctttttcatggccgaagagttccgactccagcagtgactcattcagcgccgcgcagttgagcgtgaccaacggcttgtcacgacgctcgctgcaggcgtggatggcgtgcgccaccagctccttaccggttcccgactccccataaatcagcaccgtcgcgtccgaaggggccaccagcgtaatatcgttaagaagcgcctgcatcgccgggctgtcgccaatcatgccccaccgtgaatccgtcgcaacgctggggtcgctctcgctctgccgggtgtgcgccaatgcctgaaccagcgtctgctgcagggtgtcaaaatccagcggtttaaccagataatccagcgccccggacttaatagcttctaccgccgtaccgacgctggaaaacgccgtcatgatcagcaccggtatcgccgggttataggccttaatctcttttaacgttgcgataccgtccatctccgccatacggatatcgcacagcaccaggtcgaagacctgctgatggatctgctccagcgcctgcaggccgttgtgagccaaccccacctgatagccccagccgcgcagcagcgcctgcaggatcgtgcagtggctgatgtcatcatcaacgaccagaatctgtactttatcgctgctcatcttccctccgttgagcatccaccggtaaccaaagcgtaaatatcgctccagctcccggctgactttcggcgcggatcgtcccgccatgttgttcgataatattctgcactacggccagccccagcccggtgccgtccgccttggtggtgaaatacggcgtgaagatagcctgtaactcttcatcgctcatccccttaccgctatccgtgacgacgattttcacccgctgacgatcggcttcgcttgctgttacgcgaatgacgccgtcacggccaatcgcctgcattgcattcagatacagattcaacagcacctgattcaggcgatcggggtcggcgctgatcgtggttaactcaggtcgcggagtaaattgcagcgcgatcccgcggctctgcgcatcctggcttaccaactgcaatgagtggcggataagcgcgttgatatcgactgtctggtagtttagatgggcgggccggaccagctccagcagctcgctgaccacccggttcaggcgatcagcctctttggccatcacctgggctaactgatgcgactcgccgccaggcgacgtgcgctcggcaaaatatttcgccagccctttaatcgacgagagcgggttgcggatctcgtgcgcgacccccgccgccagatggccaagcgccaccagcttttccttgcgggccatcgcctccagcagctgtttccgcgagcgacgatagcggcggaaccagaactgagcgaggatcgtcgccgctatcaccagcgcggcggcacccagcatgatggccatatttcgctgcccgcgggcctgcgcggcatccagctcgcggctatcaaaggcgataaaaatcacctgcgggacgatggcctgagccagggcgctattgccgcggttcatcattcccatatggtggccgcgggccggattaagcgggcgaaaatggcgatagatctccagcgccggctgcggttcgctaagccggcgccagcgggcctgttcgccaaccgctaacgcacgcatctgcgccgggctatacagcgttttacccacctgctgcggatcgctatgggcgatatttttaccgttttcatcggtcaccgcgaaccacaggacgcccggttgccaggccatctcttccagcagggcctgcagctgcgcatgatgcatacgcatccccatcccgacgcgcgtgccggactccagcgcgcggatcagcacgctccctttctcttcaatggtttgtcgggcagcggtcgtctcgcgaccgtagtcgcggacgatcatcgcggagaacagcatgaccagcagcacaaccgtgccggtcagcagccagctcagcgcgccagcggcggcgtcccgggagagagatttgatcttcatcggcgagtccttgtcatctctttttcactatctgcaggctccttcagcagaaatcatgccatgtttccgcgcggccaatcctgctctcaaacatatcgcctgcgcttaagcgagtaaaaatgactcgcctgaccctggcggaacgggtcatttttactcgctctcctcggcaaaggcttcggcaggcccacacagacgggctttttcagactggcatggaagatgcaataccgagggaaaccacacaggagaaaatgccatgaaacggaaccgtaccttacctctcgccctcgttacctttgccgcgctgaccttcgccagcaacgcggcctgggccaaccaccactggggcaacaataacgggatgggcaaccagggctacagtcagctgacccaggagcagcaggctaccgtgcaaaagctgcataacgattactatgcgcaaaccagcgccctgcgccagcagctgcagtccaaacgctatgagtacaaggcgctgctcacggcgcaaaagccggacagcgggaagattgaagctgtcgctcaggagatggaaggcttacgccagaagctggatcagcagcgggtgaagtttgatatcgccctggctgaggcaggcgttccccgcggcgcaggaatgggatatggcggctgtcgcggtagcgccggcggtcatatgggcatgaaccactggtaaaggttagaagcttttttccgtcggctgccaggtgcagaagttttcattggcgaccagcagcagttgagagccttccggcgcctccagccaggcaatgctcactgcggcggaagcgtggctctggcggcgttcaatgtgcgccagggcccggctatcgaggtcgggcgtaaccgtctgcccttcgcaggtcagcacggtatgcgcggcagcgttccagcgcccctgccgcaggacgacccgcccctggcggagggcgtcgctggtctggcggatctgttcggcgcgataacgatatagcgcgacctggtcgctggagagctgctgcttctgcccgtccacttcccgttgcataaagctcagatcgccctgcgcgtcgaaacgggcgcgaatatgttccggcggtttgccatagacattgagttcgataagcgccagttgatcgccctgccagcgatattcgctggtcgaagtgtccccgtgacgccacgggctgaaggcggcgagaagatggacttcatcgccagaatctttacgccagatgcgcatcgctccctgattgtccgcatatccgctggcggtaaacggcggtagcgacgtgtcgtggctgcaggcagtcagcaacaggatgcccgccagcgccagaggccggcgccagacagacaaaaggggcttaatagccccttcgataaaactgttcactgccacgcggtcttacttaactgcgtctttcagtgctttgccagaaacaaatgccggcacgttagctgcagcgattttgatctctttaccggtctgcgggttgcggccagtacgctcagcgcggtggttcactttgaaggtaccgaaaccaaccagttgaacagcatcaccttctttcagagactcagtaattgcagccagggtagattccagggcagctttagcctgtgctttggacaggtcagctttgtccgcaattacatcaatcagttgagtcttgttcataagttatccttacaatgtgtttatcgcttgctaagcatcgagtgcgacggaaatgccaaaaaagcaccctcctgcatacacgcaccgatagccactttttttcgccctccaaatgtagaccagacggggggcggaatggaagccttcagacgctacaattcaggcggtaaatcacgttttctggtctcactgctgaaaatttataccaatattgctctcgccagcctcgcgcaggtccgcgcgcaggccttttatcagctcaagatcacgctcttcacagtcggccagcaggcggaaaatttcccactgaatatcccattcctgctctaccgccggattcgctttcaactcttcgtcggtcatttcgcgaccttcctgggtcatttccagcatcgccacggtggtgatggaggtcttgctcacctcgatcgcgtgctcgagcgtttcgccgctcagacgagaatgaatcagttcactcaacgccacgcaagcgtctatggccggatagacaccgtacatgtcgaaatcatctgccgccgggatcgcctcttccagcttctccagctggctgtcgaaattcaccttcgcatctttaaccgtcagcgtttcccagatcaggtccaggatacgacgataaagcaggccgtcgccaaactcggtttgcttgcagaacatcgcgtagttgggatacatacgttcgcacaggcaggccataaaagtgacatgctgccagctttccagcttctccaggcgcaggtgaatcgggttttgtaacatgatgaattctcgaagtcagaaattaggcgcagtgtacctgaatcagctgtgatttgcttgccaacgcacaaacgacggacgacgggacgccaccgcatcggcccagcgcgtcggctcgggcagacggtagcctcgcatgcaacgctcaacccacattaaagcgctgtccatgcctaccctgtggccggtgctaataaacagcgggttgcagcgcactttgctgcgccagacccaggccagttgctcatttttatccatcagcggggccagcgcgccaggctcatcacccaggtcgccgattttgccgcacaggcgttttttcgccactccgatagtcggcacatcaatcatcaggccaaaatggctggcgacgcccaatctccggggatgagaaatgccgtgtccgtcaacgaagagcaggtccggtttttgcgaaagctgctcccacgccgccagcagcgcaggcgtttcgcgaaacgagagaaagccgggaatatagggcatagaggtggcgacccgcgccacctggtactccaccagctcaagctcaggccaggtcagcagcaccatcgcagcccgggtgatctccccttcctgctcaaacccgacgtccgcgccgccgatcaacgccggcgggtcgcgatccagtcgatccgcacgctctaccgacgcggctaactgttgctgttgggtacgtagtgcggctaaatccatagggcttatctcctactggtgatagggtgcggacagacggtgcacagcctcaacaaagacgcccgcatgctcggggtcaacgtcctgatgaataccgtgtccaaggttaaagacgtggccttccccctggccaaagccggcaagaatggtcgccacttcttcttcaatacgcggggcggacgcatagagcatcgacggatccatattgccctgcagcgctactttgttacccacgcgacggcgagcatcggcaatatcggtggtccagtcgagacccaacgcatcgcagccggtctccgccatcgcttccagccactgaccaccgcctttggtgaacagggtcaccggcacgcggcggccttcgttttcccgcagcaggccatcgacgatcttatgcatgtagtagagggagaactgctgatagtcgcggccggtcagcaccccgccccaggtgtcaaaaatcatcaccgactgcgcgccggctttgatctgcgcgttgagatacagggtgacgctcttcgccagcttatccagcagcgcatgcagcgcctgcggctcggcgtacatcatctttttaatcacggtgaaagccttgctgctgccgccctccaccatgtacgtagccagcgtccatggactaccggaaaaaccgatcagcggcacttcgcctttcagttcgcggcgaatggtgcgcacggcgttcattacatagcccagctcctgctccggatccgggatcggcagcttgtcgacgtcggctttactttttaccggcgaggtgaagcgcggaccttcgccagcttcaaagtacagccccagccccatggcgtccgggatggtcaggatgtccgaaaagaggatcgccgcgtccagcgggtaacggcgcagcggctggagcgtcacttcgcaggccagctcggcatttttacacagcgacataaagtcgcccgcttgcgcacgggtggctttgtactccggtaaatagcggcccgcctggcgcatcatccacaccggggtgacatcaaccggctgacgcagcagcgcgcgcaggtaacgatcgttcttcagttcggtcatttttacattcctttagcgttgatacgcccagtgtaacatgtcactcgaactctgcccgacacatcgcgacggtatcttcgataagccgccgcgccactgtccccggcggcggcagaagcggcaggtcgtcatagcgataccagtccgcggtcagtaactcttttttgtcgaccacgatctcgccatctgcgtaatccgccataaaggcggtcatcagcgactgcgggaacggccatggctgagaggtcacgtaacgcagattttttacccgaataccgctctcctccatcacctcgcgagccaccgcctgctcaagggtttcgccgacctcgacaaagccggccagcacggtgtgcacgccgttgcgatggcgcgtatgttgcgccagcaggatcgcatcgtcgcgacggattgccacgataatgcagggggcaatttgcgggtagtaacgttcgcggcagtggctgcacagcatcgcccattcgcttttgctggcatgcatcgggtggccgcagtaaccgcaaaatttatgcgagcgataaaattcggcgagctggatcccccgcccagccagctggaagagtcccggatcctgatccagcacctggcgcaacgatcccatgtcatggcgacgatcctggcgcaccatccacacggactcgccctgccactcgccaatatgcagcgcatgctggccgacaagatcgaaattaaccgcttcgccatgtggtaattctccaccaggcaaccataatttttgttcgtgactgacaacccaccagccgcgatctaatttttcaataatacgatccatatctattgcactacctttgcttcactggcatgttgttaacattatatttacattttggtgagcagatttaaatcaaaactagcggagtcaatcatgctaaaccagctggaaaatctgacggagcgcgttggcggtagtaatgaactggtcgatcgctggctacaagtgcgtaagcatctgctcgtggcttactacaacctggttggcctgaaaccgggcaaagagtcgtttatgcggctaaacgaaaaggcgctggatgacttttgccaaagtctggtggattacctctcatccggtcattttagtatttatgaacgcattattggcgaaatggaaggcgatacccctcttttagccgccacccggctttacccgcagctggaagccaatacccagcagatgatggactactacgatacctgcctcgaaaacgccatcgatcacgataactatcttgaatttcagcaggcgctgtcggatatcggcgagtcgctggaggcgcgtttcgcgctggaagataaactgatcgccctggctgtcgcccataacctgagcaatgacgtgcgcgataatattgcgccgaccgcttgagttgtgaaccgttaacgcgtaatttacgtacattatccctctgcggagggatttcatcttgtcggagtgcctattttccatgcgcaggctaacgtggaaaaggctgagaccgttaattcgggatccgcggaacctgatcaggctaatacctgcgaagggaacaagagtaaactgctgttcgcgtcagtccgtcagggccgatcgcatctgttactccatccgtcgtctgacaagccatgtccttttttaactggaatgcgctatgtctactaccaaactaacccgtcgggaacaacgcgagcacgcgcagcgattcattgatacgctggcgggtaccgcttttcctaattcacgccgcatctatgttcacggctcacaagcggatatccgcgtcccgatgcgtgaaattcagctcagcccaactctcgtcggcggcgataaagataacccccggtacgaaaccaacgaaccgatcccggtgtatgacacctccgggccgtatggcgacccggatattagcattgatgtccgccaggggctggcaaagctgcgccagccgtggatcgacgcgcgtaacgactgcgcgccgctcagcgaacgcagctcggcctataccagagcgcggctggccgacgacggtctcgatgagctgcgcttcagcggcctgctgacgcccaaacgcgccgtcgctggcaaatgcgttacccagctgcactacgcccgccaggggatagtcaccccggagatggagttcatcgccattcgcgaaaacatgggtcgcgaacgtatccgcagcgaggttctgcgccagcagcacgcaggtgaaggcttcggcgcccaccttccggaaaacatcacccccgagtttgttcgcgatgaagtggccgccggacgcgccatcatccccgccaacatcaaccacccggagtctgaaccgatgattatcggccgcaacttcctggtgaaagtgaatgccaatatcggcaactcggcggtgacctcttccatcgaagaagaggtcgagaaactggtctggtcaacccgctggggcgccgacacggtgatggacctctccaccggccgctatatccacgaaacccgcgagtggatcctgcgcaacagcccggtgccgattggtaccgtgccgatttaccaggcgctggagaaggtcaacggcatcgccgagaatctcacctggcaagtcttccgcgataccctgctggaacaggccgagcaaggcgtcgactacttcacgattcacgccggcgtactgttgcgctacgtcccgatgacggcgaagcgcctgaccggtatcgtctcgcgcggcggctcaatcatggctaagtggtgcctgtcgcatcatcaggaaaacttcctctaccagcatttccgcgaaatctgcgaaatctgcgccgcctatgacgtgtcgctgtcgctgggcgatggcctgcgccccggctccattcaggatgccaacgacgaggcgcagttttccgagctgcgcaccctcggcgaactgacgaaaatcgcctgggaatatgacgtgcaggtgatgattgaaggccctggccacgtgccgatgcagatgatccgccgcaatatgaccgaacagctggagcactgccacgaagcgccattctacaccctggggccgctcaccactgatatcgcgccgggctacgaccatttcacctccggtatcggcgcggcaatgatcggctggttcggctgcgccatgctgtgctatgtcacgccgaaagagcatctcggcctgcccaacaaagaggatgtcaaacaggggctgattacctacaaaatcgccgcccacgccgccgacctcgcgaaaggccatcccggggcgcagatccgcgacaacgcaatgtcaaaagcgcgttttgaattccgctgggaagaccagttcaacctcgcgctcgacccgttcaccgcgcgggcctatcacgatgaaaccctgccgcaggagtccggcaaagtcgcccacttctgctccatgtgcgggccgaaattctgttcgatgaaaatcactcaggaggtccgcgactacgccgcgaagcaaagtatagaagccggcatggccgatatgtcgaataacttccgcgcccgcggcggcgaaatctacctgaaacaggaggaagcctgatgtatcaacctgattttccacccgtcccgtttcgtctcggactctacccggtggtggacagcgtggcgtggattgagcgcctgctcgaagctggggtacgtacccttcagttacgcatcaaagaccggcgcgacagcgaagttgaggatgacgtgatcgccgccatcgcccttggtcgccgctatcacgcccgactgttcattaacgattactggcaactggcgattaagcaccaggcctatggcgtgcatctcggacaagaagatctggaaaccaccgatctgagcgctatccgccaggccgggctgcgtcttggcgtctctactcacgatgatatggaaattgatgtcgcccttgcggcacgcccctcttacatcgcgctaggtcacgtcttcccgacgcaaaccaaacagatgccttccgcgccgcagggcctcgagcagcttgccagacatattcaacgcctggcggattaccccaccgtggcgatcggcggaataagcctggaaaaggcgccgggggtactggcgaccggcgtcggcagcatcgcggtggtcagcgccatcacccaggcggcggactggcgggcagcgaccgaccaactgctggcgctggcgggagcgggcgatgaatgatcacgactttatgcgctatagccgccagctgctgctggaggatattgccatcgaagggcagcagaagctgttagccagtcgagtgctgattatcggccttggcgggctgggctccccggcggcgctctatctggccggggctggcgtcgggacgctgaccctggccgatgacgacgcggtgcatctcagcaacctgcaacggcagatcttgttcaccagcgcggatatcgatcggccaaaagccgcagcggcacagacccggctcagccagctaaacccgcagatcaaactggtagcgctccagcagcgcttaagcggcgaggcgctccgcgccgaagtggcgaaagcggacgtggtgctggactgtaccgataatatggtcacccgccaggcgatcaatgccgcctgtgtggccctcgataccccgttagtgaccgccagcgccgtgggcttcggcggtcagctgatggtgctcaccccgccctggacgcagggctgctatcgctgcctgtggccggaaagcgatgaaccgcagcgcaactgccgcaccgcggggatcgtcggcccggtggtcggcatgatgggcaccctgcaggcgctggagacgattaagctgctcagcggcatggcgacgccgcgcaacaccctgcggctgttcgacgcccgcaccagcaactggcgcgcccttgcgctacagcgttcccggagctgcccggtgtgcggagggcggcatgcagatctggtttaacgacgagccgctggcgtgcgccgacaatctcagcgtcagcgccctgctgacccagctcgaacaacagcagccgggcgttgcgctggcgctcaatcaacacatcctgccgcgcgaccggtgggaagatcatctcttgcaggaaggcgatcgggtcctgctttttcaggttatcgctggaggctgacatgttacgtattgcagacaaaacgtttgaatcccatcttttcaccggtaccggcaaattcgccgccccggaggtgatggtcgaggcgattcgcgcctcgggcagccagctggtaaccctggcgatgaagcgcgtcgatttacgccagcgcaatgacgccatcctcgccccgctgctggcggcgggagtcagcctgctgccgaatacctcgggcgccaagacggcggaagaggcggtgtttgccgcccgtctggcgcgggaagccctgggtacacactggctgaagctggagatccacccggacgcccgctggctgctgcccgacccgattgaaaccctgaaagcggcggagctgctggtccgcgaagggttcgtggtgctgccctactgcggcgccgatccggtgctgtgtaaacgactggaagaggtgggctgcgcggcggtgatgccgctgggtgcgccgatcggctccaatcaggggctggaaaccaaagccatgctggagattattatcgagcaggcgacggtcccggtggtggtcgacgccgggatcggcgtcccgagccatgcggcgcaggcgctggagatgggcgcggacgcggtgctggtcaataccgccattgccgtcgccgacgaccccgtggccatggcccgcgccttccgtatggcgatcgatgccggattactggcgcgtcaggccggaccgggggcacgcagtacgcaggcgcaggccaccagcccgctcaccggattcctggaggcgctggcatgaaaacctttagcgatcgctggcggcagctggagtgggacgatatccgcctgcgcatcaacagcaaaaccgccgccgacgtcgaacgggcgctggcggccaaacagctcacccgcgatgatatgatggccctgctctcgcctgccgcggccaattaccttgaaccgctggcccagcgcgcgcagcgcctcacccggcagcgcttcggcaataccgtcagcttctacgtgccgctgtatctctccaacctgtgcgctaacgactgcacctactgcggcttctcgatgagcaaccgcattaagcgcaagacgctggatgccgccgagattgtccgcgagtgcgccgcaatccgcaacctgggctttgagcatctgctactggtgaccggcgaacatcagggtaaggtgggaatggattatttccgtcagcacctaccggctatccgcagccagtttgcctcgctgcatatggaggtgcagccgctggcgactgaagagtatgccgagctgaaaaccctggggctcgacggggtgatggtctatcaggagacctatcatgaaagcatgtacgccaaacaccatctgaaaggaaaaaagcaggatttcttctggcggctggatacgccggatcgcttaggcgcggcggggatcgataagatcggccttggcgcgctcatcggcctttccgacagctggcgagtggactgctttatagtcgctgagcacctgctgtggctgcagcagcgctactggcgcagccgctattcggtctccttcccgcgcctgcgtccctgcgccggcggtattgaaccggcttcgctgatggatgagcgccagctagtgcaaactatctgcgccttccgcctgctggcgccagaggttgagctgtcgctatccacccgcgaatcaccctggttccgcgaccgggtgatcccgctggcgatcaataacgtcagcgccttctctaaaacccagcccggcggctacgccgacgatcatccggagctcgagcaatttgccccgcacgacgatcgccgccctgaagagatcgccagcgcgctggccgcccgcggcctgcagccggtatggaaagactgggatagctggctgggacgcgcttcgcaaacctcatgatgtacagtgtaaacgcctgataattttgcgcgcctgcacgagagatgaaaaacggaggctggcccgcccgacgccgtttttctattctgcccgggtcagcagcggacgctgaccagggcgaaccttttcttcctcattttcgccctgcctctccgcgctgagcagaggcctgcacattatcgccgaatataaatcacgatacatgaaggcctcagagttataattgagcaatagtgaactgattcgatcggcaggcgtcccagacgcaacctgcgttcggacccatggtttatacatccgggacgattaacgattcatggctctacacaacagaaagctctcttttacgacgccgatcgtcgtggggtttgccggtattttgctcagctttatgctgatcgctatttttgtgactctggcgcaacagaaagattttctcgaagattatcacgatattaaccgcaattttacccataacctggcgatcaactatacggaaaccctgctgcgggaaaatgattttatcctcgggcgcgcagccgccttctttgcccgcaatgacgaactgaatcgcgcagtcaatgtggagccggagaaagggttaaccacgctgatgcagttacagaacatgatgccaagcgtctcatccatctcgctggcggataccgagggccactatctgcgcgccccggaggtgctggaaaacgaagacagccgggctttcgatcccagaacgcggccctggtttatcaaacaggcggaagccagcaccttcagccactacaccagtccgtatatggattatttcacccaccatccgacgattaccattttcaaacccatcattaccccggaagggaaactcaagggcagcctggcctttcatctcgatctcacctccatggggttcgcgctgcgccagatggtggcgcccgtacagggggaattttttgtggtgcaacgggatggcaaagtggtcctgcactccgacccgggcgcgctgtttaaacccttcgtcagggacgagctgatggataaaatgaccagcggagaggggcagctttacgatcccgggagcgacacctggtattactattactcctttaccaatcccgactggtttgtgattttccgtgtcgataacgccaccctggtcaatctgacacgtcatgagaccaatttagtgatcggcggtttcactctcgcagcgatcattattatcctgttcggtctttatctgcgtcatgcttcccgtaccgtgctgatgaatatcatcaatgcgattaaaaccggtgacgtcaaacgcgccccgcgccttgaggcgatgctgagtaaagcgattgaaaccaataaacagcgcgaactgtcctacgtccgccaggcgaccatcgacgctctcaccggctgcaaaaaccgccgcgccttcgacagcgatattgccgccctgatgaacgatcaccagccattcgccctcgcgctggtcgatatcgataactttaaatcgatcaacgacacctggggccacctcaatggcgatatcgtcctgcgtaacgtcgctcgcgaagggctacaggtcctccagccgctggagatatccctctatcgctacggcggtgaagagttcgcggtggtctttcctgccgaacatatcgataacgcccgcacgctgttggaaacatggcggataaacgtcgaacgacgcacctggcgcgaagatggcctgacggtcaccttcagcgccggacttggggaatggaatatggagccactggataagctggtggtgagcgtcgatgaagcgctgtacaaagccaaacagcagggtaaaaaccgtatcctgcgcgcgtaagacttcagcgccgccaccgcccacttcggtgggcttttttattttttccggaaaaaatgaaaccggtttcaattattgtgtgatgccttacacacaatcacggtaaagcggttgtcgcatcgacagggccgcgataaagataagacatcacggaacacaagggccactgactatgaagaatatcgttttgtgctgtgccgccggtatgtctaccagcatgctggttcagcgtatgcaagatgccgcgcagaagaagggtgttgaggtctctatcaaggccgtaccggtcgctgagtttaaagataatctggccgccgccgacattattttgctcggccctcaggtgaaatatgagcaggcaaagctgcaggcgctggccgacccgttcggcaagaaggtcgccgtgatcgatatgatggactacggcatgatgaaaggtgatgccgttctggataaagcccttaagatgctggagtaatcgatggaagatttagaaacgatcatcatggagctgctggttaacgcgggttccgcacgtagcgcggcgctgacggcgctacagctggcgcgaaaaggcgattttgccgccgcggagcaggccatggctgaatcccatgagttcgtcaaacatgcgcataaaattcagacccagcttatcggcatggatgaaggcagcggtaaattgccggtcaacctgatcaccgtgcattcccaggaccatctgatgaacgctatggtcattcaggatctggcgaccgacatgattgaactctatcgtcgtctgcccctcgcgcaataatctcacggatttaacgggcgtcgctgccggcgcccgtccttcttacagaaagccgtacatcgccgcgaatacccagccaaacacgcaggagacgccgacgccgatgagcccgggcaggataaagctgtggttaatcacaaagcggccgatatgggtggtccctgagcgatcaaactggatcgccgccagatcgcttgggtaggtcggcagaatatagtagccatagcaggccggcgctgaagccacgatataggccgggtcgacgccgatggccagggctactggcacaatcgccgccagcgctgccgcctgggagttcacaaatttcgaaaccagtagcagcacgatggcataagcccacggatactcttttaccatttcaccaagcacgcctttaatctcggtcatgtgcgcgccaaacatggtctccgccatccacgcgataccgtacaccgcgacgatagcgatcattcccgaacgaaagacctcatttttggaaatcgatgccgggttagtttttgtaatgatgatgatcagcgctccggagagcagcataaacatctggataaccagcaccatcgacagtggtttaccgtcaaaggccgggcgcagttcagaaaaagcgccaagcagcgccaccacggcgatagaggccagaaaaatccacattgctatccagttgctggtcggcagctttttgtccagcagcgtcgccgtatcgccatagacgtaatggcggttctccgggagcgcaataaacgcctggaaggcttcgtcctgatccaggtctttgccgcggaaccagctgaagataccgatggctaaaatacccagcagcgtggacggaatggttatcgccagcagatcgagaaactccaggtgtttcccgttaaaggtaaaatttcccagcatcgccaccagcgataccaccgccaccgagaccgggctggcgatgatccccatctgagcgccaatggagctggcggccatcggacgctccggacgaatgttattcttaatcgccacatcgtagataatcggcaggatggtatacaccacgtggccggtaccgcagaggatggtcagcgtgcaggtgacgaaaggcgccacgatagaaacatatttcgggttacgccgcagcagcttctcggcaatctgcagcatcacgtctaacccgccggacgcctgcagggtcgccgaggcggctaccactgcaatgatcaccagcatcacatcaaccggcggtttgcccggctggagatgaaaaacaaagacgaggatcaccaaaccgatgccgcccagcagccccagcgcaatccccccttttcgggcaccataaaacagacaaattaatataataatgagttgtatcgcgaattccatgcagcccccagagcctgtccactcagatctaaaaatgatccctacctgcctctcgggattatttctgcgccagaccgggagaagcatgagatgcggctatccctctccagcgccgtcgcgccgaagatacagcaacagaagtaatcccatgattcatcaggtattttgaatatataccctttgaattgattattttttgatatgagtagaagttttacccatacataaagaaaggttttagaaaaaggcttctaatagatattttgcatgaattaattgctaagaaaatgaagatttaatatgtcgtaaatgtaattaagggccgggaaagcggcggaaaatagacaataaaaaaagccggtcaggaaacctgaccggctttttagcagtgcatcaacgattaatcgttgtcagaaccgcccagacctgcgttcagcagctctgccaggttggcagacgcttcttccacgctcacctgcggtgccgccggcagctcgccagcagcgcgacggcgcatacgatcctggtgatacgcataaccggtaccggccgggatcagacgacccacgatgacgttctctttcagaccgcgcagttcgtcgcgtttgcccgcaacggctgcttcggtcagcacgcgagtggtctcctggaacgatgccgcggagatgaaggactcggtggccagagacgctttggtgatacccagcagatcgcgggagaacgttgcgcccactttgccgttcgcttccagttcgcggttcgcgatcttgacgcgggagtattccacctgctcgccttcgaggaagtcggagctgcctgcgctttcgatggtggctttacgcagcatctgacgaacgataacttcgatgtgcttatcgttaatcttaacgccctgcagacggtatacgtcctggacttcgttaacaatgtaacgggtcacagcatgtacgccacgcagacgcagaatgtcgtgcggtgcttccggaccgtcggaaacaacatcaccacgttccacacgttcaccttcgaacacgttgagctgacgccatttcgggatcatctcttcgtacggctcgctaccgtctaccggggtgataaccaggcgacgtttccctttggtttctttaccgaaggaaatgataccgctgatttcagccaggatagccggctctttcggacgacgtgcttcgaacaggtccgcaacgcgcggcagaccaccggtgatatccttggtaccgccggattcctgcggaatacgcgccagggtgtcaccagagctgatctgtacgccatcttccagctgaacaatcgctttacccggcaggaagtactgagcaggcatatcagtgcctgggatcagaacgtcgttgccctgagcatcaacgattttcagtgctggacgcagatctttaccacctgcggtacgttctgcagagtccagaaccaccagcgaagacagaccggtcagctcgtcagtctgacgagtaatggtctggccgtcgatcatgtcagtgaaacggatgaaaccgctaacttcggtgataaccggcatggtgtgcggatcccagtttgcgacggtttcaccgccggcaacctgctcaccgtcgcctttcgccataaccgcaccgtaaggtactttatagctctctttggtacgaccgaattcgtcgatcagcttcagctcggtattacgggaagtgataaccagcttaccactggagttcacaaccgacttcgcgttgctgagcttgatgctacctttgtttttcacctggatgctggattcagcagccgcacgagatgccgcaccaccgatgtggaacgtacgcatcgtcagctgtgtacccggctcaccgatggactgtgccgcgataacgccgatagcctcacctttgttgatgaggtggccacgcgccaggtcacgaccatagcagtgcgcgcagacgccaaagtcggtgtcacaggatacaacggaacgcactttgacggagtcaacggagttcgcttccagcaggtcacaccagtgctcatgcagcagcgtgttgcgtggaaccagaatatccgcggtacccggcttcagaacatcttccgcagtcacacgacccagtacgcgatcgcgcagcggctctttaacgtcgccaccttcgataaccggcgtcatggtgatgccttccagggtgccgcagtcgtcttcagtgacgaccaggtcctgcgcaacgtcaaccagacgacgagtcaggtaaccggagttcgctgttttcagtgcggtatccgccagacctttacgagcaccgtgggtggagatgaagtactggagtacgttcagaccttcacggaagttcgcggtgatcggcgtttcgatgatggagccatccggcttcgccatcagaccacgcataccagccagctgacgaatctgtgccgcagaaccacgcgcaccggagtcggccatcatgtagatgctgttgaaggaaacctgctgctcttcctgaccgtcacggttaatcacggtttcggtttgcaggttatccatcatcgctttggatacacgatcgttcgccgcagcccagatatcgataactttgttgtagcgttcgcccgcggtcaccagaccggactggaactgttcctgaatctcagcaacttccgcttccgcttcgctgatgatttcgtattttttctccgggatgaccatgtcatcgataccaacggatgcacctgaacgcgctgcgtaagcaaagccggtgtacatcgtctggtccgcaaaaataacggtcggtttcagacccagaatacggtaacaggtgttcagcatcttggagatcgctttcttaccaagcgcctggttcacgatagagaacggcagacctttcggtacgatcatccacagaatggcacggccaacggtcgtgtctttcaggctggttttcgcgacaaactcaccattgtcgtctttttcgtattcagtgatacgcactttaacgcgcgcatgcagagaggccaggccggcgcgataaatacgctcagcttctttcgggccagtcagcaccatgccttcgcctttggcgttaacactgtcacgggtcatgtagtacagacccagtacaacgtcctgagacggaacgatgattggttcgccgttcgccggggacaggatgttgttggtagacatcatcagcgcacgcgcttccagctgggcttccagcgtcagcggtacgtgaacagccatctggtcaccatcgaagtcggcgttgtatgccgcacaaaccagcgggtgcagctggatggctttaccttcgatcagaaccggttcgaatgcctgaatacccagacggtgcagggttggcgcacggttcagcaggaccgggtgttcgcggataacttcgtccaggatatcccaaacgacagcttcttcgcgctcaaccatcttcttagcggctttgatggtggtggccaggccacgcagttccagcttgccgtagatgaacggtttgaacagctccagcgccattttcttcggcagaccgcactgatgcagacgcaggtatggacctacggtgataacagaacgaccggagtagtcaacgcgtttaccgagcaggttctggcggaaacgaccctgtttacctttgatcatatcggccaaagatttcagaggacgtttgttagaaccggtgatcgcacgaccgcgacgaccgttatccagcagggcgtcaaccgcttcctgcagcatacgtttttcgttgcgtacgatgatatccggcgcagccagatccagcagacgtttcagacggttgttacggttgatcacgcgacgatacagatcgttgaggtcagacgtcgcgaaacgaccaccgtccagcggaaccagcggacgcagatctggcggcagtaccggcagaacggtcaggatcatccactccggcttgttgccagactgaacgaaagcttccagcagcttaatgcgcttggtcagctttttacgcttggtttcggagttggtttcgttcagctcttcacgcagctgctcgcattcctgctccagatccatattgcgcagcagcgcctggatcgcttccgcgcccattttcgcgtcgaattcgtcaccgaactcttccagcgcgtccaggtactgttcttccgtcagaatctggttgcgttcgaggttggtcatgccaccttcgataaccacataggattcaaagtacagtacacgttcgatatcgcgcagcggcatatccagcagcagaccgatacgggacggcagggatttcaggaaccagatgtgcgcagtcggacatgccagctcgatgtggcccatgcgctcacgacgcactttagtctgggtcacttcaacgccgcacttctcacagatcacaccgcggtgtttcaggcgcttgtacttaccgcacaggcactcataatcttttaccggcccaaagatacgggcgcagaaaaggccgtcacgctcaggcttgaacgtacggtagttaatggtttccggctttttaacttcaccgaaagaccatgaacggatcatgtctggcgaagccagagcaattttgatcgcatcaaactcttcggttttagtttgcgctttcagaaactttaataagtctttcacggatttgctcccgtcggagttagcacattccgctgccgggcgttaacccggcagcagtgacctgtttgagcgagaattactcgtcttccagttcgatgttgatgcccagcgagcgaatttctttcaacagtacgttgaaggattccggcatgcccggttccatctggtgattgccgtccacgatgtttttatacatcttggtacgaccgttcacgtcatcagacttaacggtgagcatttcctgcagggtgtaggccgcgccgtatgcttccagcgcccacacttccatctcaccgaagcgctgaccaccgaactgtgccttaccacccagcggctgctgagtaaccaggctgtaagaaccggtggaacgagcgtgcattttgtcgtcgaccaggtggttcagtttcagcatgtacatgtaacccacggttaccggacgttcgaactgttcaccggtgcggccatcaaacagggtgatctgaccggaagtcggcaggtcgcccagctgcagcagctctttgatttcagcttctttcgcaccgtcgaataccggcgttgcgatcggcatgcctttacgcaggttttcagccagacgcagaacttcttcatcgctgaaggtattcaggtcaactttctggcgaacgtcagcgcccagatcgtaagcacgctggatgaattcgcgcagtttcgcgacttcctgctgctgtttcagcatggcgttgatcttatcgccgatgccttttgcagccatacccaggtgagtttcaaggatctgaccgatgttcatacgagacggtacgcccagcgggttcagtacgatatctaccggcgtaccgttagcatcgtgcggcatatcttcgatcgggttgatcttagagataacacccttgttaccgtgacgacccgccatcttatcaccaggctggatacggcgtttaacggccagatataccttaacaatcttcagcacgcccggtgccagatcgtcgccttgggtgattttacggcgtttcgcttcgagttttttctcgaactcgtgtttcagttcgtcatactgctcagccagctgttccagctgattttgtttctcttcgtcggtcaggcccagttccagccagcgatcgcgaggcagcttgtcgagcttctcagcttcaacgccaccggagaccagcaccgcgtagatacgactgaacagaccggcttcaaggatctgcagttcttcagacaggtcttttttggcctgcttcagctgcatctcttcgatttccagagcacgtttgtctttttctacgccgtcacgggtaaagacctgaacgtcgataacggtaccagagacaccgttcggtacgcgcagagaagagtctttaacgtcagacgctttctcaccgaagatcgcgcgcagcagtttctcttccggcgtcagctgggtttcacctttcggcgttaccttaccaaccagaatgtcgccgccggtcacttccgcaccgatataaacgataccggattcatccagtttggagagcgcagcttcacccacgttcgggatgtcagcggtgatctcttccggccccagcttggtgtcacgggacacgcacgccagttcctgaatgtggatagtggtgaaacggtcttcctggacaacacgctcggaaacgaggatggagtcttcgaagttgtaaccgttccacggcatgaacgctacacgcatgttctgacccagcgccagctcaccgaggtcggtggacgggccgtctgccagcacgtcgccgcgctcaataggttcgcccagggacacgcaaggcatctggttgatgcaggtgttctggttagaacgggtgtacttggtcaggttatagatgtcgatacctgcttcgcccgggtacatctcgtcttcgttaactttgataacgatacgggaagcatccacgtactgaacggtaccgccacgtttagccacggcagtaacaccggagtcaacggcaacagcacgttccataccggtaccaaccagcggcttatcagcgcgcagagtcggaaccgcctgacgttgcatgttcgcacccatcaatgcacggttggcgtcatcgtgttccaggaacgggatcagggacgcaccgacggataccacctgctgggtggatacgtccatgtagtcaacctggtcgcggctgaacaagctggattcgcctttgctacggcaggtaaccagatcttctacgaagtggccgttttcatccaggttggagttcgcctgagcgataacgtagttgccttcttcgatagcagacaggtagtgaatttcgtcagtaaccacaccgttggtcactttacgatacggcgtctcaaggaagccatattcgttggtctgcgcgtacacggacagggagttaatcagaccgatgttcggaccttcaggcgtttcgatcggacatacgcgaccgtagtgggtcgggtgtacgtctcgaacttcgaagcctgcgcgctcacgggtcagaccgcctgggccgagtgcggagatacgacgtttgtgcgtaatctcagacagcgggttgttctggtccataaactgagacagctggctggaaccaaagaactctttcactgctgcggaaatcggcttggcgttgatcatatcctgaggcatcagggtatccagatcgccaagagacagacgctctttcaccgcacgctctacacgtaccaggccaacgcggaactggttttccgccatttcgccaacggaacggatacgacggttgccgaggtggtcgatatcgtccacttcgcctttaccgttacggatatcgatgagcttcttcatcacttcgatgatgtcgtctttgctcaggataccggaaccttcgatttcgtcgcgcagcagagaacggttgaacttcatacgaccaaccgcggacagatcgtagcggtcttctgagaagaacaggttctcaaacagactttcagcggcttcacgagtcggcggctcgccagggcgcatcatgcggtagatttctaccagcgcgctcagacgatcgttagtcgggtcgacgcgtaccgtttcagagatgtacgggccgtggtccagatcgttggtgaacagcgtttcgatacgcttgtggccagactggctcagcttagccagcagatccaggctcaactccatgttcgccgggcagatcagttcgccagtcgcttcatcgatatagtctttagccgccactttgcccgcgatatattcaaccggcacttcgatatgcttgatatcgtctttttccagctgacggatatgacgagccgtgatgcgacggcctttctcaacgtacactttgccgttggcttcgatatcgaaggaggcagtttcaccgcgcagacgctccggaatcagctccatctgcagcttgttgtcgcgaatttcaaagaccactttttcgaagaacaggtcaaggatctgctcagtggtgtaattcagcgcgcgcaggatgatggtagccggcagcttacgacgacggtcgatacgaacgaacaggttgtctttcgggtcgaattcgaagtccagccaggaaccgcggtaagggatgatacgtgcgttatacagaaccttaccggaggagtgggtcttacctttgtcactgtcaaagaagacgcccgggctacggtgcagctgagaaacgataacacgctcggtaccgttgataacaaaggtaccgttgtcggtcatgagcggaatttcgcccatgtagacttcttgttctttaatgtctttgacggtgccttctggcgcttcgcgctcgtagatcaccagacgcagttttacgcgcagcggtgcagaataagtcacgccacggatctgacattctttaacgtcaaaaaccggttcgcccagacggtagctgacgtattgcagctcggaattaccgctgtagctctgaatcgggaatacggaacggaaagcagcttccagaccatactgcccttcaggatcttgctcgataaacttctggaacgagtcaagctggatagaaaggagatatggcacatccagaacttgtggacgtttaccaaaatccttacgaatacgttttttctcggtataggagtaaaccatagggttcctcagctcgctgacaagtcgacccatctgcccgcagagggcagttttttatgcaacactattttgttgaccggaaaatggaacactttccgcaatgcctgttgctatcacgcttaaaccatttcattgcgatttacacagcccaggaaccctaacctgtcgcagtatattaagtcgtcgatagaaacaagcattgagaggcaaaccagtagtcaaacagcgtgaaacgctactggcgccttacagcgcaaaaaggctggtgaccaaaaagtcaccagcctcagcctgatttctcaggctgcaaccggaagggttggcttatttaacttcaacttcagcgccagcttcttccagagattttttcagagcttcagcgtcgtctttgctgatgccttctttcagtgcagccggagcagattctaccaggtctttagcttctttcagacccaggccagttgcgccacgtactgctttgataacagcaactttgttagcgccagcagctttcagaattacgtcgaattcagttttttcttcagcagcttcaaccgggccagcagctacagctacagcagcagcagcggaaacaccgaatttttcttccattgcagagatcagctcaacaacgtccattacggacatagcggatactgcttcaatgatttgatctttagtgatagacatttaaattgttcctgaatatcagaataagtttatacgtaagcgaatgctttacaaagataactgcgattaagcagcttctttcgcatcgcgtacagcagccagagtacgaaccagtttgccagccgaagcttctttcatggttgccatcaggcgtgcaattgcttcttcgtaggtcggcagagttgccaggcggtcgatctgcgacgccgggatcagctcaccttcaaaggcagcggctttgacctcaaattttgcattcgctttcgcgaactctttgaacagacgagcagcagcgcccgggtgttccatagagtatgcaatcagggtcggaccaacaaacgtgtctttcaggcactcgaactgagtaccttcaacgacgcggcgcagcagggtgttacgaacaacacgcatgtatacgccagcttcacgacctgctttacgcagttcagtcattttatctacagttacgccacgggaatccgcaactactgcagacagcgcgcctttggctacttcgctgacttcagcaacaatcgcttgtttgtcttgaagatttaaagccattagctttgctcctggatgtttgccagagcctatgctctggaactcacttcactcaattcaacgaaaagagcgtctaaatacggtgagcagaaacaagccagaatatccaaaaataatcttagcgttctgtcaccgtctacgcaggggattaagtttcttgcgaaacacctgcggtcttcgacggaggcctggataggccaggctccaacgaacaaattcttcctatgacttcgtccttcgaaccgcagcggcgttagctgcaattcaaatgactcgcatagcgtctgtcttattgacagaatcgtgggggtaagattgtagacaaaatcaccgcccacgtaaaggcattagtttgcagaagcgttcaggccagcctgatctactgcaacacctgcacccatagtggtggagatgctaactttcttgatgtacacgcctttcgcctgagtcggttttgcttttttcagcgcaaccagcagagcttccaggttttctttcagtttgtcagcgtcaaagtccactttaccgatggtggtgtggatgatgccgtttttgtcgttacggtaacgaacctggcctgctttcgcgtttttaaccgcttcagcaacgttcggagttacggtacctactttcgggttcggcatcaggccacgcggacccagaacctggcccagctggccaacaacgcgcattgcatccggggaagcaataacaacgtcaaagttcatttcgccttttttgatctgctcagccagatcttccatacctaccagctcagcgcctgcagctttagcagcttcagcgtttgcgccctgggtaaatacggctacgcgaacggaacggccagtaccgtgcggcagtacagttgcgccacggacgttctggtcagatttacgagcgtcgatgccgaggttaacggcaacgtctacgctttcggtaaatttagcggtggccagctctttcagcagagcaatggcttcgttgatgtcgtactgtttagttgcatcaactttctcacggatcacgcgcatgcgcttggtcagtttagccatttcttagtcctccactaccaggcccatggaacgtgcagtaccttcgatggagcgagtcatcgcttcaatgtcggcaccagtcatgtcggcagctttggtctgcgcgatttcctgcagctgagcgcgggagattttacccactttatctttgttcggcttaccggaaccagacttgatgcctgcagctttcttcagcagaacagcagccggcggagtcttggtaacaaaggtaaaggaacggtcagcgtaaacggtgataacaaccgggatcggcagacctttctccagggaatcagttttggcgttgaacgctttgcagaattccatgatgttcacgccctgctgacccagtgctgggccgaccggcgggctcgggttcgccataccagctgcaacctgcagcttgacgtaggcttggactttcttagccattcttaaatcctcaaaatgggtattaacgcttcagagaagctccccgtgattaaacatcgttttacgggccgggcccataaaaacaaaaggcgcgaaattgtatgccaatttcgcgccctatgcaacgattaaatcgctgcttttttgatcgccggcttacgccttctcaacctggctgaagtccagttctaccggggtcgcacgaccgaagatagaaacggaaactttcaggcgggacttctcatagtccacttcttccaccacgccgttaaagtcagcgaacggaccgtcgttaacgcgaaccatttcacccggttcaaacagcgttttcggacgcggcttatcgccaacctgctgcagacgattcatgatggcgtcgacttctttgtcgctgatcggcgccggacggtcagaggtgccgccgatgaagcccatcacgcgcggtacgctgcgcaccaggtgccagcttgcgtcgttcatgaccatctgaaccaggacatagcccgggaagaatttacgttcgcttttgcgacgctggccgccacggatctcaaccacttcttcggtcgggaccatgacttcgccaaataactcttccatgttgtgtaatttgatatgttcacgcagcgacgtggctacgcgaccttcaaaaccggaaaacgcctgaacgacgtaccagcgctttttaggagcttcagacatctcagaacctcaggccagtgataaaggagaccaggcgaaccagaataccatccagtccccacaggatcagtgacattactgcagtcacggcagcaacaatcagcgtagtatgcagcgtttcctggcgagtcggccaaatcactttacgaacttcggttctcgcttcgcgagcaaaagcaacggtcgccttacctttcgtcgtcaacagcgcgacgccaccggcagcagcaataagaataaccacggccagcgcacgcaccgccagcataatgtcacgataaaggaagttgcccacgatcgccacgatcagcagcacggcaacgataatccacttcatcgcttccaggccgcgcccgctcccttgagcttcggtattcgcactcataaaccaacctgtcagaagtattctacaaacaatttcaccccgcgggggcgaggcgatccaaaccgaaattaagtttcggattatacacttaactattcaaattgcttcaatgttgacggtggtgtcacccctgccctgctgttgcaaagaaggagttgattagccgtcgccctgaggctcgaatggtttggtgtataaacgccctcttcagagcctgtctcagcaatgattatgacaaataaaatcactgatgagccaggttctggtgtgaaagcgtgcaaaaagggcatcaaatgatgcccttttattgcgcattgcgtcaaatgttatcagcgattagccgagaactttagcaaccacgcccgcgccaacggtacgaccgccttcacggattgcgaaacgcagaccgtcgtccatcgcgatcgggtggatcagggtaacaaccattttgatgttgtcgcccggcattaccatctctacgccttccggcagttcgatggtgccag

SEQ ID NO: 85 - DNA, 33317 bp, Unknown
  source: /note="Description of Unknown: MKP2_coc_1 Mutant Bacteria sequence"
acaattcccgccagcgtatggctgagcgcgcacttaacttacagtaaaggagtctccctatgggcacagcaattatggccgctggcactgatgcatcagcgtacgcaaataattatcttccgccggtatctggtcctctggcatgggcaaatctggagagtaacgccctcacagaggcgcgtagactcaagaattggggcaagaacggcggttcctttgcactgtcaggcgtcgcacagcttgtcgctaaaggtattgaggcagcggcagggaccgaaagccgtttgacgctgggtaattttacaccggatgcttacaccctgatcgcactcgttgatgtaggcgcaagcgcaggggttattcggcatcgaaatatccgcatcatgacggatgcaaataaaaaaatttggcgagtgatggatgcagggacaagtttatcgaatatcacggctccagcgaccggagctttcgtcgtatttctaaaaggcgacttaaccggccattctttcggcatggcgacgtcaaccggtgtacagaaggttgactccacagcggtgaacacaaccacaaccgatactttcatcggcggaaactgggaaaacggtactgctgctgcctggaaggcttatggcgctgctttctacgacagaaagctgagcgatagcgagctaatccaagtcgcagaacgcctgatcaagcgcgccaagtatctcggagtgacggtcaatggctaatttcacgtcatcattgatctcagactctgcgtctgagagcaaccaggctgggtggtggcacccgctggatagctttcagggggcggagtattacgggatttgtaaagaatatggggtcgccggtaagcaccaggtagaactggtaaaacgtgccgctgacggcacgttgacccgtagcctctgcaaaaacacggatggaactaccgccgaattcgacaatgatatcgggcataacaacccatctgtgatcgttgacggcgacgggtacatccacgtgttcacttcaatgcacatgaaccttctgcgctattttaaaagtgcagcgccaaatgatgttacgaatatggtggacgcgtcgtggaacttccccgacgtagactggacctatacttaccccacggtagccaggggaccggaaggtgacgtatacgtcatgatgcgccggtctaaccgtaccccggtaaacgataccaagcgtccgggggttgtttatcgctaccgtctggcctcgaaaacgtgggagcgctatgcccccgtagccgaagcagataaccgttccatctacccggacgatatgatggcgttcgccgatggcctacaccttctgttccagtgggcacattacccatcctctgccgttcgtcatgttggggaatatggcgtcattggtaccgatggactgatgagaacgataaataacacgcccctgccaatgccggtaacgcagggacagctggcgtataagccattgcagccgggtgaaaacccggcgataagtgacgggctgaaaatggggattcagtctgcgaaatttgcgtttgatggcgagggattgtcgcatatcacttaccgtttcagaaccgtggatgatccttccgggacctggttcagtaagttcggggtctacgttgcgacatgggcggggtctgcatggagcgagcagcagatcgcatatgtcccgccggagcggggaaacacatccgcagcactggcggcaactgttcagggtggaaagcggagggtgtatttttcggtggaatacacgtcttccgggaatacagtcgctgtcattgtcctggcggaaaatgcaggttctggatgggtctactcggtactcggcaacagcgcccccacacttctgcgcatggggtctgcaccaggaaacggcggtgatgtgctttacgtctcagcaccatttgaggctaaggtgtatcgctattttgtgccggaagattattccccggctcagcaattcacgagttttgaagctcttctttcaacgttactttgaaagtgtaaataaatgcggctgccaatgttatgactgccgcatcctacagaatttacagaacgctgatccccctcgccgcacagcgctcttttgccgcggcatagatattatccagatctgcggcagatactgcgctggtagagtacaggaactcataacagcgcagttctttagagtagcctgccgcgcctgtataggatgtgttaccagggccaatttttaaggcagcattggcgttttttgccgctgtcagtgtcagttttgtagccgcacctccaacgaaaactatcaggttgctgccgctgcgcgtgactgcgataaaaatattcgctcccgcgctcagcccgggcggtaccggtatggcctgcgatttggttgtgcccgtgccgctctctttataggcaaaaacaatttccccggcagaggaaatctgcaccgcttcacctgtcgagttatctgtagccccaccaagcacctgagaagcagctcctgaatactgaatgacgttacaccaggtatagatgctggtatctccccattcagtctggaggccatttttcagtgcgcccgcactggcaggtaactgtacgtaattgtcaccgtacattatggtcaacgttggatcggcttgcgtcatggcatgagcgccgtcgtaagagattagactggcagatgagccgccaaacaaccagttgaagaagccaggctgcggagtcaccgctgagatcacccggctgacgtcagactcattcagatattccgcatcggaaaacgggacttcaaaattaaggcgagtgaatagatacggcatcagatggcttccttataaaagcagcagcaatagttcttcagctggtacgcattgccagctgcatcatgcagatcagtggttgagttgtctgagtcacagaggtttccacagataccgctgttgactccggcgttccatgacggatagcggcctgccccgtcagatgcgccacggttgagcggcgtccagccataaccgagatagacttttccggtgaatggggtggcgctggtgactttcaccttgtcgcctccattcaattgaacggaggcgatctcaagacgttccaacacattgggatcggacgtctcttgccacagctcaaaaccctttgctccggacgggtgttcggggacaatgtcagtcctgaactgaaggttgccgaccgggacatgaaacgccgccaccacggtatttgagccaactttataaatgtcgatcggatacagaggcttccacggttttccgttttccatccagtatcggatcgccttggcgcggaaaaggccaagccagcggtagccgtggttcgtcagatgcacgccgtctgtataagggaaaatatacatcggggtacacaactgaatcagcgggttactgattgcctcatcgagctgagctcgcggaatatcagagctcgggttgactaatccctgatatcgtccctgagacgccatctgataaataatcatcggcatatcagaggttgcgcgcgaaacactcttggctttgtcgttgattgaggactgcatcaaaaccattttgctacggtagtaagagtaagaactaccgagatacgcatccgcctccccctggaagaatgtcagaactggtaacccgtactgatagccagccgatgctgcaagctgtgccgctttatctatgctggacatgagctgggtgtaaggttcagtccctggttcgagctgagccatggaataaccactcacgccagacgccgcagccatatactttctgtctggtgctggcgaatcatattccagctgatgaatcaggctcgtatcgtgatattgctgcgttgttgtgtcgggtacggtgaccagtgaggtgagtgttttgttatacgttacgatccccgtatcaaacataaatgcgttggttaccggggtgagtattccggcgccagcgttcaggctgatggaaagactttgtccgaatgcgcgacagtccacaaactcaggccagtattgcgggggggtgtaactggcgtcaccgccggtgccgacctttttaccgaacaggtattccgcctgctcagataatcgcaactcccgaacaatacggccggcactgtccgccagaagaattatcctgcctgcatcacttccgttgtaggaccatgtttcagatcctgcctccctggcctcatccacttcgccctgtcgcggtacctcattcccgaacacaaccagtttctgcttttcgatatttagtttgacaagtttccttagcgcattatccgccaccagaactacctctgttttgtcatcacggtcgtcccgccatgtgtcgctcagcgaatctgataacgtaatccgcatctgattgagcgagtcgatatctccctgcataccatcaacgtaggcctgtgacggcatcctgcgcccggtggcagtcagcgtcccggctacattcatgtactcgtcagccagcgcactgccgtccgggctacgcacgtaggttgtggagttcaccggaatattcgctatatccgcctgggccgctgccagcgtcgcatactgcttgctgagcggaatgatgttctgccgtatctcatcatttttcgccatcatctgacgccatgaataaagaggctcaccaccacggtcggggacatctgcggcgggcccattgaccagcttatccaggcgctcggcgttatcgagcaacacagcgggagacgtgctccccagctccgggttaaaggccatgttttttgctccaaaaagaggcttcgcccaaacgagggtttgagcgaatggccgcagctttttacaatcagctatttcaacgggttacaacatgctgattggctatgcacgggtctctacaggggatcaaaacctcgatttacagaaaaacgcgctgatccgcgcagaatgtgaactggtttttgaggatatggccagcgggaaaaatgcccggcggccagggttaaagcgagcgctgcggcggctccgcccgggggatgtgctggtggtctggaagctggatcggcttggccgcagcgtacgcgatctgattacgctcgtgtcggagttgcaggcgcgcggggtgaatttccgcagtcttactgacagcatcgacacctcgacgcctgcgggacgtttcttcttccacgtcatgagcgccctggcggaaatggagcgcgagttgattgtggagcgtacccgagccgggttagccgcagcgagggagcaggggagagtcggcggccgccgccgggtaatgactgaagaagtggtggagcggtgccgcagaatgctggagaacggctctacccggcagcaggtggcagatgtcatcggggttggggtgaagactatttataagtacttcccagcgggataaggaagcccgcccggtagccgtatgcaagagctacccggcggacagatgcccggaatggacaccgtgaatgattgtattggctgctcagtttataaaccagtcatcagccgtttcccaggcgtctttcagagtagtctctacaaactccttagcaatttccttatcagtcgcccacaaaacgctcagcccatcattactggccgttttcacgatcacttcaacatcgtcatattgcttactgacacggcgggtcatctcgtctttcaaagcctccagtgaaccctttggcattttcccggctttctctttggcaatgctgatttctacacgcatgatcaacacctcgatttactggctggatatacagttgtattgctgtaagtatatccagtgtatgcctggtgtctatgctttttaggtgtgtatttttgttacgattatttacaaatagaaaaccccagactgtgaaatctggggttcttttgaagtgcacgtgcattttgcgtgcatatttttgtctttatttggtctgcttaccgtctggtcggtgtccgtaagtgactgttttaactatcactgtctggttgcagtcctatctaaagtggtggagctggcgggagttgaacccgcgtccgaaattcctacatcctcggcactacatgcttagtcagtctttacattcgcttgccagctgcggacagacacgccactaacaaactagcctgattagatttaacgcttcaaccccaggcagggcatccacgcgatctcttttgggtttgacctctctttgatccccgtcttaagagcggaagctagggagagagggctcagagcaggttattaagctgctaaagcgtagttttcgtcgtttgcgactattttttgcggctttttacgaggccaaccgcccctcggcatgcaccttgggtttcgcaaatcccgtcgaatccagaatcagccccaatgtgtaggtcaagtataacagatttgtgaatgtcgttaccagccccatcacgcaggattatttcagcagggtggacgaaaaagcagcatcaacaaggatatagcgtaagggccagcgagagctggccctcggggaggggaaattaacgtccggcgtgcttcataatacgcgccttatccagcgcccattcacgatctttcaggtcggtacgcttgtcgtgctgtttcttacctttggcgacgccgattttcactttgcaccaggcgttcttccagtacagcgacagggcgacgacggtgtaaccttcgcggttaatgcggccgtacagcgtgtcgagttcgcgctggttgagcagcagcttacgggtgcgcgtcgggtcgcagacatagtgggtggaagccacggccataggcgtaaagttggcgccgaacaggaaggcctcgccatccttcaggatgacatagctatcgccgatgttggctttgcctgcacgcagggatttgacctcccagccctgcagggcgagaccagcctcgtattcatcttcgataaagtattcgtgacgggcgcgtttattcagcgcaatggtggctgatccaggtttgtgggcttttttcttagtcataatgtcctgaagtcatcgtcttatacacagttacctcgatcgcatcctgcgaggtgtactgcgcatcttagcacgagttgcggcacagcgttttttttagcagcagataaatgatattatttgcactgtgtttaaatgtggaacctgctatgcctcagattagccgtactgcgctggtgcctttcagcgcggaacagatgtatcaactggtaaacgatgtgaagtcctatcctgattttctgccaggctgcaccggtagccgcgtgctggaattggggccgacgcaaatgacggcggcggttgatgtgtccaaagccggcatcagtaagaccttcaccacacgcaatacactgaccagcaaccagagcattttgatgagcctggtggatggcccgttcaagaagctgattggcggctggaagtttattccgctgagccccgaggcctgcaaaatcgaattccatctcgatttcgagtttactaataaactgattgagatggcttttggccggatcttcaaagagctggccgctaacatggtgcaggcgttcacttcgcgcgccaaagaggtttacagtgccggctaatattcgtgttgaagtcgcctacgcgctgcctgaaaagcagtatctgcagcgggtcaccctggacgagggggcgacggtcgagcaggcgattatcgccagcggtctgctggcgctgcgtgatgacatcgatctggcgaaaaacaagctgggtatctacagtcgtccggtaaagctgcatgacgaagttcacgacggcgaccgggtggaaatctatcgtccgctgatcgcagacccgaaagagctgcgtcgccagcgggcagagaaaagcgccgcaaagtaacctgcagcagaccggctatcagccataaaaaaagcgctcaccgagcgctttttgcttttccgggccttactgactggtcagcgcaggcttgttatcaatgttagtcaacacaccgccgctgttgaaggtcagggtcagggtctgctgagtcactttctggtggcccggctcctgacggaagacatagaaccaggtattggtgccgaacggatccgtcatcattggcgtccccagagcataagctacctgctgttgcgtcataccgacacgaatttttgctacatcgtttggtgccagatagttaccctggttgatgtcaggacggtaaaccactcgttccagagtggaacagcctgcggtcaacataagaagaaccgctgcggcagcagtcagcgttttacagcgcatagtgatttgattcctttttgggcccgagcagtacgtggctcatctgtaatatgccgataataatagaccttcgcgccgttggaaacctccggctgcaggtcagcaggcaatttgctgttcactatgaccctgtgaaaatcaaaaagtttacgccgcaagcaactctttcgcgttcgccagggtgttgcgcgtgacttcgctgccgcccagcagacgggccagctcctgcaagcgagcacgtttatccagcggctgcatatgggtttcggtcatctcgccatcggtctctttgcagacaaagaaatgatggtggccgcagcctgcgacctgcggcaggtgggtcacgcacatcacctgcgtggactcgcccagctggcgcagcagcttgccgaccacggcggcggtcgggccgctgatgccgacgtccacttcgtcgaagatgagcgccggggtttccattttacgcgcggtgatcacctgaatcgccagcgcaatgcgcgacagttcgccgccggaggccactttggcgattggctgcagcggctgaccggggttagtggtgacgcggaactcaatatggtcggcgccgtcggcggtgagatggcgttcatcgaacgcgacctcaatcgcgaagaccccgtgcggcatcgaaagtgagtgcatactttcggtgataagctgggtcagctcgtcggcgctggcctggcgcagggcatgcagctggcgtgcggtctccagcgccagctgatgatgttcgaccacctgctggctgagggattccagcgagccggcgctgtcgtccagcaggcgctgctcttccagcatcgcctgataaaccgccggcagctcttccggcatcacttgatgtttacgcgccagcgcgatttgtcgggaaatccgttgctcaagttcaaacagacggttcggatcgagatccagacggtcatggtagtggcgcaactcgtcgctggcctcgctaagctgaatggccgcctcttccagcatatccaggacgccggaaagcttgctgtccatgcccaccagctcgctgaccagctgcttcgcggtataaagctggctctgcagattggcctcttcgccgtccgccagtaccgtaagggcgtgctggcaggtgctgagcagctggccgctgttggccaggcgcttgtactcttcgtcaatctgctcgaattctcccggcagcgggttaaattcgttcagctctttaagctgatactgcagcagatcggcgcgggcggcgcgctcctggctctgctgctgatgctgggccaactcgcggcagctctggtgccactggcgatagtgctcggccatacgctgagtaagcgcatactcaccggtatagccgtcgagcagcgttttttggtgttcgggtttggtcagcagctggtgggcatgctggccgtggatctggatcagcagctggcccagctcgcgcagctgcgagagcgggacggcggtgccgttgatgaagccgcgcgagcggccgtcggcgctgatcacccggcgaagtaaacactcacgcccgctctccagctgattctcttccagccagcgctgggcggcaggggtatctttcagcgcgaagcgcgcgcacaggtcggcacgggtggcgccgcgacgcaccatgtcggcttccgctctgccgccgaggcacagccccagcgcgtcgatggcaatggatttcccggcgccggtttccccggtgatggcggtcatgccgctgtggaaatcaatttccagttcacgaacgatagcaaaattactgatggtgagttgcgccaacatagctgccttcctgtatgaaaaaccaatactgtgttttcgtacagtatagactggttttttatccagtaaagaggcagccgtgaaaatcagaacaattttttcgaccagccgagcttggtgcttaatgtattgaaatagctgtaatctttagggtgaatcagattgaggtgataatcacagcggcgaatgaggacatcttcgccatcctggatcggcagggcaatctggctgtcgcagctgatctccagatcgctgcagcggtgagagaagcgtaggcggatggtgctgtcgccgttgatcaccagcggtcgcgctgaaagggtgtgcgggaacatcggcaccagggtgatggcgtccagcgacggcgtaaggattgggccgccggccgacagcgaataggcggtggagccggtcggagtggagataatcaggccatcggatcgctgagagaacgcaaagacttcgtcgatatagacttcgaactcaatcatatgcgccactttgccggggtgcagcaccacttcgttgatggcggtgctgatacgtttctggcaatcctgctgacacacctgggcctccagcagaaagcgtttctcggcgatgtagtggccttccagcacgtcggcgagctgctgcagggcgttgtccgggtcaaggtcggtgagaaagccgaggttgccgcggttaatgccgatgacgttaatgtcgtaacgggccagggtccgcgccgcgccgagcatattgccgtcgccacccaccaccaccgcgagatcggcctgttggccaatctccgccagcgtgccggttttcacgttgctgagctgaagttcatgggcgatctgctgttcaaccagcacttcataccctttgctgcacagccagcgccagagcatttcatgtgtggtcagggcggtggggtgacgaggatgtcccacaatgccgatacacttgaaatggttcttcatgatctggatgtccttgcgttaaatgaaatagtgacaatctgtccgcttcccttgaaacccggaaactgatccccataataagcgaagttagcgagatgaatgcgaaaaaaacgcggagaaattcatgagtagtaaagaacagaaaacgcctgaggggcaagccccggaagaaattatcacggagcagcacgacgacgttgaggcagtagagcctgaagtttcggctgagcaggtggatccgcgcgatgaaaaaattgcgaatctggaagcccagctggctgaagcgcagaaacgtgaacgtgaagtgatgctgcgtgccaaagccgacgaagataacctgcgtcgccgtaccgagcaggatatcgagaaagcgcacaaattcgcgctggaaaaattcgtcaatgaactgctgccggtgatcgacagcctggaccgcgcgctggaagtggccgacaaggctaatccggagctggcgccgatggtggaagggatcgaactgaccctgaaatctatgctggacgtagtgcgtaagttcggcgtggaagtgatcgccgacaccaacgttccgctggatccgaacgtccaccaggccattgcgatggtcgagtctgaagatgtggcggcgggcaacgtgctgtccgtgatgcagaaaggttataccctgaacggccgtactattcgcgccgcgatggtgacggtagcgaaagcgaaataacgcttgctgccttgctcaacggctgcctgcgggcggccgttttttgtgtcatcgctgctggcgcgagataaaaaaacggcgggccgcagcccaccgtgatattacttccttcgctcgcgctactccgcgacgctctcgcgtaatgatttcaccggcatcactttcacctgtttgatcatgttgtcctgcacgtcgaggatatctatatcgtactgctcaatgcgcacgcgggtgcccgggaccgggatctcttccagcgcttcgaggataataccgttgacggtgcgcgcttcatcttccggcaggtgccagttaaacgctttgttgatttcgcgaacgttggcgctgccgtcgataatcaccgtgccgtcgttaagcggggtcacttcctccgccagggtgggtgacatggaggtggtgaagtcgccgacaatctcttcaagaatatcttcgacggtgaccagcccctgaatatcgccgtattcatcgaccaccagaccgactttctttttattacgctgaaatttcaccagctgggtgctgagcggcgtgccttccggcacaaagtagatctcatctgccgcccgcagcatgatctcttttgtgaactctttcttctccgtcatcagacggtaggcttcgcgaacgcgcagcatgctgatggcatcgtccagcgaatcgcggtagagcacgatgcggccatgcggggagtgggtcagctggcggacgatagatttccagtcatcattgatatcgatgccgacaatctcattgcgcggcaccatgatgtcgttaacgctgaccttctccaggtccagtaccgacagcagcatatcctgattgcgtcgtgagatttgtgaacgggattcattcacaatcgtgcgcagttcatctttgctcagggcgctgctgatgacggtatcggtgcggatgcccatcatgcgcatcagtatgcgggtgatggtattcagcagccacaccagcggcatcatcagcacctgcaggggcgccaacaggaagctgctggggtaggcaaccttttccggatagagggcggcgatggtcttcggcagcacttcggcaaataccagcaccacaaaggtaagtacgccggtggcgatcgcgacgccggcgtcgccgtacaggcgcatgccgacgatggtgcccagcgccgaggcgagaatgttgacaaggttattgccgatcagcacaaggctaatcaggcggtccggcttgcgcagcagcttctccacgcgcttggcggggcggttgccttgtttcgccatgtggcgcaaccggtagcggttcagcgtcatcatgccggtttcggaaccggagaaataggcagagataatcaccatgacgatcagcgttatgatcagcgtggtggtggagatatgttccacgtaggattccttaaaagacttagctcacgaactgctgcagcacgcggctaccaaaataggccagcgtcagcagaccggcgccagcgacgctgaaccagaccacacgacgtccgcgccacccttcatgatagtgcccccacagcaggacgatatagacgaaccacgcaataatcgacagcaccgctttatcgatattttcgctgctgaacagattgtgcatgtagaacaggccgctgcacagcgtcagggtcagcagcaccacgccgacctgggtgatgtggaacattttgcgctcaatgctcatcagcggcggcatttcgctgctgaaggccagctttttattcttgagctggtagtcgatccacgccagctgcaacgcatacagcgcggcaatgatcagcgtggcgtacgagaagagcgacaggccgatatgcaccagcatccccggggtggtttccaggtgggtgatatattcgttaggcacgaatgtggcgaaagccaggttgatcagcgcgaaggcatagacgataggcagcagcagccagccgcgattgcgcgaggccacgatagtcatcaccgtacagatcatcaggctgaccagcgacccgacgttcagtaagctgagattttgcccgctctcgccgccggggaatatccgtgcttccagcgcaaaagcatggcagatcaaggcgatagtcgcagataaaatcgccattcgccgccagctgctgtttttttgcagcaagccggggataatcagcgcgaggctgacggagtaggcgacaagggcgagtagagcaaaaacaggcataggtgtcggctgttggctaaataagaaagagaagcagtataacgttagcaggcctctgctccaaccgttgcagcacattcagattgatgtcgtgttatactccgccacattcgttttgtgtgtcgctgcggcgaccgaccgtttccacctcaggcgagagacaatgtttgataatttaaccgatcgtttgtcgcgtacgctgcgcaacattagcggccgcggacgccttacagaagacaatattaaagacaccctgcgcgaagtgcgcatggcgctgctggaagcggacgttgcgcttccggtggtccgtgatttcatcagccgcgtcaaagagagcgcggtcggccatgaagtcaataaaagcctgaccccgggtcaggagttcgtcaaaatcgtccgcaacgagctggtggcggcgatgggcgaagagaaccagacgctcgacctggccgcgcagccgccggccgtggtgctgatggcgggcctgcaaggtgctggtaaaaccaccagcgtcggtaagctggggaaattcctgcgcgagaagcacaagaagaaagtgctggtcgtttccgcggacgtttaccgcccggcggcgatcaaacagctggaaaccctggccgagcaggtcggcgtcgatttcttcccgtctgacgtcgggcagaagccggttgatatcgtcaacgcggcgctgaaagaagcgaaactcaaattctacgacgtgctgctggtggataccgccggtcgtctgcacgttgacgaagcgatgatggacgaaatcaagcacgtccacgccgccattaacccggttgaaaccctgttcgtcgtcgatgcgatgaccggtcaggatgcggcgaataccgcgaaggcctttaacgaagcgctgccgctgaccggcgtggtgctgactaaagtggacggcgacgcccgcggcggcgcggcgctgtcgattcgccatattaccggcaagccgattaaattcctcggcgtcggcgagaaaaccgaagcgctggagccgttccatccggaccgcgtcgcttcccgtatcctcggcatgggcgacgtgctgtcgctgatcgaagatatcgagagcaaggttgaccgcgcgcaggccgagaagctggcctccaagctgaagaagggcgacggtttcgacctcaccgacttccttgagcagctgcgccagatgaaaaacatgggcggcatggccagcctgatgggcaagctgccgggcatggggcagatcccggacaacgtgaaagcgcagatggacgacaaagtgctggtgcgtatggaagcgatcatcaactcgatgaccctgaaagagcgcgctaagccggaaatcatcaaaggttcgcgtaagcgccgtatcgccgccggctgcggcatgcaggtgcaggatgtgaaccgtctgctcaagcagttcgacgacatgcagcgcatgatgaagaagatgaagtcgaaaggcggcatgatgaagatgatgcgcgggatgaaagggatgatgccgccaggcttcccgggtcgttaaaaacaagggcataaggttatcttgtttgccattttagcgccggggtgtgctcgccatcctcacgtactacctgtacgttacagtggttgcgcacacgctggtactaaactggctgcaccgccgacggccttttacagcagacttatcaactgctgattgcattttccccagaaatcagtaaaattttcgggcttttaatatgacaccgggctccgttcctcgatggggcccggttgttttattcacacaagaggatgttatggtaactattcgtttagcacgtcacggcgctaaaaagcgtccgttctaccaggttgttgtcaccgacagccgtaatgcacgcaacggtcgcttcatcgagcgcgttggtttcttcaacccgatcgctaacggtgcggaagaagaaactcgcctggatctggatcgtatcgctcactgggttggccagggcgctactgtttccgatcgcgttgccgcgctgatcaaagccgctaacaaagcagcttaatctgtcacggtggtcatgatgagcaagcaacacaccgcgcaagcacctgttgatccgatcgtattggggaaaatgggttcttcctacggtatccgtggttggctcagagtgttttcctccaccgaagacgccgaaagcatttttgactatcagccctggttaatccagaaggcgggtcagtggcaggtcgttgagctggaaagctggcgccaccacaatcaggacatcatcatcaagctgaaaggtgttgacgatcgtgatgccgcgaatctactgactaattgcgaaattatcgtggattcatcgcagttgccggagctggaagagggtgactactactggaaagacctgatgggctgccaggtagttacgacggaaggctatagcctcggtaaagtcatcgatatgatggaaaccgggtcgaatgacgtgctcgtcatcaaggcaaacctgaaagatgcatttggtatcaaggagcggttggttccgttcctcgatgggcaggttatcaagaaagtcgatctcactacgcgtactatcgaagtagattgggatcctggtttttaaattctccggataaacggtaaaagacggcgctatgtggattggcataattagcctgtttcctgaaatgttccgcgcaattaccgattacggggtaactggccgggcagtaaaaaatggcctgctgagcatcgaaagctggagtcctcgcgacttcacgcatgaccggcaccgtaccgtggacgatcgtccttacggcggcggaccggggatgctaatgatggtgcaacccttacgggatgccattcatgcagcaaaagccgcggcaggtgaaggcgcgaaggtgatttatctgtcacctcagggacgcaagcttgatcaagcgggcgtcagcgaactggcaacgaatcagaaactgattctggtgtgcggtcgctacgaagggatagacgagcgcgtaatccaaaccgaaattgacgaagaatggtcaatcggcgattacgttctcagcggtggtgagttaccggcaatgacgctgattgactccgtttcccggttcattccgggagtactgggccatgaagcatcggcaacggaagattcctttgctgatgggttgctggattgcccccactatacccgtcctgaagtgttagaggagatggaagtaccgccagtattgctgtcgggaaaccatgctgagatacgtcgctggcgtctgaagcagtcgctgggccgcacctggcttagaagacctgaacttctggaaaacctggctctgactgaagagcaagcaaagctgctggcggagttcaaaactgaacacgcgcaacagcagcataaacatgatgggcaggcgtgagcccccaatatcagtttacccaggataagagattaaattatgagcaacattattaagcaacttgaacaagaacagatgaagcaggacgtaccttccttccgtccgggtgataccgtggaagtgaaagtatgggttgttgaaggttccaaaaaacgtctgcaggcattcgagggcgtggttatcgctattcgtaaccgcggtctgcactctgcattcactgttcgcaaaatttccaacggcgaaggcgttgagcgtgtcttccagactcactctccggtagttgacagcattgctgttaaacgtcgtggtgctgtacgtaaagctaaactgtactacctgcgtgagcgcactggtaagtctgctcgtatcaaagagcgtcttaactaagattcgctttcgcgacatcctgatagaaagggctggccagatggctggccctttttttatctttgttgtaaccatcgtgatgtaaatcatttacaatacgccctctatacggaggggcggtggtcagtaacagttttcagcaaacgacacctaaacggcgagccgcctggctggcgctgttggcgatcctgctgatcgtggtggcccccctgatctccgtctccctgcaaaaagaccccataagcgccatgcccggcatgcaccacgccatgatgatggatagctcgtccgcgagcatggcgcagatgcccgggcacaagatggcgatgatgcacagcacagacggcgctacgcataccggacacgaaatgctgctggaccatgccgaagcgtgtggctattgcgtgctgttagcccatgtcccggggctccttttcgcgctggcgctgttcgtcgccatgctcctgcggcgcattcgcctgccggtttctcgcccggtattaaagcactggcactactttccctggctctaccccgaaacccgcgccccgccgcggctgtctgctttttccctttaataaaaatcaatctgcgcaccgcgcaacaacctcttttgctttaaaaaaggaaaagtatgacaacctgcacctcgcgcgcggcatggctgaacctgctgcgtcgcctccatttctatattggtctgtttatcggaccgtttatctttgtcgctgccctgaccggcacgttgtacgtggcgacgccgcagctggaaaactggctctatcacgacgcgctgcatggccttgccgaggggactccgcagccgctcagcgcccagattgcggtggccgaagaagcgacccagggcaatctgcggctgctggcggtgcgtccggcgcctgcgttgggcgagaccacgcgcattatgtttgccgatccgggtctcggagagtcggaatcccgggctatttttgtcgatccgatcgcgctgcgggtgaagggcgatatgacggtctacggcaccagcggcatcctgccgctgcgccagtggattgattatgcgcatcgctctctgctgctgggcgacagcgggaggttatacagcgaactggccgcctcctggatgtgggtggccgcgctcggaggcattgccctgtgggcgatgacgcgtccaaaacggcggctgaataacgccctgcagaaccatcgtcggctgcacgtgacgctgggctggggcttactggtgggtatgctgctcttctccgccaccggcctgacctggtcgcaatgggccggcggcaatgtggacaaaatgcgggcagcgttcggctggctgacgccgcaggtcaatacccagctgcatggcgagatgccgatgacgcacgatccccatgccggacatcatatggatgcgatggccatggcccagcatcagccggcgctgcagttggcccagtttgaccaggcgctggcggcggcccgtcaggcggggctgaacgccagccggctggagatccgtccgccagtgtcagacgaccgcgcctggacggtgaatgagatcgaccgtcgctggccgacgcaggtggacgcggtggcgatcgatggcgccacgatgcaggtggtggatcgcacgcgttttgccgactttccgctgatggcgaagctcacccgctggggcgtcgatttccatatggggatcctttttggtctggcgaatcagctgctgctggtgggatttggctgcgcgctgtgcgttaccatcggggtggggtaccggttatggtggatccgccgtccgcctcaggcggcctgggatccggcgcattcgctgctgcaggcgtggctgtcgctcgcctggcctgcccgaagcctggtgcttgggctggcgtttgcccttggattggccatgccgttaatgggagccagcctgctgctgttcattgccgttgactacctgcgctggcgcgcggcaacggcaatgaggatgatgaagtccagcgactaagtgaagacttacggcgtgctgatgaccaccgttacccggcggttttcggcgcgcccggccgccgtgtcgttgctggcgatcgggtattttttgccaaggccgcgggtgactaaattactgcgtgggacatgagcgccttccgcccaggcatcggccacgctgttggcccgcttaagcgacagggcttcattgtagctatcttcaccataattatcggtatggccttcaaggcggctatgggtgatcccggtagccgccagccgcgaggccatcgtggtgatctgctggcggctgtcgggacgtagtcggtagtcattcttgtcaaacaggatgctatcggataagcccagggaccaatcgccattgctttcagtgaagccgtaagatttcatcgccgccacctgctccggggtaaattttccctgaggagcctggcaacctgtcaaaagcgccgccgccatcagggcggggacgaaatattttctgatcataatgagtcctttattatttcagcgtctgctggatacgttggtttttcatccgatacatattctgatcggcaagttcttgcagtgattccgcggtggcgtgctcccacgccagggcataaccgacgctcagcgagagcgtggcgctatgaccgttgtgcaggttgaatggcggaagaaattgttccgttagcgcctggcacagggcctgcacttctgcttccgagcgcacctcgcgcagcagaacggcaaactcatcgccgccaagacgccacgccagatggcgtttaccggcaaaagtcatcaggcggctggcgacctccatcagcactttatcgcccgccgcatgcccccagttgtcgttaatcagtttgaaattatcgccatcaagaaacagcaatgccgaggtttgatgatcgacttcattctgcatcagctcggcgagcgcgttacgaaaggcggcgcggttagccaggccggtcaacggatcgtgtaacgaactgcgcaacagctgcgcgtttttggcctgcagctggcgctgccagtcctccatttcccccagcaggctgttaaagtcctgggcgaaaagatggaactcctcgatacgctcctccggcacccgccgggagaagtggcggttttcacgtatatcatgcacgacctcagtgatgctctgcagggcggcgacgatcccccggtgtagggagtgggtcagcagcagggcgatgaacgaggcgagcagaatgctgccggtcagcaccagaatcgagataccgagaaagtggctaatcagttcatcaagcgcggtcaatctcagctcgccgatttgtttgccctggtgccagatgggctgcaccgtgggctccggaaacagccatttactgataagcccgctcacttgctctttgttggccagcggttcatggcgccacgcggcgaagtgctgcatctggccgtttagcacgattgcctgggagatctgcccttgcttgcccaacgacgcgagggtctcctctgccgccgcgctgtcgccaaacaccagggcggcttcgaggctgcgccccatggtcgcggcagtgagctcaagatttttctgcgcgtactgcttgaacgtgaagattgaggctgtactcagcagcagccagaccagcgtcatggagatcaccacgcttatcacgctaatgcgacggagcgcgcgtttgaaagtcgggcgcggagtctgtgaaaagtccttattcatgtggtttcttccgggcaagcatcaggacgtccgggttaacccgaaccccgctgtgcgtcagaacgtccagattaacggagaagcggacccggtcgtcattgatgatcaggcaaaacgcgctaccaattgaacaatccgtattttgttctgcgatgagtaacagcggcctcgggccatagcggcgagtgagttctgactgttcagtcggcgattcgctgccaaaataaaaaccatcgcaggtcgtttttaacgcttcttcacgattacgtactatcaccggttgatagggtaatgcatccggatcttcatgagccaggctatgggtgaagcgtgatgaggcaaaaatgcacagctttggcgctcctgttaatgacggccaacgggtgtaggtcacgatcccggaaacaatagcgcgaacatgttctgaaggtccggcagcaaaaacaggagataccgcgatgagaaaaaatacagtcaataaaagacggtgtaatactgtcattaacgcttccgtcaaagtcgccatagcgcgggaaaagccgctgccgatgcccggcgaagaataccactgttaataaaacccgtcattagatgcgccctttgctttgggacaattctcaccaggatttttcgtagtaccgataccgtgggtgcgcaagtttggcttgttttttctatgtgtaaatattgttatacgcatcgcgccattgtgagtggcaattaattcgtttgtgtaaattaaaatttacggaatatggattgaattctttactttgtgtggtatcgttacgtcatgccctctgaggcaacccttatcgcaaacgagctacacaggatcgcaatcatgcaaaaagacgcgctgaacaacgtacatattaccgacgaacatgtattaatgaccccggagcaactgaaggcggaattcccgctgagcgtcgagcaggaagcgcagatcgcgcacgcccgtcagaccatttcggatatcatcgccggtcgcgatccgcgcctgctggtggtatgtggtccttgctccattcacgatccggaagctgcgattgaatatgctcgtcggtttaaagcccttgccgcagaggtcagcgatagcctctacctggtgatgcgcgtctattttgaaaaaccccgtaccaccgtcggctggaaggggctgattaacgatccgcacatggatggttcgtttgatgttgaaggcggcctgaagattgcgcgtcgtctgctggtcgagctcgtcaatatgggactgccgctggcgacggaagcgctggatcccaacagcccgcagtacctcggggatctgttcagctggtccgctattggcgcgcgtaccacggaatcacaaacgcaccgcgaaatggcctctggcctgtcgatgccggtcggctttaaaaacggtaccgacggtagcctggccacggccatcaacgccatgcgcgccgcggcgatgccgcaccgtttcgtaggcatcaaccaggccgggcaggtctgcctgctgcaaacgcagggtaatccgaacggccatgtgatcctccgtggcggcaaggcgccgaactacggtccggaagatgtggcgaaatgcgaaaaagagatggcgcaggcgggactgaagccgtcgctgatggtagattgcagtcatgggaactccaataaagatttccgccgccagccggccgtggctgaatccgtggtcgcgcagatcaaagatggcaaccgctccattatcggcctgatgatcgaaagtaatatccacgaaggcaatcagtcctctgaacagccgcgtgaggcgatgaaatacggcgtctcggtgacggatgcctgcatcagctgggagactaccgaggcgctgctgcgtgaactggataaggatctccgcggccacctggcggcccgtttggtttaagaggaaagtatggttgctgaactgaccgcgttacgcgatcaaattgatgaagtggataaagcgttgcttagcctgctggctaagcgtctggagctggtggccgaagtcggcgaggtgaagagccagtatggcctgccgatttacgtcccggagcgcgagtcggcgatgctcgcctcccgacgtgaagaggcggctgcgctcggcgtaccaccggatctgatcgaggacgttctgcgtcgcgtgatgcgggaatcctattccagcgaaaacgacaaaggcttcaaaaccctgcagccgaatctgcggccagtggtcatcgtcggcggcggtgggcagatggggcgtctgtttgagaagatgttaacgctgtccggctaccaggtgcgtattctggaaaaaaacgattgggcccgggcggcggatatcgtcgccgatgccggcatggttatcgtcagcgtaccgattcacaccaccgtggagacgatcggcaggctgccgccccttccggcggattgcattctggttgaccttgcctcggtgaaagcggagccgctgcaggcgatgctggcggcgcatcagggcccggttcttggcctgcacccgatgttcggtccggacagcggcagcctggcgaagcaggtggtggtctattgtgatggccgccagccggaggcctatcagtggttcctcgaacaaatccaggtttggggcgcgcggctgcaccgcatcagcgccgttgagcacgatcagaacatggcctttattcaggcgctgcgccactttgccaccttcgcctatggcctgcacctggcggaagagaatgtacgtcttgagcaactgctggcgctctcgtcgcccatttaccgactggagctggcgatggtaggccgtctgtttgcccaggatccgcagctgtacgccgatattattatgtcatcggtaaacaacctggcgctgattaagcgctactaccagcgtttcggcgaagcgatcggcctgctggagcagggcgataagcaggcgtttatcgacagcttccgtaaagtcgaacactggtttggcgattacgcccagcgtttccagagcgagagccgcacgctgctgcgtcaggcgaacgataatcggcagtaaagcgaaaaagatgtatacaataaagccagcgaccgctggctttttttatagggatgacaacgatggctgaaccacaaccgctgtttgactacaccggatacctgccggaatgcccgacctggagcgaggcagagcaggccctctactgggctgatatcatggaatgtgaaattcaccgctacgatatccgcagcggagaacaccaggtgctgcagtttccagaggaggtcggctgttttgccctgcgcgagaagggcgggtttatcgtggcattgcgcagcggcatctggctgaccgacgcccacggcctgctgcggcggaaagtctgcgataacccgagcaacccggagctggcgcggtttaacgacggcgggaccgatcgcgatgggcgcttttatgccggtaccttctgggggcctggggattacaacggcgcgctgctgatgcgagtggataacgacctgcagccgaaagtgatccagtgtgacatccatggcgccaatggcctggcctttagcgccgaccggcgctggatgtatacctctgatacgccgaacgccgtgatctaccgtacgccgctggatgagcagggtgagcctggccgacgcgaagtctttcgccgttttcagccgggcgaagggatccctgacggggcggcgatcgacgtggagggatgttactggagcgcaatgttcgacggctggcggatcgcccgtttctcgccgcagggcgaggagctggaatcctacccgatgccggtacgttgcccgacgatggtctgcttcggcggggcggatatgaaaacgctctatatcaccaccacccgggaaaacatggaggacgatgagctggcgcagtatccgctgtcaggcgccatcttcaccctgccggtagcggtggcagggatgaagaaattaccgttccgcgaatgttaaaccggatccaccgggaccacgttttcgctagggtagcagccgaggaccttcatggagcgggtgatatccgccagctccttcagcgccttgcgcatgggcagcgaatccaggttggcctgaatatcgagataaaacatctcttcccagggattgccgtggatcgggcgggattccagtttggtcatgatcagattgtggttgcgcagcaccagcagggcttccaccagggcgcccgcctgctgaccggtcgccattaacagcgtggtcttggccggcacctggtcggagacgttcaccgctttgcgcgccaggacgaggaagcgcgtgatgttctgcgtctggttggcctggcagtgctccagcacctgcagaccatacagagcgccgcccgcttcgctacccagggccgcgacggccggggagttcgcctgcgccactttttccattgccgccgaggtgctctcggtatactcaatcttccagtgcgggtagcggctcaggtactggctgcactgctggaacggctgcggatggctgtaaacggtctgaattttatcggcatccgtcgaggtgctcaccagtacgcaatgatcgatagggatcgtcagctcgccaacgatcgacaggctggtgtgctgcagcagatcgtagacgtcgttgatcccgccggagctggtgttttcaatcggcaccaccgcgtaatcggcctggccggtttctacctgattaaaaatatcggcgaacttcgcgcagccgctctcaataaactgctcaaagtggcgagcggcgtactgacgcgccgccagatgcgagtaagagcccttgggaccgaggaacgccacgcgggccgaatgcgggttaattttattcagatgctgctgcagcagggtttgctgggtaagaacagagtcttcgataatcagctggaacaggcgggtgatatagtgcgcatccagattatggcgcttgccgatagtcatcaggcgctccagcagatcgcgttcgcggtcaatatcacgcaccggacgatgggaggccagtttggcttttccaacctcaacagccagtccgcggcgctccgccagcaaagcaagcagcttctcgtccagggcgcttatcttatcgcgcagcgccagtaatgggttttcctcggtcatagatgttgcctttgttgttatcaaataaaaaaggcctcccgggagggaggccttattgttcgtcttcgcattctttcttatacgacgaattgcctcccggtcaggggaaggtaaaaaagaatgcgaagaagaacgggacaagtttcatggtaaattcctttaggtagtggggattacagtacctgtactgttttcactctgtcaataaaaaacgcgcccgaaggcgcgtggcatgacacaacttaagttaaggattactcttcttcttccacaaagcctgcctctttcaccgacgtcgcggcgcggcgggcttcccctttgtgttgcactttattgagctgccgttccagcttgttgatcaattcgttaatggcggcgtacatatcttcatgacgcgcactggcaaccagatggccgtttggcgtgttgatggttgcatcagcgataaaaccctgcggctccttagacagaatgatgtgcgggttgattaaatgagtttgccacttatccagtttggcgagacggtctgcgacatgctggcggattgccggagtaatttccatttgtttactggtaatgttcattgtcataaattttacctcttgtctttcccgtcttggtgaatccagcatacctttcccaatgtcaaaatgtgtgatctaaatcacattttattgtcactttttgtcaacaaattcattttgtgagacagggcaggaagaagtgagattttacttgtcgaacccgataaagcaggccatatttgatgagttaacccggcgctaaaccgcttcagctcgtcgggaaacgtataaaaaaacggcagccagtggctgccgtttgcgatcgatgagtcaggctcaggtgttcttgctgttcgcggcgataatcttcgcgactttgtccgcctgagcgttcatttgcatctgacgataggcgttttccatcttcggcagggcatcgcgggtggcctgggtatccggataattacgcatcatcccttccacacggttaaccacggcaacccatgcgccacgatcggtgtagtaatccacgaccgacagctcatatttggccagacgatctttcaggaacaccatgcgtttataggcgtcagtggcgtactggctgttcggataaccacgcaccagtttggagaagtcattgaaggcatcgcgcgcgtgctgcggatcgcggtcggagcgatcaacgccgaagaagccctgcagggcgctgtcatccagggccatgttggtcaggccgcgcatatagatgacatagtcgatgttcggatgggtggggttcaaacgcatgaagcgatcgatagccgcctgagccagaggaagatcggcgtttttataatacgcataaatcagatccagctgtacctgttgggaataagggccgaatggataacgattatccaatgcttccagttgcgttatcgcctgtttccagttaccgtcctgcagtttttgctgggcggtcgcgtagatttcattcggcggattatcaggcacctcttccttagagccggagcaacccaccaaagccaggctcagtgtggcggctgccaccaggtatttcatgcgcgtcatgacgttttgacttcctcaaaatgtttatgcgggagaatctctgttcctgctcccgattaagaccagctacaatagcacactatattaaacggcaaagccgtaaaacccaacgttaaacgaagaagctgtatatggcacaacgagtacaactcaccgcaacggtgaccgaaaatcaactcggtcaacgcttagatcaggctttggccgaattgttccctgattattcgcgatcgcggataaaagaatggatcctcgaccaacgcgtattagtcaatggcaccattggcgataaaccgaaagaaaaagtgctggggggagaacgcatcgctatcgatgtggaaatcgaagaagaggcgcgcttccagccgcaggatattccgctcaatatcgtttacgaagatgatgacatcatcgtgatcaataaaccgcgcgatctggttgtacatcctggcgcgggcaaccctgacggtactgtgctgaatgcgctgctgcactactatccgcctattgccgatgtgccgcgcgcgggtattgttcatcgtctggataaagacaccaccggtctgatggtggtggcgaaaaccattccggcgcaaacccggctggtggagtcgctgcagctgcgcgagatcacccgtgaatacgaagcggtggcgatcggtcatatgaccgccggtggcacagtggaagagccgatcagccgtcacccgaccaagcgtacccatatggcggtgcatccgatgggcaaaccggcggtgacccactaccgcattatggaacatttccgcatccatacccgcctgcgtctgcgtctggaaaccggtcgtacgcatcagatccgcgtgcatatgtcgcatatcacccatccgctggtgggtgaccaggtctatggcggccggccgcgtccgccgaagggcgcgtcggaggagttcatcaccgcgctgcgtaaattcgaccgccaggcgctgcatgccaccatgctgcgcctgtatcccccgatctccggcattgaaatggagtggcacgcgcccatcccacaggttatggtcgagctcatcgaggcgatgcgcgccgattttgaagcccataaggacgatattgactggttatgacgaaactgattgtaccgcagtggccaatgcccggcagcgtggcggcctgtagttctacccgcatcggcggcgtgagtctgccgccctatgactcgctcaacctgggcgcccattgcggcgacaatctgcagcatgtcgaagaaaaccggcggcggatgtttgccgccggcggcttgccgtcttacccggtttggctggagcaggtccatggcaccgaggttctgacgctggacggcggaccctatccgtcgaaacgcgcggatgcctcttatagtcgtacgccagggaccgtctgcgcggtgatgaccgctgactgcctgccggttctgttctgtaaccgcgacggcaccgaagtcgccgcggcgcacgcgggatggcgcggcttatgcgaaggggttctggaagcgacggttgctcgtttcgccgataaagccgaaaatattatggcgtggctggggcccgccatcggtccgcaggcggttgaggtgggaccggaagtccgggatgcctttatggcgaaggacgagaatgcgcaccgggcttttcgtccggcaggcgaaaaatattttgctgatatctaccaactggcgcggcagcgtctggcaaacgtcggcgttgagcagattttcggcggcgatcgctgcacgctaagcgaaaaggatgattttttctcttaccggcgcgacaagaccaccggtcgtatggcaagtttcatttggctgatataacctagagaatcaagacgatccagaaggcaaacttatttttcgcatagttcaggtctttaaccttgaataattgagggatgacctcatttaatctccagtagcaaatttgacctgtttatgggaggagttatgcgtctggatcgtcttaccaataaattccagcttgctcttgccgatgcccagtcgctcgcactcgggcacgacaaccaattcatcgaacctcttcatttaatgagcgccttgctgaatcaggaagggggatcggtacgtcctttattaacctcggcgggcgtgaatgccgggaaactgcgcactgacatcgaacaggccttgagccgtttaccgcaggtggaaggcaccggcggcgatgtgcaaccttctcaggatttagtgcggatcctcaacctttgcgacaagctggcgcaaaagaaaaaggacaactttatttcgtcggaactgttcgttctggcggcgcttgaatcacgcggtacgctgaccgaccttttaaaatccgccggagcaacaaccgccaacgtgactcaggcgattgaacaaatgcgcggaggggaaagcgtgaacgatcagggtgccgaagaccaacgtcaggcattgaagaaatttaccgtcgatctcaccgagcgagccgagcagggcaagctggatccggtgatcggccgtgatgaagagattcgccgtaccattcaggtactgcagcgtcgtaccaaaaacaacccggtgctgatcggtgaacccggggtgggtaaaacggcaatcgtcgaaggcctggcgcagcgtatcgtcaacggcgaagtaccagaagggctgaaaggccgtcgggtattggcgctggatatgggggcgctggtggccggggcgaaataccgcggtgagtttgaagagcgtctgaaaggcgtgctgaccgacctgtccaaacaggaaggcaacgtcattctgtttatcgacgaactgcataccatggttggcgctggtaaagccgacggcgcgatggatgcgggtaacatgctgaagccggcgctggcgcgtggtgaactgcactgcgtcggggcgacgacgcttgatgaataccgtcagtacatcgaaaaagacgccgcgctggaacgtcgcttccagaaagtgttcgtcgccgagccttcggtagaagataccatcgcgattctgcgcggtctgaaagaacgttatgagctgcaccaccacgtgcagatcactgacccggctatcgtggcggcggcgaccttatcgcatcgctatattgccgaccgtcagttgccggataaagccatcgacctcatcgatgaggcggcatccagcatccgtatgcagattgactccaaaccggaagagctggaccgcctcgatcggcgtattatccagctgaaactggaacagcaggcgctgaagaaagagtctgatgaggcgagcctgaagcgtctcgatatgctcaacgaggagctggcggataaagaacggcagtactcggtgctggaagaagagtggaaagcggaaaaagcgtcgctctccggcacccagaccatcaaagctgagctggagcaggcgaaaatcgccatcgaacaggcgcgccgcgtcggcgatctggcgcggatgtccgagctgcagtacggcaaaattccggaactggagaaacagctggcggcggccactcagtccgaagggaaaaccatgcgtctgctgcgtaataaagtgacggatgctgaaatcgccgaagtgctggctcgctggaccggtatcccggtctcccgcatgatggaaagcgagcgtgacaaactgctgcgtatggagcaggagctgcatcatcgggtgattggccaggatgaagcggttgaagcggtatcgaacgccattcgccgcagccgtgccgggctgtccgatccgaaccggccgattggttcgttcctgttcctcggtccaaccggggtcggtaaaaccgagctgtgtaaaacgctggctaactttatgttcgacagcgacgacgcaatggtgcgtatcgatatgtccgagtttatggagaaacactccgtctcgcgtctggtcggtgcgcctccgggatacgtcggctatgaagagggcggttacctgaccgaggcggtgcgccgtcgtccttattccgtcatcctgctggatgaagtggaaaaagcgcacccggatgtgttcaacattctgctgcaggtactcgacgacgggcgtctcaccgacgggcaggggagaacggtcgacttccgtaatacggtagtcatcatgacctcgaacctcggttccgatctgattcaggaacggttcggcgagctggactacggacatatgaaggacctggtgctgggggtagtcagccagaacttccgtccggagttcatcaaccgtatcgacgaagtggtggtcttccatccgctgggcgagaaacatattgcctctattgcccagatccagctgcagcgtctgtataaacgtctggaagagcgcggatatgaagtgcagatgtccgatgaggcgctgaagctgctgagcgccaatggttacgatccggtatacggcgcgcggccattgaaacgtgctattcagcagcagattgagaacccgttagcccagcagatcctttccggtgagctggttccgggtaaaaccatcgagctggtagtaaaagacgaccgcattgtggcagtgcagtaaatcacaaaacgacaaaaacgggcccagcgggctcgtttttgtttaaaaaccaggcaagaattaaagctcaatacctgatttggttgaaaagtgagcggttgaattctttttttgaatttatccttgtcacttcagaattaccccctataatgcgcctccactgacacggaacaacggcaaacaagccgccgggccaggaggattcagcgacggaaatcgacgttgaaagccgacagagaaaagcaaaataagcgcttgactctgaatgaggaaaacgtattatacgggacctcgcgacagagcgctaaagcgcgtcgcaactgctctttaacaatttatcagacaatctgtgtgggcactcaaagtgacatggattcttaacgtcctaggacgaaaaatgaataccaagtctcaagagtgaacacgtaattcattacgaagtttaattctttgagcatcaaacttaaattgaagagtttgatcatggctcagattgaacgctggcggcaggccta

SEQ ID NO: 86 - DNA, 26515 bp, Unknown
  source: /note="Description of Unknown: MKP2_coc_1 Mutant Bacteria sequence"
taggcctgccgccagcgttcaatctgagccatgatcaaactcttcaatttaagtttgatgctcaaagaattaaacttcgtaatgaattacgtgttcactcttgagacttggtattcatttttcgtccgaggacgttaagaatccatgtcactttgagtgcccacacagattgtctgataaattgttaaagagcagttgcgacgcgctttagcgctctgtcgcgaggtggcgtatattacgctttcctctttcagagtcaacccgtttttcaggatttttctctgcaaccgaaccggctgtttgtgtgaagtgattcacatctgccgtgtcagtgggtgcgcattatagggatcccatttttttgcacaagccttttttcgatctttttttctgaatggtgatttttcacccttttcgccgtgtaattgcacgatttgctcaattttcaccgttttcaggggttgcacagggagataaaagccaccaaagtcttcttacgttcccgtattttgaggtctatatgtctgctcagctgcgcccctacaaagcatttttcccacaaatcggtcttcgcgtcatgattgacgcatccagcgttgtcatcggcgatgtcagaattgccgatgacgtcagcgtctggcctctggtggccattcgcggcgacgtcaactatgtatcgataggtcaacgcagcaatattcaggacggtagcgttctccatgtgacccataagtcctcttataagccggagggaaatccgctgatcattggtgaggatgtaactgttggtcataaagtgatgctgcacggctgcactatcggcaaccgcgtactggttggtatgggttcgatcttattagatggtgtcgtcgttggcgatgacgtcatgattggtgcgggcagtctggttccgcagaataaacagctggaaagcggctacctttactttggcaatccggtcaaacagatccgccccctgacagaggcggaacgggaaggactcaagtattcagcaaataactatgtgaaatggaaaaatgagtacctggatcaggataaccagatccagccctgagcatcttcctgaccatcgcggatcaatgcttctgcctcttcctctagatcccaacgatgttcctggaaggcggccagccactgcgctggcccctctgcgccgaaacgctgctgcaagatttggcctgaaattgcgcaggttaattgcatcccattcaccagcgcgggaaaaaccacgccctgccgttcggcatcccatgattcccggtcaggaaactgaatcgcctgattcatgcattcagttcctgctgcagcgtttcaatgaccggagcgatagccggcagaacgccgtgccatagcagaacagcatgggcggcttgcgccaccagcattcccagcccatcggcacagtggactgcgccatattgctggcaccagtgaagaaacggtgtcggccctttctggtaaaacatgtcatagcaatatacgtcagcgttgacaatagatgccgggatagctggtacatcaccgtctattccactggacgtcgcattgacgatcagatcgaatgtttccccggataaggtatccatctcccttgcgctaacgctcccggtatgggcgaagagagtggctaactcacgggcacgagaataggtgcgattcacgatcgtgacggcgcatcccagcgacagaagcggcaaaagaaccccgcgagatgccccaccagcaccaaccagcaggatccgttggcgtggcttaatgaatcccaggcgttccagatcgctcagaagaccaataccgtcggtgttgtcccccagtaaacggccatcttccaggcgtttcagggtgtttactgctcccgccagcgctgcgcgttctgtcagttcgtcggcacgcgcaaaggcttcctctttaaaaggaacggtgacgttggccccctttcctccttctgcaaagaactgattcagagaagagacaaaatcgtccagcggcgccagtacacgtccataaggatgagtaattcctaactggcgggcaaacagctgatgaatagcaggcgacttgctgtgcgcgatcggattaccaaaaacggcataggtttccatggttcacccctggcggaacagttcacccgtcagggcatcacggatttcagatgggttttgccggccgcccgtggcgccatccaccaccgggaagctgtcgccaaactgagcatggacctctgcggtagtacggcacggtggttgcccggtgagattggcgctggtcgaaaccagtggttttccgtaggcttcgcacaattcgattaccagcggatggttagtcacgcgtacggccagtgaatcaaaacgtccagtcagccagcgcggcgtttcaggacgcgccgggaatacaaacgtcaccggtcccggccagcaagagaagatggcttcccgctgtgagtcacttaaccgtgaatcatcaatatagggcttcagttgctcaaagctggcggcgataaggatcaatcctttctcaacaggacgctgcttcagctccagcaggcgcataacggccgtttcgctgtcagggtcgcagccgacgccaaacacggcttcggtgggataggcgatgacatgttcatttttcaggaccgccacggcatgggcgacggcttctgagggcaggttattgttcactgatttattccgccgggatcggctttccacattgtttactggcacagaagcgtctgagcccctgcgccgtcttcttttctattaacagcgggtaatggcattcagggcattcgcccgccgccggtttaaaattgataacgaactggcaatcaggatagcgatcgcaggagtgaaaggttttaccgaaacgggaacgacgctggaccagatggccttgtccgcactgcgggcaagcgatagccgtctcatcgggtttatcaatcagctcggtatgttcacattccggatagcggctacagccaatgaacatcccaaaacgcccctggcgtaacaccataaccgcaccgcacgatgggcactcttgcccctccagcaccttaacgatatggccgtccgcctggcttttcaggggacgaatatagtcacagtccggataatgcgaacagccgagaaacgggccatgtttcccggaacggatcaccagttcggccccgcactgcgggcagggctcatttttacgcaccgaaaacagtgctgatttggtcataacaactcgatgttgctgcaaaaagattaatgcagcataccttcatttacttcgaagagtaattcttccatttgctgataggcgttttcacagcccggaatattgaacagtaccatcaggatgacccatttcaggtcttccagctcaaattccgccgtatccagcgccagtacgcgctctatcaccatttctcgcgtttcgaggttcaacacctgaatctgctcgaggaagagtaaaaacccccggcaactggcatccagacgctggcactcctcttcggtatatacccgaagagagagcgggtcggaagcgagctgcatgggttcaacgagaccttcctgataatcagccagtttctcgagccacattaacgcgttatagatgtcttcccgctcaaaacccgcatcggtaagatcccgcgtcagtttgtcctgatccacgcgcatttctgcttcgctatggatgtaagtttcaaacaaatacatgagtacgtcgaacatggcttgccctccttaatcggacatagccgccgggtacagctgcgatccagcctgctaactccagttcaagtagctgagctacggttactggcacagattggccggcacgttcagcgacaacgtcaacaggtgttacctcatctcctacgttagccaggagctccggaaatggcaatgctacagacggctgatcgacgcaaatatttatcgaatcagacgtatcagtcagccaggccagctcgttatgccagtattccacaatatcctctggcgaggtcactggcaccgcaccttgcttaattaaccagtgcgggccttccgatcccggattgcctaccgggccaggcagggcgaacacatcccttccctgctccagggcgcagcggacggtgaccagcgatccgcttcgcaacgccgcctcaatcaccagcacgcccaggcttaagccgctgataatccggttgcgcctggggaaatgtgcgggaagcggcggcgtaatgagtggaaattcagataccagcgtaccgccattgtcgatgatctgccgggcgagggttgcatggcgccgcggataaacctgactcagcccattgaccagtaccgcgatagttttaccctccgccgccagcgcgccgcggtgcgcgaccccgtcaatgcctaacgccagcccactggtgatggtaatccctttatgcgccagcgtttcgctgaacagtttcccccagcgggcgccataccaggagtgcgagcgactgccaataacggcaagctgcgcgctgtgaagcagggcgaggccgccgctgaccagcaacgcgccggggtaatcagcgatagcctttaaccgcaatggatagcgcggatcgtcaccccgtaacagatgatgatccggttgttccagccagcgccgcgtctcgtcaagctcatgctcgtcaagccggaaaaataactttgcctgcgccgcggtcatcccgatggcatgcagcgcttcacgatcaacgctggcggctgcgcataagcgctgagcgacctctaccatcctgtcgccatacaagctactgaccttcatcagccgcagccaaatctcgtcgggcgtcatccttaccccctgccataagcggtattgacaatctttgcgattggacagtgagactgtcaattgcagggggttttgtctagaatagagctaataatcttatcaactcctgaatacgactctggaactttatggcagttttgcaagtgttacatattccggacgagcgccttcgcaaagtcgccgagccggtcaaagaagtgaatgcggaaattcagcgtatcgtcgatgatatgttcgacaccatgtacgccgaggaaggcatcggtctggccgcaacccaggtcgatatccatcagcgcattatcgttattgatgtgtcggaaaatcgtgaagagcagctggtattaattaacccggaaatgctggagaaagatggcgaaaccggtattgaagaaggctgcttgtctattcctgaacagcgcgccctggtgccgcgtgcggaaaaagtgaagatccgggcactggatcgcgatggtaagccgtttgaactggaggccgatggcctgctggctatctgtatccagcatgagatggatcacctggtcggcaaactgtttattgactatctgtcaccactcaaacaacagcgcattcgtcagaaggtagagaaactggatcgtttacgttcccgtgcctgataacaaggaataccgtgtcacaatcactacgtatcattttcgccggcacccctgattttgcagcgcgtcatcttgatgcgctgctgtcgtctgaacatcaggttgttggcgtattcactcagcctgatcgccctgctggtcgcggcaaaaaattgatgccaagcccggtaaaagtactggcagaagcccataacttacctgtgtttcagccatcctccctgcgtccgcaagataaccagcggttagtcgccgatctcggcgccgatattatggtggtagtggcgtacggtctgattctgcctaaagcggtgctggagatgccccgtctgggctgtatcaacgttcacggctcgctgctaccgcgctggcgtggcgcagcgcctattcagcgttcactgtgggcgggggatagcgaaactggcgtaaccattatgcagatggacgtcggccttgatacgggggatatgctgtataagctttcctgccccattaccgcagaggataccagcggcagcctgtacgataagctggccgagctcggccctcaggggctgctggcaacgttagcccagctggccaacggcaccgcacggcctgaagtacaagatgaatcgctggtgtgccatgccgaaaagctgagtaaagaagaggctcgtatcgattggtcgctttccgctgcgcagttggaacgctgcatccgcgcgtttaatccgtggccaatgagctggctggaaattgacggacaaccggtaaaagtgtggcgggcatcggtcatcgccgaagccgctcacgccgaaccgggtactatcgtggcagcaaccaaacagggtattcaggtcgccacgggggatgggatcctcagcctggagtcgctacagcctgcgggtaaaaaagcgatgagcgcccaggacttactcaattcccgccgggagtggtttatccctggcacccgtctcgcctgacggtcgtctcttctgaagcccgggttcgccgggcatttttatttttgcgcttatgaaaaagaatataaatttacgcagcctggccgcccaggctatcgaacaagttgttgaaaaagggcagtctttaagcaacgtactgccccctctacagcagaaagtcagcgataaagataaagcgctactgcaggagttgtgctttggtgtactacgtactctaagccagctggagtggcttatcagcaagctaatggcgcgtccgatgaccggcaaacagcgcaccgtgcactttctgatcatggttggtctctatcagttactctacacccgcattcccccgcacgccgcgctggcggaaacggtagaaggcgcggtggccattaaacgcccgcagcttaaagggctgatcaacggcgtgctacgccagttccagcgccagcaggaagcgttgttagccgaatttgctgagcatgaaaaccgctatcttcatcccaaatggctgctgaaacgcctgcagcaggcctggccggagcagtggcaggagatcgtcgatgcgaacaaccagcgcccgccgatgtggctgcgcgttaaccgcaaccatcattcccgggatgagtggcttgccctgcttaacgaggccggtttagagggcttcacccaccctgattatccggacgccgtacgcctggccacccctgccccggtccacgcgttaccaggatttgatgaaggttgggtaaccgttcaggacgcctcggcccagggctgtatgcgctacctgcaaccggaaaatggcgaacgcatcctcgatctctgcgccgcgccgggcgggaagacgacgcatattctggaagtcgccccccagtctcaggtcatggcggtggatattgatgaacagcgtctgtcccgcgtctatgacaacctgaaacggctgggcatgaaagccgaagtcaagcagggcgatggccgcttccctgagcagtggtgtggcaatgagcagttcgatcgtattctgctggatgccccctgctccgcaaccggcgttattcgccgccatccggatatcaaatggctgcgccgggatcgggatatcgccgagttagcccagctgcaggccgagatcctcaatgccacctggacgcacctgaagcctggcggcacgctggtttacgcaacctgttctattctgccggaagagaacagtcagcaaattgccgccttcctcgcgcgaaccccggatgcagaacttcacgccaccggcacgccggcgagccccgggcagcaaaatctgccgggcgtggaagaaggtgatggcttcttttacgctaagctaatcaaacgtcggaactaatgggtcactgcagatgaagattattattctgggcgccggccaggtcggcggcacgctggcggaaaacctcgtcggcgagaacaatgatattacgctggttgataccaatggcgaccgtctgcgcagcctgcaggataagttcgacctgcgtgtcgtccaggggcatggctctcaccctcgcgtactgcgcgaggcgggagccgatgatgccgatatgctggtagcggtcactagttcggacgaaaccaacatggtggcctgccaggtcgcttactcattgttcaatacgccaaaccgcatagcgcgtattcgtgcgcctgattacgttcgtgatgcggaaaagctcttcaactctgaagcggtacccatcgatcacttaatcgctccggaacaactggtcatcgacaacatccaccgtctgatcgaatatcccggcgcgctgcaggtcgtgaacttcgccgaaggaaaagtcagtcttgcggtagtaaaagcctattatggtggcccgctggtggggaatgccttatccactatgcgggagcatatgccgcatatcgatacgcgcgtggccgccattttccgccacgatcgccccatccgcccgcagggttcgacgattgtcgaggccggagatgaagtcttctttattgccgcctcgcagcatattcgcgcggtcatgagcgaactgcagcgactggaaaagccgtataagcgtattatgctggtcggcgggggcaatattggcgcgggtctggcccataagctggaaaaagattacagcgttaagcttatcgaacgtaatcagcagcgagccgctgagctggcggaaaagctgcagcatactatcgtcttctacggggatgcatcggaccaggagctgttggctgaagagcatattgaccaggtggacctgtttattgccgtcactaacgacgacgaagccaatattatgtcggctatgttggccaagcgaatgggcgcgaaaaaagtgatggtgctaatccagcgcagagcctacgtggatctggtccagggtagcgtcatcgatattgcgatttcgcctcagcaggccacaatttccgcactcctcagtcatgtccgtaaagccgatattgtcggcgtctcctccttgcgccgcggcgttgcagaagcgattgaggcagtcgcgcacggcgatgagagcacctcccgggtagtcgggcgttcgatcgatgagatcaaacttccaccgggcacgatcatcggcgccgtcgtgcggggcaatgacgtgatgatcgccaataataatctacggatcgagcagggcgaccatgtgatcatgtttttgaccgataagaagtttatttccgatgtcgaaaggctgttccagccaagtcctttcttcctgtaattcccagggcgccgaacaggcgcctttttattatcccttattattcaaaggttaatattttgcagtaactatctgctgggaatggcaaatgaaaatacatttgttaaacttacaacgtcagctggcacaaggagaataaaatgagttttttaaaagagtttcgcgaattcgcgatgcgcgggaacgttgtcgatttggcagtgggtgtgatcatcggtgcagcattcggtaaaattgtttcatcactggtcgcggatattattatgccgccactcggcctgttgattggcgggatcgattttaaacagtttgccgtcacgctacgtgatgcccagggcgatgtcccggctgtggtgatgcattatggggtattcattcagaacgttttcgatttcatcatcgtcgcgtttgccatcttcatggcgattaaattgatgaataagttaaatcgtaagaaagaagaggctccggcggcaccgccagctccctctaaagaagaagttctgctgagcgaaattcgcgatctgctgaaagaacaaaacaaccgttcttaatcagcagagaaagcagaaggccagtggtaaaaaagcgattcgcttgcttgccactggcctcccgatcaattcttcctgcatgtttatctttacgttgatagcttcctttccctttcttgtttttctctacgcgctgcctgaataacggatcgtggagaagtgcctcaatggcgttatctttaatttgtcctttagtatgctgatagcgactcatagttactccggtatatgtataaactcggcgcgagtgtagatccgcgcgtttaaaaaatcaacgtccgccattgccgttgctggccccttgttcaagggcctcaaggatagaacagtaaacgctgctgtgggcagtgccgcaacaggcatcgttgagccgctgcagagagcggcgcatcgtctgtagctctttaatccgcgcctcaacttcacttaatcgcgcctgaacgatccctttcgactcctgacaggtatgatgctccggatcgatgcggatcgacaataattcgcggatcgcttccagggtgaaacccagttgtcgggcataacgaataaagcgcagccgttgaagatcgttatccgagtacagacgaaatcctccctcggtgcgtatgtcatgatccatcatctgctgcttttcatagtagcggatggtatcaggcgtcacgtcagccagttttgccaattcaccaatacgatacatatttactcctgatttattttttgcagcaacgcatcggcgtactcaccgcgtaaaaagtcggtgttcagacctgcctgacgtaacttcagctcgagcagggcaaggcgtttgctaagttcggcatgacgcggatcgtcctgacggacgccgttcaataagtctgccagagccaacgcctctttgcgttgctccagttccggagggagacatcctgcatttttcagaaggcgatagcctgcccgcaactccgccggcacatgtgaatcgtcatcgagagtcagcggttctccgctgccgggtaaattatcgaactcacctttggtttgggcatcgaggatatgacgttccgcccactgatccagcaaccacattctacggctccaggggatgaacaaaaagagtacagatagtgtagtgaaatggggatggggtagatataaaaaaacccgcctgggcgggtttttttacgttactacagattactctgcagcagcttctgctttcggctcagcacgatcaaccagctcgatgtatgccatcggcgcgttgtcgcctgcacggaagccacacttcagaatgcgagtgtaaccaccggcgcggctcgcgaaacgcgggcccagctcgttaaacagttttgccacgatctcgttatcacgagtgcgggcgaatgccagacgacgattagcaacgctatcagtcttggcaagagtaatcagcggctcaactacgcgacgcagttctttcgctttcggcagggtcgtcttgatgatttcatgacgaaccagcgaacctgccatgttacggaacatagcctggcgatggctgctgttgcggttcagttgacgaccactcttacgatggcgcatgaccttatccttctcagtaaaaccttaacctgtgatccggttactcgtcagcaatgcttgctggtggccagttttccaggcgcatgcccagagacagtccacgggaagccagcacgtctttaatctcagtaagagattttttacccaggttcggcgttttcagcaactcaacctcggtacgctgtaccagatcaccgatatagtggatagcttctgccttgaggcagttagcagagcggacagtcaattccagatcgtcaacagggcgcagcaggatcggatcgaattctggtttctcttctttcacttctggctgacgtacatcacgtaggtcaacaaaagcttccagttgttcagccaggatggttgccgcacgacgaatcgcctcttcaggatcgattgtgccgttggtttccatttcgatgaccagcttgtccaggtcggtacgctgttctacacgcgcagcttcaacattgtaggcaatacgctctacagggctgtagcaggcgtcgaccagcagacggccgattgggcgctcatcttcttccgaatgaattcgggcagaagccggcacataaccgcgaccgcgctgaactttgatacgcatgctaatagcagcgttctcatcagtcaggtggcaaatcacgtgctgcggcttgacgatttcgacatcaccgtcgtgggtaatgtcggctgcggtcacagggccaatgccagatttattcaaagtaaggatgacttcatctttaccctgaactctcaccgccagccctttcaggttgagcaggatttcaaggatgtcttcctgaacgccttctttggtgctgtactcgtgcagtacaccatcaatctcaacctcggtcaccgcgcaacccggcatcgatgagagcagaatacggcgcagtgcgttacccagagtatggccgaagccacgctctaaaggctcaagggtcaccttggcgtgcgtcgaactcacttgctcgatatcgaccaggcgcggttttagaaactctgtcacagaaccctgcattgtgtcctctctttggtactaagctttacttggagtaaagctcgacgatcaggtgttcgttaatgtccgcagacagatcagaacgctccggctgacgcttgaacgtaccttccatcttgccagcatcaacttccagccaggttggcttttcacgctgctcagccagctccagagcggctttcacgcgagattgctttttcgctttctcacgaatgctgacaacgtcattcgctttaacctgataagaagcgatgttaacaacacgaccgtttaccataatcgctttgtggctaaccagctggcgtgcttcagcacgagtggcgccgaagcccatacggtatacaacgttgtccagacgaccttccagcagagccaacaggttttcaccggtgttgcctttcagacgtgctgcttctttatagtagttacggaactgacgctccagcacaccgtacatacggcgaactttttgcttttcacgcaactgcacaccatagtcagacagacgcggcttacgcgcaccgtgctggccaggagcttgttcaattttacacttggtatcgatcgcgcgaacgccagacttaaggaataagtcggtgccctcacgacggctcagcttgagcttaggacccaaatatcttgccattttctttctccaactaacctggaaaacgcagcgttatacgcgacgttttttcggcggacgacaaccgttatgagggatcggagtcacatcagtaatattagtgatgcggaaaccagcggcgttcagtgcacgaatggtagattcgcgacccggacccggacctttgaccataacttccagattcttgatgccgtattcttttacggcttctgcgcaacgctctgctgcaacctgagctgcgaacggagtggatttgcgagaaccacggaaaccggaaccaccggctgttgcccaacccagtgcgttaccctgacgatcagtgatggtaacgatggtgttgttaaaagaagcatggatatgagccacgccgtcagagacttgttttcttacacgcttacgtgcacgaattggtgcctttgccattattcaatcaccccgattatttcttgatcggtttacgcggacccttacgggtacgtgcgttggtcttggtacgctgaccgcgaaccgggagaccacgacgatgacgcaaaccacggtagcaaccaaggtccatcagacgcttgatgctcagggtgatttcacggcgcagatcaccttcaacgacaaatttacctactgcttcacgcagaatatcaatttgttcttcagacagctcactgatcttaacattttcagcgatgcccgtttcagcgcagatggctttagaacgggttttgccgataccgaaaatagcggttaaagcgataacggtatgtttgtgatcaggaatgttaatgcctgctatacgggccactatgcactcctactatttaatatgtacgcaccatgctgaaaagcccgttttcaggatactcaaatggaaacgtacagacatacaaaagattggctggctaatctagccagctcaatccaactttgcaagaaaaatatgcgaaaaaatcagccttggcgctgtttatgcttcggctcggcactgcaaatcacacggatgacaccatcacgcttaacgattttgcagttacggcataatttcttgacggaagcacgaactttcatttttactctccgtaacttctcgggcgaccagttttaacggccgtagcctttcaggttcgccttcttcaatgcagactcatactgactggacatcatcagagtttgcacttgagccataaagtccataatcacgacaacaacgataagcagcgaggtcccaccgaagtagaacggcactttcatcgcgtcacgcatgaactccgggatcaggcagataaaagtaatgtacaacgcaccaaccagagtcaggcgagtcatcactttatcgatatacttcgccgtttgctctcccggacgaattcctggtacaaatgcaccggacttcttcaggttatctgctgtttcacgcgggttgaaaaccaacgccgtgtagaagaaacagaagaagatgattgcagacgcatagagtaacacataaagcggttgcccaggctgcaaatacagcgaaattgttgtcagccagttccaaccagtaccacccccgaaccatgacgtgatggttgccgggaacagtataatactggaagcgaagattgccgggattacccccgccatattcactttcagcggtaaatgtgtgctctgtgcagcatagacacgacgaccctgttgacgtttcgcgtagtttaccacaatgcggcgttgaccacgctcaacgaatacaacaaagaaggtcactgcaaatactaatactgcaaccaacagcaacaggaggaagtgcaggtcgccttgacgcgcttgctcgatagtatgggcgatggccggcgggagtcccgcaacgataccggcgaagataatgatcgagataccgttaccgataccacgttcagtgatctgttcgccgagccacatcaggaacatagtccctgtgaccagactgacaacagcggtgaaatagaatgcaaagcctggattaatcaccaggccttgcataccaggcatattcggcagaccggtagcaataccgatcgactggaatatcgccagcaccagagtaccgtagcgggtgtactggctgatcttacgacgaccagactccccttctttcttcagttccgccagcggttgataaaccaccgtcagcagctgcacgatgatcgatgccgaaatgtacggcataatccccagcgcaaagatagaagcacggctgagagcaccaccagagaacatgttgaacatttcaatgatggtgcctcgctgttgctcaagcagtttggcaagtacagcggcatcaataccagggatcggaataaaagagccaatacggaacactatcagcgcaccgaccacaaacagaagtctgcgtttcagttcgccaaggccacctttggcactttgaaaatctaatcccggttgtttagccatctgctacttattcctcaattttaccgccagcagcttcgatagcagcacgagcacctttagtcacacgcaggccacgaacagttaccggacgagttacctcaccagacaggatcactttcgcgaactcgatctggacaccgataatgttagccgctttcagcgcgttcaggtctactacatcgccttctacgtgagccagatcggagagacggatctctgcggtgatcatcgctttacgagaagtgaagccgaatttcggcagacgacggtacagaggcatctgaccaccctcgaaaccgcgacgtacgccaccgccagaacgagatttctgacctttgtgaccacgaccaccggttttaccgaggccagaaccgataccacgacccaggcgtttacccgcctttttggagccttcggccggagacagagtatttaaacgcatctcttactcctcaactttaaccatgaaggaaaccgcgttgaccataccacgaacagcaggagtatcctcgcgctctacggtgtgaccaatacgacgcagacccaggccaagcagcgttgccttgtgtttcggcagacgaccgattgcactgcgggtttgagtaattttaatagtctttgccatggtttatttccccagaatttcttcaacggatttaccacgcttggcagcgaccatatccggggacttcatgttttccagaccgtcgatagttgcacgaaccacgttaattgggttagtggaaccatacgctttagccagaacgttacgaaccccagcgacttccagaacggcgcgcattgcaccaccggcgatgataccggtaccttcggaagccggctgcatgaatacacgagaacccgtgtgagtacccttaaccgggtgctgcagggtgccgtggttcagcgcgacgttaatcatattgcgacgggctttttccatcgctttctggatcgctgctggaacttcacgcgctttaccgtaaccaaaaccaacgcgaccgttaccatcgcctactacagtcagagctgtgaaggagaaaatacgaccacctttaacggttttagatacgcggtttaccgcgatcagcttttcctgcagttcgccagcttgtttttcgatgtgagccatcttacacctctaccttagaactgaaggccagcttcacgggcagcatctgccagtgcctggacacgaccatgatattggaacccggaacggtcaaaggaaacatctttgatgcctttttccagagcgcgttcagcgacagctttacccacagctgctgcagcgtctttgttaccggtgtacttcagttgttcagcgatagctttttctacagtagaagcagctaccagaacttcagaaccattcggtgcaattacctgtgcgtaaatgtgacgcggggtacgatgtaccaccaggcgagttgcgcccagctcctggagcttgcggcgtgcgcgggtcgcacgacggatacgagcagatttcttatccatagtgttaccttacttcttcttagcctctttggtacgcacgacttcgtcggcgtaacgaacacccttgcctttgtaaggctcaggacgacggtaggcgcgcagatctgctgcaacctggccgatcacctgcttatcagcgcctttcagcacgatttcagtctgagtcggacattctgcagtgatacccgcaggcagctgatgatcaaccgggtgagagaaacctaaagccaggtttactacattccctttgaccgctgcacgataacctacaccaaccagctgcagcttcttagtgaagccttcggtaacaccgataaccattgagttcagcagggcacgcgcggtaccagcctgagcccaaccgtctgcgtaaccatcacgcggaccgaaggtcagtgcattatctgcatgtttaacttcaacagcatcgttgagagtacgagtcagctcgccgtttttacctttgatcgtaataacctgaccgttgatttttacatcaacgccggcaggaacaacgaccggtgctttagcaacacgagacattttttcctccgattaggctacgtagcagataatttcgccaccaagaccagcctggcgcgctgcacgatcagtcataacacctttagaggtagaaacaactgcgatacccagaccggccataactttcggcagctcatcttttttcttatagatgcgcagacctgggcggctgacacgctgaatgctttctacaacagctttgccctggaaatacttgagagtaagttccagttcaggcttggtgtcgccttcaactttaaaatcttcgataaaaccttcttccttcagcacgttggcgattgccactttcagcttggaggaaggcatggtgaccgcagctttgttcgcggcctgaccgttacggatacgggtcagcatatccgcgatcggatcttgcatgctcatctgtctttactcccgtgattcaattggtgacaattaccagctagcctttttcagacccgggatttcaccgcgcatagcggcttcacggaccttaatacggctcaacccgaacttccgcaggaaaccatgcggacgacctgtttgacggcagcggttacgctgacgagacgggctggaatcacgcggcagagtctgcagcttgagaacggcattccaacgatcttcgtcggttgcgttcacatcagagatgatagctttcagttcagcgcgtttagcgaagaatttatcagctaaagccacgcgctttacttcgcgtgctttcattgattgcttagccattaagtaaccctaccttacttgcggaacgggaagtcaaaggcagccagcagagcacggccttcttcgtcagatttcgcagtagtggtaatggtaatatccaaaccacgaacgcggtcgactttatcgtagtcgatttctgggaagatgatctgctcacggacacccatgctgtagttgccacgaccgtcgaaagacttagcggacaggccgcggaagtcacgaatacgcggtacagcaatagtgatcaggcgctcaaagaactcccacatgcgttcgccacgcagagttactttacagccgatcggatagccctgacggattttgaagcctgcaactgatttgcgtgctttggtgatcagcggtttttgaccggagattgctgccaggtcagctgctgcgttatccagcagtttcttgtcagcgatcgcttcaccaacacccatgttcagggtgatcttctcgacccgagggacttgcatgacagaattgtagttaaactcagtcatgagtttcttaactacttcgtctttgtagtaatcatgcagtttcgccatcgtactactccaaattacttgatagtttcgctgttagacttgaagaaacggacttttttaccgtcttcgaatctaaagcctacacggtcagccttgccggttgccgcattgaagattgcaacgttagaaacctgaattgcagcttctttttcaacgatgccgcctggttggttcagagccggaaccggcttctggtgtttcttaaccaggttgataccttcaacaatgaccttgccggaagacaggacattcttaactttaccgcgcttacctttatctttaccggttaacacgataacttcgtcatcacgacggattttcgctgccatgattcgctccttagagtacttctggtgccagagagataattttcatgaacttctcggtacgaagttcacgagttaccggcccaaaaatacgcgtaccgataggctgctcgctgttattgttcagaataacgcatgcattaccatcgaagcgaatgacagaaccgtccgggcgacgaacacccttcttggtgcgcaccactaccgccttcagcacatcaccttttttgaccttaccacgcggaattgcttctttgatggtgatcttgatgatgtcgcctacgcctgcgtagcgacggtgcgagccacccagaaccttgatacacattacgcgacgtgcaccggagttgtcggcgacgttcagcatagtctgttcttggatcattttagtgctccgctaatgtcaactactactgagacccgaaaattagggtcgttaaaaagccccatatcgagggcgcggcattataacaccacaaaccagatatgggtagaaaaaataaacggctcatcgctgagccgtttatccgtatcgagaatgcgtactctattacagaaccgctttctctacaacgcgaaccagcgtccaggacttagtcttggacagcggacggcattcgcggatttcaaccttgtcgccgataccgcattcgttgttctcgtcatgtacgtgcagtttggtcgtacgtttgatgaatttaccgtaaaccgggtgtttcaccatacgttcgatagcaacaacaatggatttctccattttgtcgctaactacgcgaccttgcagagtacggattttatcggtcattacgcacccgccttctgagtcagtaaagtcttaacgcgtgcaacatcacgacgcacttgcttcagcagatgagtctgttgcagctggccacttgcagcctgcatgcgcaggttgaactgctcacgcagcaggttcagcagctcagcgttcagctcttcaacgcttttttcacgcagctcttttgctttcattacatcaccgtcttagttacaaaggtggttttgatcggcagtttcgctgctgccaggccgaatgcttcacgggccagctcttccggtacaccgtccatttcatacaggactttacccggctgaatcaaggcaacccagtactccacgttacctttacctttacccatacgaacttccagcggcttctcggtgatcggtttgtccgggaatacacggatccagatcttaccttgacgcttaactgcacgggtcatagcacgacgtgctgcttcgatctgacgtgcagtcagacgaccacggccaacagctttcagaccgaaagtgccgaagctaacatccgtaccctgcgccagaccacggttgcggcctttgtgcactttacggaattttgtacgctttggttgtaacatcagcgacgctccttatttacggcctttacgctgctgctttttaggttgagcagccggttccggttgttcaacagcagccataccacccaggatctcacctttgaagatccataccttaacgccgattacaccgtaagtggtgtgcgcttcagaggtgttgtagtcgatgtcagcacgcagagtgtgcagcggtacgcgaccttcacggtaccattcggtacgtgcgatttccgcgccgcccagacggccgctaacttcaactttgatacctttagcgcccagacgcattgcgttctgtacagcacgcttcatcgcacgacggaacataacgcgacgttccagctgagaagtgatgctgtcagcaaccagttttgcgtccagttcaggtttacgaacttcggcgatattgatctgtgcaggtacgccagcgatatccgctacgaccttgcgcagtttttctacgtcttcgcctttcttaccgataacgatacccgggcgagcggtgtgaatggtcacacggatgctcttagccggacgctcgataacgatgcgagatacagacgctttagccagttctttagtcaggaactgacgtactttaaaatcgctgtccaggttgtcagcgaattctttggtgttcgcgaaccaggtagagttccatggtttgacaatacccaggcgaataccattaggatgtactttctgacccattgctagtctccagagtctcagcgatcggacacaaccacagtgatgtggctggtgcgcttcaggatgcgatctgcacgacctttagcacgcggcataatgcgcttcatgctcgggccttcgtctacgaaaattttcgcaactttcagatcatcaatgtcagcgccatcgttgtgttcagcgttagcaatggcagattccagtaccttcttgaccagtacagcagcttttttgttggtgtaggtcagaatatccagggcctgcgacactttcttaccgcgaatcaggtcagctacaaggcgaaccttctgagcagaagaacgagcatggcgatgttgagctaaagtttccatctcttcctcctaccttatttcttcttcgcttttttatcagcagcgtggccgcgataagtacgagtcggtgcgaattcacccagtttgtgaccgaccatttcgtcggaaacaaatactggaacgtgctgacgaccattatggacagcgatggtcaaaccgatcatgttaggaaagatcgttgaacgacgggaccaagtgcgcaggggcttcttgtctccgctttccaccgctttctctaccttcttcagcaagtgcaggtcaataaaaggacctttcttgagagaacgtggcatggcttatcctctaaaattatttgctacggcgacgtacgatgaatttatcagtacgcttgttgctgcgggtcttcttacctttggtctgcaggccccacggggataccgggtgcttaccaaagttacgaccttcaccaccaccatgtgggtggtctactgggttcatcgcagtaccgcgaacggtaggacgaacaccacgccagcgtgcagcacctgctttacccagaacgcgcagcatatgctcagcattgccaacttcgcccagagtcgcgcggcagtctgcttcgactttacgcatttcaccagaacgcagacgcagggtgacataagcaccgtcacgagcaacgatctgaacgtaagtaccagcggaacgagccagctgaccgcctttacctggtttcatttctacgttatgaacggtagaaccaaccgggatattgcgcatcggcagggtgttgcctgctttgattgcagcatcaacgccagactgaatctggtcgccagctttcaggcctttcggggccaggatgtaacggcgctcgccgtctttgtacagaaccagcgcgatgttcgcggagcggttcggatcgtactcaagacgttcaacaactgccgggataccatctttgttgcgtttgaagtcaacaatacggtaagcctgcttgtggccaccaccgatatgacgggtggtgatacggccattgttgttacgaccaccggatttgctgtttttttccagcaacggagcaaaaggtttgcccttgtgcagctctgggttaaccactttaacgacgtggcgacgacccggagatgtcggtttacatttaacaactgccattgtattactcctccgacttactcagcgccgccaacgaagtccagattctggccttctttcagggtgacgtaagcttttttccagtcgctacgacgaccgatacgctgtccgtgacgtttaactttccctttaacaaccagggtgttaacgacttcgacttcgacttcaaacagtttctgcacagcagctttgatttctgctttggtcgcgtctttagcaactttgagaacgatggtgtttgttttttccatcgcagtagacgctttttcagaaacgtgcggtgcgcgcagcaccttcagcagacgttcttcacgaatcatgccagcatctcctcaacttgcttaacagcatcagcagtcattacgactttgtcgaaggcgatcaggctaaccgggtcgataccgttcgcatcacgtacgtcaaccttatgcaggttacgtgcggccaggaacaggttctcgtccagctcaccggtgatgatcagcacatcttccagagccatgtctttcagtttctgtgccagcagcttagttttcggcgcttcaacagagaacttctcgacaacgatcagacgatcctgacgtaccagttcggacagaatgcttttcagcgcgccgcggtacatcttcttgttaactttttgactgtggtcctgcggacgagcagcgaaggtcacgccaccggaacgccagatcgggctcttgatagaaccagaacgcgcacggccggtacctttctggcgccacggttttttaccggagccagtgatttcagcacgagtcttctgagcacgagtgccctgacgcgcaccggctgcataagcaacaacaacctggtgaaccagcgcttcgttgaaatcacgaccgaaggtagtttcggaaacagtcagcgcgctctgcgcgtctttcaatactaattccattgctatctcctcacgccttcacagctggtttaacgatcaggtcgctaccggtcgcacccgggacagcacctttaaccagcagcaggttgcgctcagcgtcaacacgtactacgtccaggctctgaacggttacacgctcattacccagctgacctgccattttcttgcctttgaacactttgcccggagtctggttctgaccgatagaacccggaacgcggtgggacaaggagttaccgtgagtagcgtcctgggtacggaagttccagcgcttaacggtaccagcaaaacctttacctttagaggtaccggttacgtcaacttttttaacgtcagcaaacagttcaacgctaatgttctgacctacggtgaattcttcgccgtcagccagacggaattcccacagaccacggccagcttcaacgccagctttagcgaagtgacccgcttccggcttggttacacggttagcttttttagcaccggtggtaacctggattgcgcggtagccatcgttagccaggtctttaacctgagtaacacggtttgcttcaacttcgattacggttactgggatagaaacgccatcttcagtgaagatgcgggtcatgcccacttttttaccgactaaaccaatcattgtttcaacctctcaatcgctcgatgacctgattaacccaggctgatctgcacgtctacaccggcagccagatccagacgcatcagagcatcaacggttttttcagttggctcaacgatgtcaaccagacgcttgtgagtgcgaatttcgtactggtcacgcgcgtctttgttgacgtgcggggagatcagaacggtaaagcgctctttgcgggtcggcagcgggatcggaccacggacttgcgcaccagtgcgcttagcagtctcgacgatttccgcggttgattgatcgatcagacgatgatcaaacgctttcaggcggatacggattctttggttctgcatgagaccagagctccaattattttatagacgaaatgattactcctcatacccattacgattgatgggagagtgtaaccgttcttacatagtcccccgattggggacattgtttgataacccaaatgcgattaccagggttcatattgaaccggccgtcaactttgacaggcccgcgcattatacgcaaattctggcgcgacgcaagtgctgtttagaaaatcatcaccaggatttgcgcgccttcgcattagcgcactgtacggggctgcaatgcggagtaagagggcggattgtgggctccattcccggaaaatgccttttgtgctgaacgggagaggatgagcatagtgacgcaatgttcatcgatcattgcggggtcaactatgctcgccgccctccccttcttgctgtgctatagcggtttgaccgtggcattatgccaccaggatctgcgccacggtctgttgcccgaccgttacacctgtcccctgctgtggagtggtttacttttttatctctgtctggcgccgcaccagctgcatgatgccgtctggggggcgatagcgggctatctctctttggctgcgatttactggctataccgcggtatccgcggctatgaagggttgggttatggagatataaaatatcttgccgccctcggcgcctggcatggctggcgattgctgccgcagttagtcctggttgcctcgctactcgccggcatagcgtgggcaggagcaggtttatacgccagttgcggcaggaagagcaaatggggaagaagcaacccgctgccgtttgggccattcctggcggccgcgggtttttggtgcgggtggcagacgctggctagtctgacactttgatctgcgactgcaggtaattttgcagaccgattttgccaatcaaatcgagttcggtttccagccagtcgatatggccttcttcatccgccaggatctcaatcatcatatcgcggctgacgtagtcatggacgctgtcggcataggcaatagcctcacgcaaattttgcgccccttccagctccagcctcaaatcggaccgcagcatctcttccacatcttcaccgatgccaagtttgccgagatcctgcagattagggataccttcgagaaaaagaatacgctcgatatacttatcggcgtgcttcatttcgtcgatggattcgtggtactcaatatcgttgaggcgcatcaggccccaatttttaaacattctcgcatgaagaaagtactgattaattgcgactagctcatttcccaataatttattgagataacttatgattttgacatcacctttcattatatagtccctccgcttccactcattgaagcgtagtccggcctatagggatgtcaaaagagaagcgtggacttcaggcgatttctttgaattccggcatggtggttaattcatcttccatcacttcacgcgcggcacgaacacacttaccgcattgatttcccacgggaacaaacttacgtaattgctgaaaagattgcggttgaaactggcgcacaacctgacgaatttttttatcgctgacgccattgcacaaacaaacgtacatagaaactcccgttcaatttatgcacaaatattaaatgagaatggttatgattacaatagaccatttgctcattatccgccgcaacgcacgatatgaatagccagcaaaaatccgtttttcgctgaatgacagacagcaaaaagggcgccgaaacgccctttttaattcaaagctaacgaattagcccagaactttagctacaacgcccgcgccaacggtacggccgccttcacggattgcgaaacgcagaccgtcgtccatcgcgatcgggtggatcagggtaacaaccattttgatgttgtcgcccggcattaccatctctacgccttccggcagttcgatggtgccag

SEQ ID NO: 87 - DNA, 20912 bp, Unknown
  source: /note="Description of Unknown: MKP2_coc_1 Mutant Bacteria sequence"
aggccgggccgatcgacgtcgaggtgtacgccaactacggctttgactcaaaggcggtggacagcgacgcgcgtctcgaagcctggcagggcgggctggtgctgagccacaccaacgacagcggggtaaacaaggtgatcctgcgctactccgacaactcggataacagcgtctacaacaaaaccgacgccctgaccacggtctacgccagcttcgagggcagccataagttcacccagcaggcgcagatcgagtatctgctggccttccatgactacgacaacggcaaggacaacaccgacaaccgtaaaaactacggtgccatcgtgcggccgatgtatttctggaacgacgtgcactccacctggctggaagcgggctaccagcgcgtggactacgaccagggcggggataaccacggctggaagctgacgctgtcgcagaacatcgccatcggcatggggccggagttccgtccgatgctgcgcttctacgtgaccggcggccaggtggataacgagcacaccgcgaaggtaaacggcacccaggaccagcagctggattcgctgaacgtcggcgggatgtttgaggcgtggttctgatgcgatagcgttgtcgaaggagcgttcccggctggcgctacgcttagccgggctacgactggcgcgctccatttatgccggatggcggcatacatgccttatccggcctacagaaaacctcccccccccaggaccggcaagcgcagcgccgccgggcagctggttcaggccaactccctcagttcaccgtcaggcgcagggccagatcctgcgggtaggggtcaaaatagttctgcgcctgcaggtagcgatccggatactcggccagatagtgcttaagcagcgtcagcggggcgaggatcggcagcagcccggcgcgatagttgaggatcacctcccgcagctcgccgcgctggcggctgttcagctggtcgcggaaataaccctgaatatgcatcagcacgttggtgtggtttttccgcgaggcgggctgcttgaggatcgccatcagcttctcgcggtaaacctcgaagaacgcctccagatcctcccattcatgcagcgaggcgacgaacgggccgatctcccggtagcccgcctggtgatgagccagcagctgcagcttgtagcggctgtgaaaggccagcaggctgtggcgggtcaggccgcgggcgcgcagggcgttgagttcatgcagggcgaaaacgcgctcgacaaaattctcccgcagcagcggatcgtgcagccggccatcctcttccaccggcagccacgggtagcgcgccatcagggcgccggtaaacagccccacgccttccttacgcccgcgattgcctttttcgtcatacagccgcacgcgctccatcccgcagctcggcgatttggcgcagacgataaagcccgacagctcacccagggttgcgaggtgggcgctggcgaaatcagccatcttctccgtcacatcctcgtgcggggcgtggctgaagcgcatgcggatctccccgaccggggtctgcaccaggcggagcgccgggcggggaacgggcaggccgatcgccatctccgggcagacgggtttaaacgccacccactgcgcgagctcatccatcacaaagcccatacgcttatgcccgccgtcgaatcgcacggctgagccggttaaacatccgctgatcccaatgacaggttgcgtgttcatggcgctgtcctctcttctgctgtggttcgggtaaagaaaagggtcacggtggcgaccgtaatgccgaatttcttcatctcggttttgttaaataaatggctgccgtcctgcaggaacatccagtcgtcaaagtgcagcagccaccggctgccgctggcctcgacgctcatgctgtagcgccagtgaaaggcattgcctgccgcctggccgctggccacgccttcgatatccccggcggtgccctgataacggttatcgccggtgcggcgaatgcgccatatccgctgctgcttctcgccgtcgtcatagacaaagcgctcatggagggtcagggtgtcgccgacgacgtcgccatcgatctcaacatggaagcggcgcagctgcttgccgctacgatcctgcaccatcccccacgcctcggttcggccctgaaaatagtgaaagatgtcgagggcgggctgctgctgccggtattcggtgacctcggtgctgcagccggcgaggatctgcatcagcagcgccaggccaagggtcagaatgcgtttcatggtgtacctccgatcaactgctgacgcagttcgggataagtggtgcgcggatcgagccagatggcgagaaagcgggtgctgaacgccgccgactggcgcgggccgagcggggtaaaggcggtctgcgcggcgctggcgcggtaccagaactgcccctcgccgccgctgaccacgaacgccagctggctgcccggcgcgacgtccggccagatcccctgcagcatgcgtagccaggcttcgctgcgcggttcctgctgcagaatgccctgcgcctgccactggtcgcgggtggcctccaccagcgcctcgcgatcgatgtcgcgccggtaggtgatgatcagcgcccgatcctgctgcgggccgtcataccggccattgggcgtgcgcagctgcgagtgatagatggtgaacggcccccaggtgagggtcgcctcgccgacgcggcgccacgtcagccagtcggcggcgtgggccgccggggcgaggatggtcagccacagcagtaacagggcgaatctcatttttgcctccccatccccagatggaataacagcatgagcaccagccagccgcaggccatggcggccacgccaagcgccatcggcaccagcagggtcatggctccgaggcgagcgccgatcaggtaggccaccgggccgccgacggtggcggccgtggccagcacccagccgggaagcgtcgcggtgcgggtcagtcgggtccagacgacggcgaacatcagccacagggccaccatccacaggggcagcaggctgtcgccgcgaaaatcgatcagtcccgccagcgcccagcaggcgtccagaccgcagcccgccgcggccaacagcagggcgggcggacgactggccgccggcaaccgcagccaggcgaaaatggccagcgtcagccagatcagcagaccgcgctcgcgcaacatcaccaccagcgtccagtaaacatcgaacgcgagggccatcagcagatgctgcgccgggcgtgtcatacccgctccgcggtgagctgcaccacgctgatggtgcgggcgttaaatccggcttcacagtagccgaagtagtagagccacatccggcggaagcgctcatcaaagccgagcttttcaatatcctgccaggcgtgggtaaagcgctgtcgccagtgcgccagggtgcgggcatagtccgggcccatgtcgaacaggttgcgtatcacaaaatcggtatggcgggtcatcagctcgctcattgccgtgatgctgggcaaaaagccgccggggaagatgtagcgctggataaaatcgacgcttttgctgtagtcgcgatagcgctgatcctggatggtgatcgcctgcagggccattctgccgcccgggcgcaggcgcgcctggcaggtgcggaagaaggccggcaggtagcgctggcccaccgcctcaatcatctccaccgacaccagtttgtcgtactcgccgcgcagatcgcggtagtcgcagagcagcacctcgacgcgatcctgcagcccggcgcgggccatgcgctcggtagcccagcggtgctgctcccgggaaagggtggtggtggtgacccggcagccgtaatggcgggcggcgtactcggccagcgccccccagccggtgccaatctccagcagatgatcgccgggagtgagcgccagctggtcgcacaggcgcgccatcttggcccgctgggcctgggtcagatcctgctggtcgtcggtaaacagcgcgctggagtagagcaggtcgtcatccagaaaatgggcataaaattcgttgccgaggtcgtaatgggcggcgatgttctcccgcgcctgggcgcgggtgttgcggcgggtccagtggcgcaggcgggcgacgggcttgcccagcagacggaagccgcgctccagacgccccagcacctcgccgttgcgcgcaaggatctgcagcagcgccgtcagctggtggctctcccagtcgccgtccatccaggcctcggccgccgccaggctgccgccggtcagcagacgccagtacacctccggcgtgcagacccgcacctcggcgcgcagcgcggcggcggggtcgccaaaatgaaaagtctgcgccccttcgcgcatggtgagcgagccttcgcggaggccgctcaacagacgaaaaagcagccagcgcgcgagccgcacgttgcgcggcacatcgggttcaagcgcaaagacgggatcggtcatgagcgttcactcctgctgacaggatggttgtacagcggcacgcgcttcagccacagccgcagcgcctgccagtagatggcgaggacggttttcagggtcatcagcggcagacgcagcagcagcccgcgcaggttggcgcgggtcaacggcacgcggctcagggccagggtggcgtcgaacaccttgctggcctgatggttttcaatatgcatgtgcagcgttttgccgggcgcgttgaagcgccagtgatagaccatgtccatcgggttaaagggcgaaacgtgaaaggctttctccagcgggcgcgcctgctggccgtccaccgcgtagtaatgacgctcattccacggcgtgttgcgcacttcggccagcacccagcgcagggtgtcggcttcgtcatagcagtagtaaaagttgaccggattaaaatggaagccgaagtagcgcagctgggtcaggagcatcacgcggcccgccgggcggcagccggtcaggctctccagccggttcagcgcctgggccttcagcggcgcgcccagcggataatcggcatcgtaccaggcggcggcggccaggcggttgcggcggatgcccgcctcaggcagcctgtccagttcgtcgaggtcgagccaggccataaacaggcggtagacgaagtggtgcgccttcggctgcaggcgacggtggcgcaggacgccctgatagaggcagctgttcatttcagttgccctccgccgcggcgatgccctgcaccacgtcgagcgcgctgcgcaccccatcctcatgaaagccgttgtaccagtaggcgccgcagtaccagctccgctgctggccgttaatctcttcgcgccgcaactgggccgaccagctttgcgggttaaacagcggatgctcatagacgaagcgctgccagacgtagcgatcgtccaccggcgcgtccgggttcagggtaacgcagaacaggggggcgcccgcgggcagcccctggagaatattcatgttgtaggtgacgcaggcccgggcccgatccccgtcgctcaggcgatagttccagctggcccaggcgcgctggcgctccggcagccagcgcggatcgctgtgcagcaccacctcgttacgctgccagccgatgtccccaaggacttctcgttctgaatcggtgggcgccgccagcatcgccagggcctgcgcggagtggcaggcgaagatcacctggtcaaaatgcgcctccccggacgccagccgcagggtgacccccgccgggtggcggtccacctgctgcaccggcgcgttgagccgcaggtccagacgatcgccgagcctggcgagcagggcgcgaacgtattcccgggaaccgccgggcaccacgtaccattgcgggcgatcgcgaatatccagcagaccgtggttttcaaagaagcgcaaaaacagcggcagcgggaagcggcgcatctcctgcagcgacgacgaccagatggccgcccccatcggcagaatatagtggcgggcgaagaaggggctgaagcggtggcgggcgaggaagctctccagcgtcgcgcctggatccagcgcctcggtcagcgccagtttcgccagccggttgaagcggacgatctcgctcagcagtccccagaaggccggcttcagcagattgcgccgctgggcgaagagcgaggtcaggctgtggccgttgtactccaggccgctggccgggttgtggaccgagaagctcatctgcgttttttgcccgccgatccccagctcgctgagcaggcccataaagcgcggataggtgcgatcgttgtagacgataaatccggtatcgatggcccaggtgccctgcggcgtggcgacatccacggtggcggtgtggccgcccggcgtggcgcccgcttcgaacagcgttacctgatggtgtccggccagtcgccaggcgcaggtcagcccggcgatgccgctgccgatgatggctatgttcatgagcgcaccatcctgcgcaacagcaggcgctggatacccgatggcaggctggccagcagccgcagggccaggctgaagccggtggggaaggcgatgtggtttttgcccttcgccagaccgtggcggatcgccgccaccgcccgatctacgctcacccgaccgggcatggcgaagtcgtttttgcgcgtcagcggggtgtcgacgaagcccggaaagaccaccgtgacggcgacccctttcgactcccagtccagacgcaggctgttagcaaaccagctcagcgccgccttggaggcgccataggcttccgcgcgcgggaagggcagccagtgcgccatggagctgaccagcaccacccgatcgcctgcctccagctgcgtctgcagcgccgccaggcagttcaccggcccgaggaagttggtggccatcacccgctccacgagggcggcatccacctgtccgtggtcgaggtattcgcaggtcccggcgcagagaatgatcaggtcggcaaaacagcctgtcagcgcctggcgacaggcgtccctgtctgtcatatcgaacaggcgtacgctgatgttggggctgaactgctggagcgctgccaggcgcgacgcatcgcgcccgcaggcgatgaccagatggccatccgccgcgaaggatttcgccaggccggcgccgatcccggagctggcgccggtgatgagcaccgtcatcatgagcgcaccctccgcttcacgccgcgtaccgcccagcccagcaggggaagatgctcgtagatcatctccccggcgtcgtagtagtcgcgctgatggagaacctgctccccggcgatgtccaccaccgagcagcccggcagggccagggtttctccaccggcaatgcgcggatgcgaccagtgcatggtccaggtcacggcgaaccgctggccgtcgcaaagcggcgtgtcgatggtgaaccggcactgctccacgttggccagcagatgggtaaagtagcgctgaatggcgaacagcccctgatgctgaccaaaaggatcgctcagcgtcgcgtccggatggtacagcgcggccagcgccgcgggcggctgtgcatccagcccggcgtagtactcaacgaaacgacgaatcacggacggcgaggtgctcatggatcacatcctggctagatacggtagcgtaatggcatacttaaaacttacacaaataaaattatttgtccaagtttgtagaaaaatatattttatttgtgttaaaaatcatgttgttatgattggtgttttaaggagtgaaaatcacgggtggtgcaaagggcaagcgtgagcccgccgcgccaccgggcgctggcggaacagagcgtggaggtaagtgaaaacagggggttagagcgggatcacctcgagggagacgacctgctgctgccagagttcgacctgcctctggcgggcggcggaaagtttgccgctggtgaccagcagccagttgcgctgggggaaaatctccggcgccagggcggcgggtggcaccggcaggacgtcgatgcgatggccctggccggtacgtttgagcgcctcaagccagatttcgcaggcgtcggtcaggtgccagccggtgatcagaaagttgtccccgggcgccttcttgtcgccttcgaggcaaaacgaggtataggcgatgatgatgccgtcgagaatttcgcgcagcgtcatgatggccggcacgttggcggagacctggctgcgcagcggacgcagcacctcggttaccagctcctggcgcggatattcgcgcccggcgtcgtagatcagctggcgcagagactcgatttttccctctttcagtcgctgcagcatggtctcctgcagcgtcagccagttattggtgcgccgcgcgccggggcgcgacagcaggggtttcacctggctgaccggcaccccttttttcacccagtcgaggatcttcagcgcctgctggacgtcgtcatcgctgtacagacggtgtccaccatcggtgcgcagcggcttaagcaggccgtagcggcgctgccaggcgcgaagcgtggtcgcatttatcccgcatagtcgggcaaattcgccgatggagtaaggcatggggaccacctgttaacaaagaatattctcaatatactacgaatcacgacggctggcgtgaagtgtagtggctttgcactacactttccccaaccgcgtaaatgaaaggagttctcatgaagctatggcctgttgtcaccggcgtcgctatcgcgttaaccctggtggcctgcaaatcgcccacgccgccgaagggcgttcagccgattagcgggtttgacgccagccggtaccttggaaaatggtatgaggtcgcccgcctggagaatcgcttcgagcgaggcctggagcaggtgaccgccacctacggcgcccgcagcgacggagggatcagcgtcgtcaaccgcggttatgacccggtcaaaaaacgctggaatgagagcgacggaaaagcctacttcaccggcgcccccaccaccgcggcgctgaaggtgtcgttcttcgggccattctacggcggctataacgtgatccgcctggacgacgactaccagtacgcgctggtcagcggccccaaccgtgactatctgtggatcctgtcgcgcacccccaccattccggcggcggtgaagcaggattacctgaataccgcgcgcgagctgggctttgacgtcgatcgcctggtgtggatccgccagacgccgcgctagcctcgccgcttagcggctgagcagatgggtataaaccacgtacagcccggccagcgccgccacgttgagcgctacgctgatgaaaaaccgcgtccggaagggctgcttttgcgttttatggcgaaagcactgctggccgaggatggcccccggccagcctcccgccaggcccagcaccagcagcgtggtttccggcacccggcgccaggctttgcgcgccgccagcttgtcggcgccatagataagccatgtcagtaggctgctcagtaaaaaccacatcgccagcgggtagggcagcagggcgctgcccacggcggtgagcagcagcagggaataacataccaggttcagattcatagggacgttcacgccggccagaagaatggcgccactatagccaatttcccggaccggcgtaaacgcggcgggctattggctacgcttgccccgatgccgggacagccacatcagcttatacgccgccggaatgataaacagcgacagcagcggggcggtgatcatcccgccaatcatcggcgcggcgatacggctcatgacttccgaaccggcgccggtgccccataaaatcggcagcaggccggcgataatcaccgccacggtcatcgccttcggccgcacgcgcagcaccgccccctggtacagcgcctcgtcgagcttatcgacgctgagagtctgcggattctccagcgatggctccgcctcgatggcgtggcgcaggtacatcagcatcaccacgccaaattctgccgccaccccggcgagggcgataaagccggtcccggtggccaccgacagatggaaccccatccagtagaggaaccagatcccgcccacaagggcgaacggcacgctggtgataatcagcagtgcttcgccgacgcggcggaacgccagatacagcagcacgaagataatcattagcgtcatcggcaccatcagcttcagcttctgattggcgcgctccagcagctcaaactgcccggagtaggacacactgatgcccggcttcagcttcacctccttgccgatggcctgctgcagatcgtgcactaccgacaccatgtcgcggtcgcgggcgtcgatgtagatccaactggtcgggcgggcgttctcggtcttcagcatggatggtcccgtgaccactttcacctcagccacgtcgccgaggacgatctgttgcttcagcggcgtgaggatcggcagctggcgcagggtctccgggctgtcgcgatagctctgcgggtagcggatgttgatcggatagcgctcgacgccctctaccgtttcgccaaccatcgccccgccgatggcggacgatacaaacagctgcacatcgccgacggtcatcccgtagcgggccgccttctcacgatgaatatcaatgttgaggtagcgcccgccgcccaaccgctcggctaatgccgacgtgactcccggcacgctgcgcgccaccccttcaatttgcccggcgatggcgtcgatatcggccaggttggtgccggaaaccttaatgccgatcgggctcttgatgccggtggagagcatgtcgatgcggttgcggatcggcggcacccacaggttcgccagccctggcagacgcacggttttatccagctcgtcgacgatcttctccatggtcatccccggccgccactgatcctgcggcttgagctgaatggtggtctctaccatctccagcggcgccgagtcggtggcggtctcggccttgccggttttgccgaacacccgcgccacttccggcaccgccatgatcagcttatcggttttctgcagcatatccgccgcctgcgcagcggagatccccggcagcgtggacggcatatacagcagatcgccctcgttgatctgcggcagaaactcgccgccgacccggttaagcggccagacaaccgtcaggatcgacaggagcgcaatcagcagggtagtcttcggccagtgcagcaccttcagcagcagcgggtgataaatgcggatcaaaaagcgattcagcggattgctgttctccgctgggatcctgccgcggatccagaagcccatcaggatcgggatcaccacgatcgccagcagcgccgccccggccatcgaccaggttttggtgaaggccagcgggccgaacagtttgccctcctggccttcgagggtgaaaatcgggataaacgacagagtaatgatcagcaggctgataaacagcgccgggccgacctccaccgaggcctcggtaatgattttccagcgtgtgtcgttgctgagcttctctcccgggtgctgatgctcccactcctccagccgcttatgggcgttctcaatcatcacgatggcggcatcgaccatcgcccccaccgcaatggcgatcccacccagcgacatgatgttggcgttgagcccctggaaatgcatcatgataaaggcgaagcacaggccgagcggcagcgagataattgccaccagcgccgagcgcacgggccacaggaacagggcgcagaccagcgccacgacgataaactcttccagcagcttgtagctgaggttgtcgatggcgcggtcgataagctggctgcggtcgtaggtggtgaccacttccaccccttccggcaggctgctttgcagcgacgccagcttctctttgaccgccgagatcacctcgcgggcgttcttgccggagcgcaggatcaccacgccgccggccacttcgccctcgccgttaagctcggcgataccgcggcgcatctccgggccgatctgtacccgcgcgacgtcgccgagataaaccggcacgccgttatccccggttttcagcacgatatttttgaagtcgtcgagcgtctgcaggtagccgctggcgcgcaccatatattcggcttccgccagttcgacggaagagccgcccgcctcctggttagagccgcccgcctcctggttagaggcgtccagcgccgatttcacctcgccgaggctgatgccgtactgggtcagcttcatcgggtcgacgacaatctggtactccttgaccacgccgcccaccgacgccacttccgagacgttaggaatggttttcagctcatattttaagaaccagtcctgcagggagcgcagttcggcgagatcgtgcttgccgctgcggtcgaccagcgcgtactcgaagacccagccgacgccggtggcatccgggcccatttcggcgctgaccccggcgggaagtttgccctgcacctggttgagatactccagcacccgcgagcgcgcccagtaaggatcggtgccgtcttcaaaaatcacgtatacgtaggagtcgccaaactgcgagaagccgcgaaccgttttggcgccggggactgacagcatggtggtggtcagcggccaggtgacctggttttcgacgatctgcggcgcctgccccggatagcgggttttgacgatcacctgcacgtcagagagatccggcagggcgtctaccggggtgtggatgatggtccaggttccccagatgctgagaaacagcgccgccatcatcaccaggaagcggttggccaccgagcggcggataatccattcaatcatggttccgttccttagtgcgcgtgggcggcagaggccgcggcatcaggggcctgcgcgcgcatgcgctccagcgcgccggcgatattggcctccgagtcgatcaggaacaggccgctggcgacgactttctcaccctcctgcagcccgctgcgaatggccgtgacgccggcggattcatggaatacctgcacgattttcggcacgaagcggccctcgttatcgacggtgatcactcgctgctcgctgccgctgtcgatcagcgctttggaggggatcagcagcatcggggcgctttcgctggtcagctgcagataggcgttcatccccggcttcagcgcttcatccgggttgttgacctgcaggcgcagctgcagggtgcgggtggcgctatcgacgctggggagaagggtccatttgctgatgcggaaggttttgcccggccaggcgggaacctgaatgctgaactgcgaggcgtctttaatcagccaggcgatggattccgggaccgccacgctgacccacaccggatccatgccctgaattttcgccaccacgttatctttggcgatgttcattccggcgcgcagatcgaaggcggtaataacgccatcgatcggtgctttgagagtaaagcgggtctggattttacgcgtggctttcaggcggcggatatcgtcatccggcattccggcgagacgtagacgctcgaggatcccctcgacctgcgtagcggtgcccccggtctcctgcaatagcagatattcgctctgcgcttccacccagtccgggatggtcagctcgagcagcggcgtgccttgtttcactttgtcgccgacggtcagcggatagactttattgataaagcccgccgcccgcgcctgcataatcacatactggtactcgttatagctgatattggccgggaaggtctgagcgtagcgcagcggcccgcgggtgacggcggcggttttcaccccaagattctgggtctgcgtcgggtcgatacgcacccccggtgcaccggcggcggcatgctcctcatcggcgtatttcggcaccagatccatatccataaacggcgatttacccggtttatcgaagcgggtgttcgggtacatcggatcgtaccagaacagcactttacgctgctgctcggccgccggagcggcagagtgggtcggagcccatcgggcgtacagcgccgcggtaagcgcgccgccaatcagcatgctgccgaggatcagcgccgtatttttcagtgtcagggatgccatgtgtcgtccattcagttgttgaggggcctaccgtcgccgggccgttattgggcgcggatatcctgtaacagcgacaggttgccctgctgaacgaaggtgaagtccacgctgtcgccatccttcacattgttgagctgcgtctgcggggtgatggtgaagcgcatggtcatcggcggccagttcaccgccgggatggcctcgtgggcgatagtgatttttttgttatccatatcaatggctttaatgacgcctttgccgcggatgctttgcgtctgcgcggcggcgggctgctcgtgcatcgccatgctggcgtgcgggtcggcagcctgggcggcgaacaccgcgccagagagcagggtgaacagggcgattttagatagtgaattcatgttcgggactccttgggttattccatccagccgccgccgagagcggtgaacagggtgatttcatttgcctgacgggaatagttgagttccagcagggtttgtcgggtggtgaaaatatcgcgctgggcgctcaggacttcgatatagctgaccgcgccgtggcgatagagcgcagtggcgcgctgcagggtgatattcagcgaggcgagatagcgctcctgcgcggcaatttgatcggccaggctctggcgcagggccagcgcgtcggccacctctttaaaggcggactggattttttgttcatagttgaccacctgctgctgctggcggatctccgccagatcgaggctggcctggttgcgcccggcgttgaaaatcggcagttcgattttgggaatgaagttccacatcgcgccgccggcgttaaacaggctggagagttcgctgctgctgccggagagcgagctggtcagggtgatcgacgggaagaaggccgcccgcgcggcgccgatgttggcgttggccgcttgcaggctgtgttcggcttccagaatatctggccgctgcaggaggatcgctgaggagagcgatggcggcagggttacgccttgcaggtctaccgcgctgctggcgctatcgtccggcagatgttgatagctgccgagcagtagctgcagggcgttattggcctgcgccagctggccctgacgtttggcgatatcggcgcgggtgctttcgatcatgtcgcgcgcctgctccagcgccagcacggtggtgctcccggtcagcagctgtttttcaacgaaggcgtaagactgctgatagttctgtaaggtatcgttggccacctgcagctgcgctgccgccagccgctggttgaagtagctttgtgaaacgttagcaatcaacaggatatgcactgcgcgccgtgcctcttcgctggcgaagaagttctgtcggtcggcctcgctaaggtttttcagccggccaaagaaatcgaggtcatagctgaggtttaagccggcggcataatcgctgctggtggtggtgtcgcctttgagcttgccgccataggtggtgctgccgtcaccgttaagctgtgggtagcggtcggcgtcggttacccggtactgggcgcgggcttcctgcactttcagcgtcgccatccgcagatcgcggttgttggtcagcgcggtgctaatcaggcttttcacctgcgggtcgacgaaaaaggtgcgccaaccggtctcctggtagcccgctgtcgcagtaaccagcttgttctggctgagagagaactgctgcggcaccggcgctgcggggcgctgatagtccggagcaagtgacagacagccggttaaggtaaatatcacgctgagggtaagtagctgtattgagcgcatggcggcagaagtttcgacgatttatccatggcggctactttacgtagcgggctctgttcagggcgtgacgggaaaatgacaaagctgtcattttcctgatatttcattgctatccggaggcgctcctctaaaattgaatacccgcacaaagcgcgcgtgaaggagcctgccgtgaagattttgattgtcgaagatgagaagaaaaccggagagtacctgaccaaagggctcaccgaggccggcttcgtcgtcgacctggccgataacggcctcaacggctatcacctggcgttgaccagcgattacgatctgctgatcctcgacatcatgctgccggatgtgaacggttgggatatcgtgcgcatgctgcgcgccgccgggaaaggcatgccgatcctgctgcttaccgcgttgggcaccattgagcatcgggtgaaggggctggagctgggcgctgacgactatctggtaaaaccgttcgcctttgcggagctgctggcgcgggtgcgtactctgctgcgccgcggggcggcggtcatcgtcgaaagccagtttcaggcggccgatctcagcgtcgatttggtcagccgcaaggtgacgcgcggcgccacccgcatcaccctgaccagtaaggaattcacgctgctggagttcttcctgcgtcatcagggcgaggtgctgccgcgttcgttaattgcctcgcaggtgtgggatatgaacttcgacagcgacactaacgccatcgacgtggcggtgaagcggctgcgcgccaaaattgataacgacttcgagccgaagctcatccagaccgtgcgcggcgtcggctatatgcttgaggtgccggatggccgctaagcgccccttttccctggccacccggctgaccttctttattagcctcgccaccgtcattgccttcttcgccttcacctggatcatgatccattcggtgaaggcccactttgaagagcgcgacgttcacgatctcagacagctcagcaccaccctggagacggtcctcgaccacgctgactacccgcaggcgcggcgtctggagatcgtgaagaatatcattgcgggctacgccaacgtcttcatctgcctggacgatggccagggcaatattctcttccagtcgcccaacgggccggatctcagccatatgctgagtacgccggggctggcgatgcagctccgcgacgggaatgtgatttcatggaccgacccgcagccgcgggcaatggcgcacgataatcatccactggagacccgcgcctggcggctgatcatgctgccgctgggcaagcaggcggacggtaaaccggcgtaccacctgctgatggccttatccatcgattttcacctgcactatattaatgagctgaaagcgaagctgatctccgcggcgtcgataatcagcctgctgatcatcgccatcgtgctgtttgtggtctaccaggggcataagccgatccgccagatcagccgccagatccagaatattacctcgcgggatctcgatgtgcgccttgacccgcaggcggtgcctgtcgagctggagcggctggcgctgtcgtttaaccatatgctggagcgcatagaggatgtctttacccgccagtccaacttctccgccgatatcgcccatgaaatccgcacgccgattaccaacctggtgacgcaaaccgaaatcgccttaagccagagccgcagcccgcaggagctggaagaggtgttgtattccaatctcgaagagttctcgcggatgtcgcggatggttagcgatatgctgttccttgcccaggccgataacaaccagctgatccccgaacagcgggcgctggatttggccgatgaagtgcataaggtgtttgagttctttgaggcgtgggcggaagagaaagcggtggcgctgcgttttgtcggtagcccctgccgggtgacgggcgatccgctgatgctgcggcgggcaatcagcaacctgctgtcgaacgcgattcgctatacgccggccgggcaggcggtgaccatccagttgagcgaaagcgcggagacggtacgcctggtggtggagaaccccggtatgccgattgccgccgagcatctgccgcgcctgtttgaccgattctatcgcgtcgacccctcgcgccagcgcaaaggggagggcagcggcatcggcctggcgattgtgaaatcgattgtcggagcccaccacggcagcgtggcggcgcagtccgatctgcgctcgacgcggtttattgtgatgttgccgaaataggcgcaatccgcgagtgatagttgagtatgtggctttctgtcgctatattgaatgtacggaaaataaccgtacatgaagtttgcaacaggccggagataacgtatgcccgcacttaaaaagcagcgtatagatttgagattaaccgatgatgataagagcatcatcgaggaagctgcggcaatttcgaatcagacgattacccagtttgtggttgccagtgcctcagaacgtgctgcggaagtgattgagcagcaccgcagaatggtcctcaatgagcaatcatggagcctggtgatggaggcgattacccaaccgccagccccgaatgatcgactgaaacgtgcagcgaagcgtctacaaaccaggtaaggtagagctaatggagcagcaactgacgattgagatgattgccgatgcgttcagctacgatatcactggatttgattgcggcgaggaagcgctgaatacgtttttaaaagagcacctcaagcggcagcacgatggacaaatcttaaggggttatgcgctggtctccagggataccgttcccaggttgctgggttattacaccttatcggggagttgtttcgagcgaggcatgttgccgtctaaaactcagcaaaagaaaatcccgtatcaaaatgcgccaagcgtaaccctcgggcggctggccattgataaatctgttcaggggcagggctggggagagatgttggttgcccatgcgatgcgagtggtgtggggagcgtctaaagccgttggcatctacggattgtttgttgaagcccttaatgagaaggctaaagcattctatcttcgtctggggtttatacagctcgtggatgaaaatagtaacttactgttttatccgaccaaatcgattgaacagctctttactgacgatgagtcataaaagaaaccgggcagcgccaggcggctgcccgcagtatcgcgactctcttactcttcgaagtaccagtagccctgattaatcagccgcgtcagttcgctcacgaacgccggattctgcaggccgctgccgagctcttcctggcctaatgaggtatagcgacacagcgcatccagcgcttcggcatcggtggtgtcgagttgttcgctatgcacgaagaagctgtcgccgatatgcagaacgcgcaggccgctcaggcgggaaagcttttcaccacccagcagcgcatcgaccacttcctcttcttcatacggtggttccgccggcgcaatatccagctcgtgacgcggggtggtgacgaaactgccgaaccactgcttgaagtcttccggctggcgaatcatatcgatcatcatggtgcgcagacgttcgagttcatactcttcaacccggcccggatgctcgcggcaggtgaggtccggatcgctgtagtgctcgtcgccgagatcgttctccagcacatagtcggcgaagctgctgatcaggtcgcggccgtttggcccgcggaagccgacggagtagttcagggcggtttcgtgggttatgccgtcgtgcgggaatcccggtggaatatagaggatgtcgcccggctgcagatcttcatcaatgatcggtgggaacggatcgacgtgcagcagtgccggatgcggacagaactgacgcatcggcagcttgtcacccacgcgccagcggcggctgcccatgccctgaataataaagacgtcatactgatcgatatgcgggccgacaccgccgccggggacggagaaggagatcatcaggtcgtccaggcgccagtccggcagtacgcggaacgggcgcaccagctcggcggccggcatatgccagtggtttaccgcctgggccagcagggaccaaccggtttcgcccagcccgtcgaaatgttcaaaaggaccattgctggcctgccatttgccgtttttcaggctgaccagccggctgtcgacttccggctccatggctaatccggccagctcgtccggagtaatcgggtcgacgaagtccggaaacgcgttttttaataccaccggctgtttctgccagtatttttctaaaaactcgggccagttaatgttgagttgataagccatcgattattaccagtaagaagaaacgggcctgattatagaaatgagggccgggcgggcgcattgtcgtgggtcaagagtggtgcttaattcaccatcggcgcgataatggcgttgggtaagagagaaaaatcacatttttgccaaaaaccgatcttagcgtaaattgcgctgcaggccgcatgagcactgggattgagcctttaatggtaagaagatgaattcgcgaaaagttcaaataatgagcggtcgataagatttttctattttaacgcttgctacttccgacgaactccctataatgcgctcccactgacacggcggatgtgaatcacttcacacaaacagccggttcggttgaagagaaaaatcctgaaaaacgggttgactctgaaagaggaaagcgtaatatacgccacctcgcgacagagcgctaaagcgcgtcgcaactgctctttaacaatttatcagacaatctgtgtgggcactcaaagtgacatggattcttaacgtcctcggacgaaaaatgaataccaagtctcaagagtgaacacgtaattcattacgaagtttaattctttgagcatcaaacttaaattgaagagtttgatcatggctcagattgaacgctggcggcaggccta

SEQ ID NO: 88 - DNA, 11928 bp, Unknown
  source: /note="Description of Unknown: MKP2_coc_1 Mutant Bacteria sequence"
cgtgcggctcctcgcgttctgtctccctcttgttttcactgctccgcccccctccgctgccctccctctcctcttcgtcggcagcgtcagatgtgtataagggaccgcgctgctgatcgccctgaccatcgtcgccgccctctggccttcggcccgctggcggcggctggcttcccgtctgccgctgctgctggcggtgccccatctcgccctggcgacggcggcgctgctgctgttcgccgaagggggctggctctggcagcagttgccgtttctgacgccgccggtcgaccggtacggcattgggcttggcctgacgatggccctgaaagagagcgcctttgtgctgtgggtgatctatggcctgctgggagagaaacgcctcgccgaccaggcgaccgccctgaagagcctcggctacggccgctggcagtgcctgcgttggctggtgctgcccgccctgctgcccgccctcggcatggtgctgctggccaccaccgcctggagcctgtcggcggtagacgtcgccctggtgctggggcccggcaatccgcccaccctcgccgtgctggcgtggcaatggttaagccagggcgatgagctgcagcaggccaaaggggcgctggccagcctgctgctgatggcgatcctcggcgggcgggcgctggtcgcctggggcggatggcggctacagcgccagtaccagcccgatctgcacggtgttcgtcacccgcatcctcatgccctgcccggccgcctgctggcggcgctgctgccgctgagcggtctgctgggcgcgctattgctggcggggctggcgcgctcggcgccgccgcagatggatgctctgggcaacagccttgggctggcgctggcggcctgcgccctcggcgcggctgtctgcctgctgtggctggcctgcggcccggcgcgaggcgatggctgggtctggctaccgctggtcctgccggccctgccgctggccgacggccagtaccggttggcgctgtatgcctggcttgacggtgactggtggaccgtcctgtggggccatctgctgtgggtggtgccctggatgctgtttattttgcgcccggcctggcgccagcgcgatccgcggctgacggttgtcgcccgcacgctcggctggggatcgacgcgtattttctggttgctgaccctgccttcgctaactcgcccactgctgaccgccctggcggtgggcttctcagtgagcatcgcgcagtatctgccaacgctatggctgggggctggccgaattccgacgctcaccagccaggcggtggcgctcagcagcggcggcgaggcgcagacgctcgccgctcaggcgctgtggcaattattgctgccggcggtatgctttaccctgaccgctctgctggcctggctggcaggccgctatcgacgaggacttcgctagtgctaaccgtaaaccatctgactctgagcgtgagacgccagccgctgctgcgggaggtcgccttttcggtagccccgggggaggtgctgacgctgatgggcccctccggtagcgggaaatcaacactgtttgcctggatgattggcgccctgtccggcgattttcgcgcccgaggcgaactgtggctcaacgaacggcgttgcgatacgctgccgacagagcatcggcgcatcggcattctgtttcaggacccgttactgttcgaccatttcagcgtcgggcaaaatttacagctggcgctgccggagaacgtgcgcggcgaggcgcgaaaaaccgcggtggaggaagcgcttagccgcgccgggctggcgggcttcgccccgcgcgatccggccacgctctccggcgggcagcgggcgcgggtgagcctgctgcgcgccctgctggcgcgccccgaggcattactgcttgatgagcccttcagccgcctggatgccagcctgcgcgccgggttccgccgctgggtctttgaagaactggaccgccaggccattccggcgatcctggtgacccacgatcgcgaggactgcccgccgacggggcgctgcctggcgatggagcgctggcaatgaaggacaatagtgtgcaaacctgcgttaccgcaaagaaatcggcgcctggcgagtggagaatacgccctccactttttaccgtcgggcatttcgatgaaacgtgtttctcaattgaccgcactcgccctgctcatggggcttgctgcttccactacctgcgccgctgaaaccatgccagcgctcactctctcccacctgcaacagcagcacggcgtggccatcgacacccggctgagcgcttattacaacggctggccgcagcgcgccaacggcccggaaggccatgagccgcaggccctcaatctttccgcctgctggctcggcgccatgagcgacgatcagctgcgcgcctgggctaagcagcaccagctccagtccgatacccccatcgcgctgtacggcagcccggaggataacgccagcgtcgcggcgcggctgaaacaaacgggtttcacccggctcagcaccctgagcgatgcgctgagccagaccgaccgtctgcaaaagctgccgcactttgaacagctggtctacccccagtggctgcacgacctacagcaagggaaagcggtcgccgccgccccggcaggcgattggaaagtgtttgaagccgcctggggagcgccgaagctctatctgctgagccatatccctggcgcgggctatatcgataccaatgaggtggagagcgaaccgctgtggaataaagtgtccgacgcgcagctgaaggcgatgctggcgaagcacggcatccggcatgacaccacggtgatcctctatggtcgcgacgtctacgccgcagcgcgggtggcgcagatcatgctgtacgccggggtcaaagacgtgcgcctgcttgacggcggctggcagacctggtccgacgccgggctgccggtagagcgcggtatgccgccggcgcagcagccggcgcctgatttcggcgcgccgatccccggcccgccgcagctgatactggataccgaacaagcccgcgggctgctgcatcgtcaggacgcctcgctggtcagcgtccgctcgtggccggagtttatcggcaccaccagcggctacagctatatcaagccgaagggcgacatcgctggggcccgctggggccacgccgggagcgactccacgcacatggaggatttccataacccggacggcaccatgcgcagcgccgacgatatcgctgccctgtggcgccagtggaacattctgccgagccagcaagtggcattctattgcgggaccggctggcgggcctcggaaacctttatgtatgcccgcgccatgggctggccgcacgtcgcggtgtacgacggcggctggtacgaatggagcagcaacccgcacaatccggtggcccgcggagagcgcggcccggaaagcagtcagtaactcgccccgcctcagcgcgtcgccctttgtcggcgacgcgcgataccccgtttacgctgtggtcgttacccgctttaaggtctggtagccactgcagatgcgcgtcgccgtcgtcagccagcacagcgcgccaaacagccacgccagccaggcgaaatgcgccggaaacaggcagccgaggacaaacaacaggatggtctccgtcccctccgtcagtcccccgagatagtacagcgatttatgggcgtagccgggattggcgatctggtgcctggccgccagggcggcaaaagcgagaaagctgctgccggtgccgataaaggcaaacagcagccagccgcccgccagggcattgttcagcggatccgccagaataaagccgaacggcaccagggcgtaaaagagaaaatccagcgcaatatcgagaaagccgcccgcgtccgtgagcccgcgccgccgcgccagagcgccgtccaggccatccagcaggcggttaaggagaatggccgccagcgccgcgccataccaccccagcgccagaaagggcagagccagcacgccgatggcaaaaccaaccagcgtcagcccgtccggtgagatgccggggcggtcaagggcgccggcgacagcgttaagcaggggtttaaggcgcggatgcaggtggctatcaagcacgaaggtctccagcagggttggcggttgtcagttacggtctatggcggtgataataggccatattcgtcttattaaccttaatgcttatgctaaaaatgattgatgttgtcgccgccattattgaacaggatggccagattctgctggcgcagcgtccgccccacgccgaccagccggggatgtgggagttcgccggcggcaaagtggagccgggtgaaaaccagccgcaggcgctggcccgcgaactgcaggaggagatgggcatcatcgcccgcccggcttgctatatcgctagccatcatcgggaggtctccggccgccgggtccatctgcacgcctggtgggtgccgcactttcagggcacgccgctggcccactatcacactcagctgcgctggtgccttcccacagaagcgctggccctcgatctcgccccggccgatattcctctgctgcacgcctttatcgcccagcgccccaccctttccgtccgctgatccgcccgccgcctcgtcatcgcttttagttatgacgagcgggcaattataaattttgttgtcggctcaatttttccttgcttgcctaaggattagcggtgttatagtcggaaaatcggttttttcaaggaccgaatcataataaatacatgcaaccacaaccataaggggaactgatatctatggatcagacgtgcactctggaaggctttctcacccgcgttcaacagcgcgatcctcatcaaaccgaatttgctcaagccgtccgggaggtgatgaccaccctgtggcctttccttgaggaaaatccgcgctatcgtcagcttgctttgctggaacgtctggtggaaccggagcgcgtgatccagttccgcgtggtgtgggtggacgaccgcaatcaggtccaggtcaaccgcgcgtggcgcgtgcagttcaactcggccatcggcccgtataaaggcgggatgcgttttcacccgtcggttaacctgtcgattctcaaattccttggcttcgagcagaccttcaaaaacgccctgaccactctgccgatgggcggcgggaaaggcggcagcgatttcgatcctaaaggcaagagcgatggcgaagtgatgcgtttctgccaggcgctgatgaccgaactctatcgccaccttggcccggataccgacgtaccggcgggcgatatcggcgtcggcggtcgcgaagtcggctttatggccggaatgatgcgcaagctctccaacaacagcgcctgcgtcttcaccggtaaaggactctcctttggcggcagcttgatccgtccggaagccactggttacggcctgatctacttcaccgaagcgatgctcaaacgtcacggcctcggcttcgaaggcgctcgcgtggcggtctccggctccggcaacgtcgcgcaatacgccattgagaaagcgatggagcttggcgcgcgggtggtgacggcctccgactccaacggcaccgtcgttgacgaagcgggcttcaccaaagaaaaactggcccgcctgatcgacattaaagagcgtgcccacggccgcgtggccgattacgcccgcgaatttggcctcacctatcttgaaggccagcagccgtggtcagtgccggtggatattgccctgccttgcgcgacccagaacgaactggacgtcgatgccgcccgccagctgattgccaatggcgtcaaggccgtggcggaaggcgccaacatgccgaccaccatcgccgcaaccgacctgttcctggaagctggcgtgctgtttgccccgggcaaagcggccaacgccggcggcgtggcgacttccggtctggagatggcgcagaacgccgcgcgcatgggctggaaagcggaaaaagtggatgcccgtctgcatcacatcatgctggatatccaccacgcttgcgtgcagtacggcggcgaagcgaagcagaccaactacgtgcgcggcgcgaatatcgccggtttcgtgaaggttgcagatgccatgctggcccagggcgtgatttaacctcccctaactccatcccggcggcagcccgccgggatgcgtctcacgacgtcatcgtgatcaccactttccccagatgctgaccactgtccagacaggcatgggcctcggcaatctccgccatcgggtagctggcgtagatcagcggcttgcatttccctgcctcaagcagcggccagacgtggcggcgcagcgcctcggcaatctgctgtttctccgccgccgtccggccgcgcatggtcgagccggtgacggtggctcgcttgagcatcagagtctgaatatcaacctcatgagcgattcgcccgcccataaagccgatgatgaccagtcgtccatcctttttcagtagcccaaggttgcggttaaagtaagggccgccaacaatatccagaatgacgtccaccccttcatcgttggtcagctggccgattttctcggcaaaatcatcggttttgtagttaatcgccgtagcatagggacgtagcgcagcaattttttcgtcctggccgacggtggcatagacggtcatccccagcgcgtggcacagcaggaccgcggtggtgccaatcccgctggcgccgccgtggaccagaatgctttcgccaggctgcagcttacccagctggaagacattcgcccagacggtgaagaaggtttccggaatggcggccgcttcgctaaagctgagacccgccgggatcggcaacgtctggcctgccggcacggcgcagtattcggcatagccgccgccgttggtcagcgcgcaaacgcgatcgccgggcgtaaacgctgtgacctgcgcgccgaccttaacaaccacgcccgccacctcgaggccgggcacgggggtgacgccctcaggcatgggatacagaccctggcgctgcagaatatccggccggttgacgcccgccgccttcacctcaatgagcacctcatgctccccgatgatggggatctccccttcgcggatctgcaatacctccgggccgcccggttggctgatagcaatatatttcacgggtcctccttatcgcctgtgagagaaatggggcatcggcctcaggaaaagcgcagcgggcatcccctgctcaggggccccgcgtccaggctcttcccggctgtttagtgtagaccattggcctggctggcggagaagcggtggccgcggggtaacgcatcctcgcgaccaccggcgggttactgcggcggcggcgcggtatcgtctgccgcttttttgcctttcggcttccctttacctttgctgaacgacttcttcgccccgcccggcgccaccaggccgcggaactgacgcaccggcgtgctgcgcgcctgatcgatcagttgatacagcgtccccaccagcggctgcataaagtcctgatagcggcactgtttctcgctgatctgcgtcaacaccgactcccagtgggcggtcatgtccggtcgcccggccatctccggcagggaatgaatgagcgccctgccggcctccgaagagtggatatagcgcccctttttgctcaggaaaccacgcttgaacagcagctcgataatccctgcgcgggtcgcttccgtgccgaggccgtcggtggcgcggaggatcttcttcagatctttatcctgcacgaagcgggcaatcccggtcatcgccgacagcagagtggcgtcggtaaagtggcgcggcggctgggtctgacgctccaccacctcgcccctctcgcacagcagttcatcgcctttggccaccaccggcagcggcgtgccgtcgttctcttcatcgcgctctttgctgccaagcagcgtccgccagcccgcctcggccagaaaacgcgccttggcgacaaacttgccgttggcgatctcaagatcaatctggcatttgcggaacactgcgtcagggcagaactgcatcagatactggcgggcgatcagggtgtacaccttcgcttcgttatcggtgagcttcacctggctgctgcgggcggttgggataatcgcatggtgcgcgtcgacctttttatcatcccagcagcggttgcggatctccggatccactaccggctgcggcagcaggtccgccgcatagacggcaatcgcattcaacaccgcatggcggccagcgaagtgctcttccggcagatagcggctgtccgaacgcggataggtgatgagtttgtgggtttcgtacagcttctggcagatatccagcacgttctgcgcgctgaagccgaaacgtttggccgcctcaatctgcagcgccgacagcgagaacggcagcggcgcgggttcggaatcgcgcttatcgttatagccggtcacgattgccggctggccttcgatgcgcttaaccacatgctcggccagcggacgatgcagcaggcgcccttcttcatcctggtaaggttcgcaggcttcgctcggcacccaggtggcgacaaaacgctcctcctgcggcgtgacgatatgcgccttcacgtcgaagaaatctttggcgacgaaattttcaatctcttcatcgcgacggaccaccaggccaagtaccggggtctgcacccgccccaccgagagcaccccctgatagccggcgttgcgccccagcagggtgtaggcgcgggtcatattgatgccgtacagccagtcggcgcgggcccgcgccagcgccgacacgcagagcggcacgaactcgctgttggcgcgcagacggttgatcgcccgctccaccgcctgcgggttgagatcgttaatcagacagcgctgcacctgctgacgcttctccggcgccagctgcaggtagtcgagtacttcgtccaccagcagctgcccttctctgtccgggtcgccggcgtggataacctcctcggcgtcgccgagcaggcgcttgatgacattcagctgtttggtgaccgagggctttggctgcagctgccatttctccggcacaatcggcagatcgttgagattccaccgggcatagcggctgtcgtagatgtccggctgcgcctgctccagcaggtggccgatacaccaggtgaccacctgcccgttgccgcactcaatatagccatcgcctttgcggtgcggtttaggcaacacatcggcgatagcccgaccgagactcggtttttctgcaataaacaaccgcatcgaatcaacggatctcgatcatgggtcgcccgccgcgggcggtcaccagctcgccgatggcggccagcttaatgccgaactccgccgcggcggcctgaacttccgcctccgcctccggggtcaccgccagcagcagaccgccggaggtctgcggatcgcacagcagatcccgccactccgtcggcatctcgcccatgagatggccgtagctggcaaagttgcgcccggtgccgcccggcaccgcgccggcggcgatatagtcctccacccccggcagttttgggatatcggcatagcgcagctgcgcctgcacgccggccccgcggcacacctcgctgaggtggccgagcaggccaaagccggtgacgtcggtcatcgccttcaccccgtcgatggcggcaaacgcggcgccggcgaggttcatctggcacatggtctccgtcgccagtccctgatgctctggcttgagcagcgattttttctccgcggtggtcagtacgccgatccccagcggtttagtaagatacagtttgcaacccgcctgggcggtgctgtttttcttgatgcgctcggtgggcaccacgccggtgaccgccagaccgaagatcggctccggggcgtcaatggagtggccgcccgccagcgcgatccccgcctgctggcaggcaaagcgcccgccctccaccacttcgcgagcgatttccggcgccagggtgttgatcggccagccgaggatggcaatcgccataatcggtttcccgcccatagcgaaaatatcgctgatggcgttggtggcggcgatgcggccaaagtcgaacgggttatcgacaatcggcataaagaaatcggtggtgctgacgatcgaggtgccattaccgagatcgtaaacggcggcatcatcgctggtttcgttgccgacaagcaggtttggatcgacaaacttcgcctgctcgctatgcaggatagtttccagcactttcggggaaattttacaaccacaaccggctccgtggctgtattgcgttaaacgaatggcttgctcgctcatggacatctcctgtcattgcaatcccgctatgttagcgcccaaacgccagggtggtaagtacgacagtctgaaatcgcgtatggctgctcattaagcagacaaaaagccgtttttgcgagacgcgacaattttttcccgaccattttcacttttacttaaagatgacagaaatgtgacagcacaggactgtcttctctggaatgattatgacgtaaggaaattctaatgaaaaagcgtgttcttgccctttgcctggccagtttcttctccgttaacgcctttgctctggttccccccgggaacgatgtcaccaccaagcccgatctctactatctgaccaatgcccaggccatcgacagcctggcgctgttgccaccaccgccggcggtgggcagtatcgcatttttaaacgatcaggcgatgtatgagcaaggacgtctgctgcgcaataccgagcgcgggaagctggcggcagaggatgccaacctcagcgcgggcggcgtggccaacgccttctccagcgcctttggttcgccgatcaccgagaaagacgcgccgcagcttcacaaactgctgaccaatatgattgaagacgccggcgacctggcgacccgcagcgcgaaagagaaatacatgcgcattcgcccgtttgcgttctatggcgtctccacctgcaacaccaccgaacaggacaagctggcgaaaaacggctcttacccgtccgggcatacctctatcggctgggccaccgccctggtgctggcggagatcaacccgcagcggcaaaacgaaattttgaagcgcggctatgagctcggcgagagccgggtgatctgcggctatcactggcagagcgatgtcgatgcggcgcgcatcgtcggctccgcggtggtcgctacgctgcacaccaacccggccttccagcagcagttgcagaaagccaaagatgaattcgcgaaaaggcagaagtaacgtcatcgccgttgcattcccggatgcggcgcctggcgcgtcttgtccgggctacaaaaaccgcgattgattcgaatggtaggggttgtaggccgggtcaggcgccagccgccacccggcatagatgcggctccgagcctgctgccatcgcccggcggcgctgcgcttgcgcggccagccggacggttccctctccctccgggagagggccagggtgaggggaagcactgcagtgtggttgtttatgttatctgtggcttcagcgtagtttgcgctcccggttaatcgtctgcgttatgtcacttatggcgccgggagcgcacagggggcggccagtcgccgccgccccctgtacccccgggctccggccagcaaaatcgccgctgcgcggtcccttcgacttatccctgcaggcttcgggtcgggccgaggcagcgtccctgcaaagcacggccctcagcccgcatccatgcgggctgccccggcctgccgggaacgtctcagcgattttgaggccgtcagcaccggcagtttcagcaagaaaagtgaataaattaacgacaggtcgtacgaacgtaggccgggt

SEQ ID NO: 89 - DNA, 11328 bp, Unknown
  source: /note="Description of Unknown: MKP2_coc_1 Mutant Bacteria sequence"
gggcgcggtggctcacggtcagtcacgacgcgcggcggctttttgccctgggggacgctgaccggaacgatctcctcgcgaaagcgcccggcggcgatagcggccgccgctttgcgctgggagctggcggcgaaggcgtcctggcgctcgcggctgatgtcgaaggcgtcggcgaggttctcggcggtaatgcccatgtggtagtcgttaaaggcgtcccacaggccgtcctggatcatgctgtcctgcaggctggcgtggccgaaacgcaggccgtcgcgggcgccatgcatcagatagggagcattgctcatgctctcctggccgccggcgataacgatcccggcgtcgccgcagcggatcgcctgcaccgcctgctgaaccgctttcagtccggagccgcagaccagattgacggtgaccgccggagtgtcgaccggcaggccggcccgcagcgcggtctggcgcgccgggttttgcccgcagccggcggtaagcacctggccgaaaattagttcgtcgaccgctgcggcgggcagctggcagcgttcaagcaggccgcgcaccaccgctgcgccgaggtcgacggcggaaagaggggcgaaggcgccgcgaaagctgcctaccggggtgcgtactgcagcaacaatggcaatatcggtcatggtctctccttaactgaagcgcatttcgcgcacgtcgtcggcgacgatcagccgtcccgccgttttacgtatcacctcgtcggggctgacccccggggccacttcgcgcaggacaaacgcgccgtcgacaatctccagcagggccagatcggtgagtacccggcgaatacagcccacgccggtgagcggcagggtgcactgcggcagcagtttggattcgccgttttttgaggcgtgggtcatcaccacgatgatgttctgcgcgccggccaccaggtccatggcgccgcccatccccttgaccatttttccagggatcatccatgaggcgatgttgcccgcgacgtcgacctcaaaagcgccaagaacggtcaggtcgacgtggccgccgcggatcatggcgaacgactgggcggaatcgaagatcgccgccccggtttgcgcggtgacggtttgtttaccggcgttaatcatgtcggcgtcgatggtttcctcatcgggaaattcgcccatccccagcaggccgttctccgactggagcatcacttcaatgccggcgggaatgtagttggccaccagcgtcgggataccgatcccgaggttgacgtagtcgccgtcgcgcagctcctgggcgacgcgcatcgccatttgttcacgggtcagcatctcagtgccctccggcgcgcagggtgcgctgttcaatacgtttttcgaattgcccgacgatcagccggtcgacatagatccccggagtatggatggcggaggggggcagttcgcccggcggcacaatctcttccacctccaccaccgtaatgcgcccggcggtggccatcagcgggttgaaattctgcgcggtgtggcgatagaccacgttgccgtaccagtcggctttccagcctttgaccagcgcgaaatcgccgcggatcgcctcttcaaggatgtagtgtcggccgtcgaactggcgcacctctttgccttcggcgaccggggtgccatacccggtggcggtgtaaaagccggggatgccagcgccgccggcgcggattttttccgccagcgttccctgcggggtgagttctaccgccagctcgccgctgagcaccagctgttcaaacagcgcgttttccccgacgtaagaggccaccaccttgctgacctggcgcgactccagcagcatgccgagaccgaaaccgtcgaccccgcagttgttggagaccaccgtcagcccctgcacctggcgacgctgcacctcggcgatcaagttctcgggaatgccgcacaggccgaagccgccggcgagcagcgtcatgccgtccgttaacccttccagcgccgcttcgtaactggcgacgcgtttatccagtcctgccatcttgtctctcctgccttgcgatagccttatcattggcgcaggcgactgatttgataattttgaatttgtgactcactcatttggaattttaattaatttcctgttaactaatttttttcaattagttaacaggatgaaaaatgagaatgagtgtcaaacagttacgcgcgtttttagcggtagctcacactctgaatttcgcccacgccagcgaaaggctgaatctgtcgcagccagctctcagcctgaccatcaaagggttggaggaggcgctgggcggcgcgctgctgcagcgcagcacccgcaaagtgaccctcacccaggagggggaactctttctgccgatggcccgtcagctgctggccgactgggataacgtcgaggaggccatgcgtcagagctttaccctgcagcggggtaaaatctcggtcgccgcgatgccgtcgtttgccgccaacgttctgccggaggcgctgaaagcctttcgcgaccgctatgccggggtgaacgttacggtgcatgacgtgattaatgagcaggtgatcgagatggtgcgcgaggggcgggtggagatgggcatcgctttcgagccatcgcccaaccacaacctgctgtttaccccgctggcggtggaccgcttcgtggcgatcgttccccaacaatccccgctggcgaagaaaaagcagctcagctggcaggagctgttgaccctcgactttattaccctgcagcgcccctcggcggtacgcctgatgctggaggaggcgctggcgcgcagcggacgtcagctggacgtggcgctggagagtcatcagctggtgacggtggggaggatggtggccagcggcctggggggcagcgcggtgccggcgctgtgtaaaacgcagatggcatcgttgggcgccgtctgcatcccgctcagcgatccgccgattgagaagtgcgtcggcgcgatccatgccggacatctgccgctgtcgaaggcggcgcaggcgctgctggatacgctgaaagggtttttacccacctgaggtgtgggcgtcaaaaaaaaccggcctgctggccggtttgacaatcagattttgcaggcgtcgccgcagtcgtcgtcggcaacgatcgcctgggcttttttgtccgcttcttccagacgctccgcgttgcgctcttccgcttcatccaggccgctgaagaccaggttgtcgagatcaatttccataagttacctatcgttgctggttttgaatcagggtcaagtatagggcataaccgccagtagatgtagccgcgcttcgcgccgaaggcacagagcgttaagtcgctgagcggagggcgttacctaccataaataatcgttgacagaataagtttagcgacaaataacgtcgccaggataatttcctgcctaaatattaaatgaaaggacaacgaaggagtaattaagcgttgacgaaacgcttttatgttaatatggccgcgattatggatgaatctatggatcttaatcaatggaacatactgttgcaggcgccatcaaagaatggcgtaaacataataaagtgatcggtcaggtcaaaataagctataaaaaaattttacgaaaatgcagagagctctcgctcgcaggaggtaaatacagagaatatcaaggactttgtgcgaaatatcagtgcgcgcggttgaccgcggtgaccaaaggactggtgccttttgaggataaaccgtttaaagcgtatctcaataaacggatgtcaaaacgacgcaaactggatattgcccatggttcactgaatttcatcgagaaaacgtttcaccctgatgtcctgccgcagctctacaatgtcgcggattttggccgcgagatgttttctattgccttgaaaaatggcgataagcttgacgttaagctgctggcctcgccgtttcaggaggaaggggagctgatgctgcagctgtttcttggcgaccggcgcgtctatagcgtctgtttttcctgcaccgacgatggccgcgcttatatcggcggcatccagggcgggaaagatatcaccaatgacgaagtgaaggtgctgactaaagagctgcatggcgcgcggccgaaaaatatcatcatgagcgtgctgtatggtttgctgcgatatttcaacatctccacggtctacgccatcgattctgattaccacgtgaaaagcgatctggtgaaagccagttattcatcgctgtggctggaaatgggcggtgagaaacaggctcgcggctggtataaactgccggcgcaagagatcaaaaagagtattgaagaggtgaaaagtaagcaccggagccagtttattaagcgcgaaggtcttaaagagctgattcagattaatatggcgaatgccctgcagcaaattaccttgtctgcgcgggtgaattaacgccactcacacgtcaggcgggcagcagggggctgctgcccgcctgacgatatcctttcttcactggcgcgtttccagccagatttcatcctatcccagggcttttgtggccggtcgaaaatggcgaggccgcgcgtccggcaagcagtgccaggaatacattcctcaggtttcggcatgggtaccggctttgacgatctgtagcgcgctggggctcgccacgctgccgctggcggtgacgaaccccggatggacggtctcgccgctggcgctgtccaccaatgcaataggcgacgcgctatgcagcacgtgctggtggccccattccatcagggcgaacagcaccagcgccgggatactgctgtgactggtgccgatggccgccgccgccgcggtgggctttatcgtccatatggcgggactgtccggcgcaggatgaggttgggcggcaacgggccagcgacccgttagcgcccaaccggaccggggaccatcaggtcgtggggctttcgcgggtggcccgcgtcagcgggttgctgtcgagttccagctggtcgcgcagcgcccagccgcgcagcttgccggggttaagcaatcccgccgggtcgagagactgtttcaccgccacgacgtcgggacgaatcacgccctgtttgccgtcctcaacctgcagcacgtgggggttgttaatcttgacgtcgttgtcgcgaaatatctgcatgatggcgttaagacgttcgggcgtggtatagcgcaccagctgcagaccgctggcggtgagattgccctcgatatcgcgcaggaattcaatatgggacatcacctccccggcgaagtgctgctccatctgtaaaatttgctgcggatagcgcagcggatcaaacgccgtctgcagataggtcagcgtattgtccaccttgagcgcatgcagggtggtgtggttccagcagtattccattaacgagccgttgcgcgtccgggcctcctcgctggcctgccggatggcgttgctcccgcgatggcgcggtaacaggctggcgcagagtccttcgctctcctcggcgatcaggctgataaccgcatgctgcccggcgcggtaacgatcgttgaggtggctaaaatagtcagcgatcggcgtggccagcagcgccacctggcgcttcaccagccccggcgagcggacgcaggcgttggcatagttcagcgcatcggcgaaatcgtcaaacacgtccagacgttcaatccactggtgcgcaggcgccagcgccagctcaacctccaggataatgccgttggtgccgtaggcgtgatgcagcagcagcgcttcgggagccgggacggtcagcacgcgggggaccggctcgacggtcattactttgacgctgagcacattgccgggcgccgccagcggcccatagttgatggagccgatgccgccgaacccgccgccgtagagaccgcccagactcgccagtcgataggtcgatggcatacagcgcagctcccagcccgtcgggcgggcggcggtttcgatgtccgccaggcgaatgccggcctgggccctcactgtgccgttgccgagggcgacgatctggttgagcccggtcatatccaccagcagcccgccttcgagggggaccagctgtccgtagttgccggtggcgctgccgcgcagggtcagcggcagctggtgctgcgcgcaggcggagaccagctggcgcagctcctcttcatcgcgcgggcgaaccactgcgtccgcctgtttccccgccagttgctcggtgagtagcggactgaaccagtgaaaatcgcgggagagccgtttgatcttcgccggctgtaaggtccactccagcgccgggagtgcctgctggatcgccgcgaccgcgtgttgacgctgttcatcagtcatcattctttttcctgttcgtcagcagaacattaatgagattgcacggcttcgctttcatgccaggcgctaagcgcccggcgcgaaacccaggacatcacgccaaacagcgcgataccggcgagagagatcagcagcagcgcggcaaacatcagcgggatatccagctggtagccggcctgcaggatctgataggccagcccggtattggtcccgccggtcccggcgacaaactccgccaccaccgcgccaatcagcgacagcccactggaaatacgcagcgcgccgaagaaatagggcagcgccgaggggatacgcagccgcaccagcgtttgccagcggctggcgtgattgaggcgaaaatagctcagcaggccgggggagacgctgcgcagtccctgagtggtattggagatgatgggaaacaccgccatcagggtggcgcacaccaccagcgagagcgtggcatccttcacccagatgatgatcagcggggcgatggcgacgatcggcgtcacctgcaaaaacacgatgtagggaaacagggcggtttccacaaagcggttctgcaccaggataaacgccaccgcggcgccgatgacaatcgacagtagaaacgagatcagggtgatcttgagggtgaacagcagcgccagcagcagcggcgtgagatgcgtccacaggctttccagcatcaccagcggcgacggcaccagaaaggccgggatacggaaatagctcaccgcgccctgccacaggagcaccatcgccaccgcgacgagggtcggatagagaattttgagaaaacgcggatgctggatccacggcgttgcggttgtatttttcatattatgactccataccggactggctggcctgcaacagactgtcctgcagctgacgggcatacagggaaaaggccgggctgacgcggaacgcctcgctgcgcgggaacggctcgcggatggggatatcttcgaccacccgtccgggacgggccgccatcatgatcacccgctgggagagaaacaccgcttcgtggatcgagtgggtgacgaacactaccgtcaggttttgctcctgccagagacgcagcaggtcgctgtcgagtttgttacgcgtaatttcatccagcgcgccgaagggctcatccatcagcagcagctttggtcgggtgaccaggccgcgggcgatggagacgcgcatttgcatgccgccggagagttcgcgcggcaggacgtcggcgaacttgccgaggcccaccagctcaaggacttcactcacccgggtattgccctccgcccgcggcacgccggccagatccagcggcagcctgacgttattgcgcacgctgctccacggcatcagggtggcttcctggaagacgaacgacagcggatgctgggccttttcccgactgtcgcgccgccacagcatcagcttgccgtcgctgggctccaccaggccggcgaccatcttcagcagggtgcttttaccgcagccggacgggccgagcagggtaataaactccccctgattgatggtcaggttgacgggcagcagcgcccgggtgccgttgctgtagattttctccgccgacagcacctcgatggccggggtggcagcggcgggtataaagcgggtatcgctcatcacggtcagtttcggggcggtattcatggcatcactccggcgtctttgaccatctccagggtgtaagtctgctcaaacggcaccttgctggcgtcgatcagtttgtttttcaccagcatgtcccaggttttcttcagccgcggctcggtgatgatgccgataccgccggacttagcatcgccgccggtcaccagctggtactgcttcatctgggcaatgccaaaggcgatctgctcggcgcccatctgcggattcgctttaccgatcaggctgttgccgggggcgggatcctgcaggtagcttttccagccttccatggaggctttgacgaaggccgccaccgccgccggacgtttgcggatggtgtcggccatacagataatcgagttgccgtagggcgggtagccccagtcgctgagcggatagacatagaacggctgtccgcctttggcgacggagaacggctccgaggtcacgtagccctgctgcaccagatttttatcggcgaggaacggctgaacgttaaaggtataggggcgcactttgctgccagccagacccagctcgcttttcgcccacggccagaaggaggtataggcctcggtggcgagcaggaaggttttgtctttaagttccgccgggttctccactttgtcatgggtgataaacaccgtcggcgagtgctggaacacggtggcgacggtcaccgcgtgcaccccggcctgccaggtctccagcgcctggccgttgtcgccaagggtgcagtccgcctgaccggccgccatcagctgcatgacgttgatctgcgggccgcccattttaatttcgacatcgagaccggcgtgttgatacagcccggtggcctgggcctggtaaaacccgccgtgttcggcctgggcataccagttggtgagaaaggtaaacttctccgccgcgaagcaggaggctgaggtcgcgagggcggccacggtcagcagggtaaaaacgggcgtcaatctggtattcatcagggctccctggattcagcagcgaaagaaggtggtagggactgcacaaagccgtgccagtgctgtttgccccaggtcggttcgcgacgttcgacccaggccatgcggtggatctcgatgatcgcttgcgcccagctggcggcgagggagtcgagaagcccttcgccttgctcccgcgtcgccggggtcgggtcgccaatcaccccgctggggccaaagtcatacgacgcccacgccgccgccggacggcctttcgacagggttgggcaggggaattccggggggaaattagcgacggcccgttccatatggacgcactccggcgccagcgccagcatcagcgccgtttcgctatgcccggcgtgcatcgccatccgctgttcatgcgggctgagaaactgtttttcgcagttgggcacgttgaacacgtcgtgggggatggcgatgaaatccccgtggcgcaggcgcatttcccggcaggctatctgcaggatctgcggctggccgccgtggccgttgatcatcagcagcttgcgaaaaccggcccgatagagagattcggcgatctccagcagggtatgcagcagcgtatcgccgctaagggtcagggtgccgggaaaatgcagatgctcctcggacttaccgtagacgatcggcggaatggcgtaggccgggatcgtcgccggcagcctggcgagggcatggcccgccacgccggaagatatcacgctgtccaccgagcagggcaaatgcgggccgtgctgttcgatcgccccggtggggaggacgataaccgtattgcttttatccggcagggcggccacgtccgtccagctcagaaaaggaagaaagcgcgcggcaggaatgtaaccgttaatcatcgcggtgcctcggagttaaatgacgggggtaaccagacggtcgcttcgacttcaatcagtaccgtggcgtcgggcagcatttcgctgacctgcaccacggtggaaacgggcggctggtcggggtaaaacagcttcctgacccggctgtaatagggaaaatggtcaaggttgcgaaagtactgcaccagtttgataacgtcgctcatttgccctcccgcggacgccacggtgcggcggatgctctccaggacgtaccagctctgggcgaggatcgggccctgtttcgcatcggttgaaaattcgccggtcgcccccagcagctcccgcaccggctcaggcacatcctgaaagccgttgacgatggtgccggtcaggggattgaccggaataatgccggagagaaagataaaatcgccggctctgcgccaggcggcataccgcgccagcggcgccccggcgcctgcttcaagactcatgtgccatctcctcctgccacacgcgtcggtgggttaacctgccgtggttaaccaccagacgggcggcgctgtttaaaggccaggtaaaacggtcgctacccgggaaaatcactacgctggccgccgccccgacggcaaagggcgccgcgtctgccggcgaaccggttagcgccgcgcgatcgcagatcagccgcgactgctggtcgaacaggtcgctgagctgagcgccgaacagaccgcaggccagggtgtccagcgggtcgtagctccccgccgggcagaaggcatcctgcacgttgtcgcagccgagcagggtggccacgccggcggcctgcgcctcgtgcagcagggtgatcccccgctggcgcggcgtgcggccgaacgtcgcatcctgcagcagcaggttggtcatcggcagagcgataagggtgacgccgtgcgccgccagctggcgcaggatcggcgccgcctgttcgtcgctgccggcggccagcgcgcagccgtggctgcagcagatatgtccgggaaaagggtggcgggagagatgatccgccagccaggtcagcccctgagacacttcgctgagctcctcatcgatatgcaaatccagatccagatcccagcgggctgcgctgcacagcagattttccatggcggcggcgtcccagttggaggagtggatgaagccgcccagcaggcagcgctctccgctgttggcgaccgtccgggcgatggcctccgcttgcgccagctcgcgaaacaagggcagcgggatcagcgccacccgctccagggtgatgccgacggtatcgaggcgggcgatctcctgccaggcgtccggcgcgtcggcggtaaaccagtcgacatggctgcgcaaatgggtcacgccattcgctgccgcccgggccagcgcggcggacgcccgacgttgaatatccgccctggtcc

SEQ ID NO: 90 - DNA, 6130 bp, Unknown
  source: /note="Description of Unknown: MKP2_coc_1 Mutant Bacteria sequence"
tttacgggcttcttgccctaacaggatcccggtcatctcaaaattggcgttagtgttagacatatattcaagcctatctcttatctggagatacagctactgtccggtgtttcagggggctacatcagttcgctctgaatcgctcctggttcagactgaatctgtcaagactgctgcaaagtcacatttgaatataggagacagtccatgtactaatgaaaatatcctacatcttcgggttgtagtatggccctatccgttgattaaagatgttggctacatcataaaaggagaattagcctgtagtgctctgtgggggagtttacgtcccaccttaagtctggaacattttgataaaaaatggacttcgcgggaaggagtgtggctttttggtattaagcttatggatgatatatccgtcaatggatatatttctgaaggtattatggtgaccctatcaccatttgtcttcagacgattcgaaactgatatgtattcaaaaaactttagcgctgttgtcggaaatagtaagcatgacaggcattacttcaatataggacctgatgctcctcttcttgatcggcatgatagcgttccactaaggtttagagtgtttagggcatgtagcctacattatgatctctgtgttgcaggaggtgggtattttacggggatattttcagagcactggagcatacaaatgttattagtaacagtgtcactactttccggtttaatgatttatattatcattatgaacagagcagaactcaatagttcactatctgcaaggtttgtaaaggctttgaaaaatgaagtcctgtcgctggtctatcaacctatttacagaattgaagacggacagatctgcggatttgaggccttgctcagatggaaagatgaaagactcgggaatattagccctgaagtatttataccgctttctgaaagggaagggttgcaggaggatgtgactttattcgtcattaaccatgctatccgagaatttatccatactgctattcagaatgaaatatttttgagcgtaaacattaatccaagcgatcttgattcagaaaaattcagggataaactactaggattaatttctgaatataacatcccatataaaacaatccttcttgaaattacggagcgtcaaggaggggattttgaaggtatgaaaattcacattgataaatataaaaatcatggtgtcaggtttgccatcgatgactttgggacaggatattctaatcttaatctggtaactgcgcttgatgtagatgaaataaaaatagacaaatcgctaactagtgctattggtactgaatctttacgatatgatcttcttcccggactgcatgagatgttccgctccattgcagataagattgtgtttgagggtgtagagactcaggagcaggtgaactatctgaagacgttctggccacagagttatgctcagggctggtattactccagagcgcttccgctggaagaagcgagaaaacttaccatccgggaattgaactgaccggcactttcagcgcaaacactcagcaattgcttgccgatcagctggtagaaattgaagggcagtgtaatcacctgctgctggcgcaggggaaagcgttactgaaaagtcgttctgaactgcttaaataacagagaaaccaggatgtgatttgatgcaaaacacggaacagcgaatgtaatatttactgagatgagcgagctttgtctcatagtacagaggagtcggggctgccagtatccggtagacagcattattcgtctgcaacataactctgctggttgctgcggataactactcagcgccttccagagatggcattgatgaaagtagtagaaaaaacctggaatctttgaagatgtgtccctacctcagggggctggagtgccatctggccctaattcagcacagtgctgcagatatgtgttatgtacaagtagacactgtcttgaaaatcagaagtcgttgagggttgaatgcaattccaatatttgcttcagcagataacgaggaccgctatctattgcatctagtgaataggaagccgtttccatttttctctaaagcaactggtgttgacatcctgaattccttcaaatgtctgatattccttttttcaaagcactagaaaaatacccgaaagctgttaatctaatacattgactgaccatacagtacagcgttattttgttgggtttacttcacgtactttttattgtcggatactgttgggaaaagacacaaagaagcaagccattaagcggaatactgcgtagggttagaatatacaattaacttttccgtgataggactagtgataacaatatttccagcatgggctgacaggagtatagatggaactgctctccataggttaatacatctcgcaattaacacgcccgcatatgccacaaaactgacgcccattctcggaattttttttgccattatctttcctgcggcctaattactttccccacaactatggttttttattagagtcttcaccactaaataaattataataaattgattttattagacatctgtcagaatctatatggtcagcacgtattgcatgctctaatgtttcaaatgctaaattatgcgcggcctcagaaaatatcccaggccaacccttactcagcatagacagtcctttaaggactcttatctgtatctccctcataccggcaccatcgcgcgcgacaggtgagaaaaagtcttccagtagatcgttattctgaagtggtgcaacatgaactgaaggatatttcacttctatttcatcagatttattctgcgcgtaagtggaaagtatacgaacacctctgccaatgacatcaatggcggttccaggatcgttcactgcgggggaaagtgcccggcaggctatttcggccatgacgctaagacaaaatcggggatcctgagcaaatgaacgtacatccgagacaataatcgtctcaagtaaatcggcgctgattgatgactcctggccttgactcaggtacaaaacgggcatggatggatggatgaaactgcctggctgcgccacgaggtatacatgacggggatcattggtcagcagcttgctaagtttcaccatattaatatattcaacatagccaatcttcttcggataaactgcaaccgttcctttcggctgttcattgttctcaagccatggatatccgccgagacagggatttcttgctctcgcaataaatgtttcgatggccgcctgttctacttttgccgttgtctcacctacccttcccagagaggtcaaatgctgtatccagcgaagcaatgtgatgaggattaaggcaatgacaaccagtgtgacaatgaataaaatgactctccccctttctccataagctcccatactgagggcaataatccctaccagactgaagagaaaagaaccgatgaaggtggccagtacattttgtgtggttacgtcttcaacaactaaacgcgtagctctgggagtcacattagtagtggctgaaccgtaggctgtgaccatgatactcaacgaaaaagtggtcactgccagcatactcgatgccagtatgttcagaatgttatcgactgcttccgcaccaaccttcacggaaaccgactcaggtatcattgatttaaaaagaattgataaaagggccgttattatcgcgacaatggcgaataacgttgccctgaaccatagctttttaactgtctgcttcagaatccatttccagcgtgaaatcattctgcattcctcatattgcggccgggataaataattgccgcccccaggacggcatgttgctattaacgaacgaggtgcaggaagtgcagatgtttttcgtactggtccagtatgtcattaatcagctgctcctggttccagcccatcacatcataattttgaccgccttctttgagatatacctcagcgcgataatatctatgttgttcagtctgctgctcattattatccatcgcggcgagcgcgaaggtcggtgagctatacccgcgaagcctcacttcatatataaaattcagctcgttacccaaatcgacttcaagacgaatacgatcctcgactgcgtcactgatgtggcttatcgtcccctgcttgttcagctcttcctgaaccagcgtcatggcgggctggatgacgtcgtccataaaacgtttcacaagagatcgcttcggcagatacgcgatattgcgtaaccttctctgccagggaattgggttacgtgcagccgtaggagcaattgtcgccatgctcaggctttcacgcttggtcaaatcccggcgcaaagcttttaaaagtccgtatatggatatcagtaagatcactgagaaaggcaatgcactcgctattgtcactgtttgcagcgcacttagccctccggcaaggagaagcgcaattgcgacaatgcccatgagcgaggcccaaaatattcgctgccagacgggtgtgtttgccactccacctgttgccagagtatcaactaccattgcccccgagtcagcagacgtgacaaagaagacgatgaccatcgccattgcgatgaatgacagcacggaagagaacgggaaatgctccaggaaattaaacagggccagcgccacatcctgctgaacagtattggcgaggtctgtggccccctggttcataatgagatagatcgcgctgttaccaaacactgtcatccacattagcgtaaaacccgcgggaacaaacagcacgccggtgacaaactcgcgaatggttcgcccgcgggagacccgtgcgatgaacatccccacaaacggcgaccatgaaagccaccatccccagtacagtaatgtccagccccccagccatttgctcgacttaggctcatacgcgtaaaggttgaacgttttactcaccagttccgaaagataaccgcccgtattttccacaaatgacttcagcagaagcacggttggtcccagacacaggaccagcgccaggagcaacaacgccagacccagattgagctcagacaggatacgtattcccttatccaggccggacaccactgaaatcgtcgctaaccccgtgatgaccacgatcagaataacctgcaccgtttcattgatgggcaccccgaaaagatggttcaaaccggcattcacctgcaaaacgccgtaacccagcgatgtcgcgacgccaaagaccgtgcctataacagcgaaaatatcaaccgcatggcctacaggcccgtatatgcgatcgccaataatgggatagagtgcggagcgcagagttaaaggcagaccgtgacggtaactgaagaacgccagaatcagcgccacaatggcataaattgcccatgcgtgcagtccccagtggaagaaggtcagacgcattgcttccttggctgccgcaacggtttctggcgtgccaacgggaggcgaaagataatgcattacaggttcggcaacgccaaagaacatcaggccgatccccatccctgccgaaaaaagcatcgcaaaccaggaatggtagctgaaatcaggctgcgcatggtccgggcccagcttgatatcaccgtagcgtgagagtccaaggaacgtgacacttagtaaaatcagggccacagcaaggatgtagaaccagctggcattcgtgaagatttgttgctgtagtagtttaaaatttttgtcggcgacatccgggaatacggcggcaaaggcgacaagaaggaaaattagcaaagcagatgtaaagaataccgctttgttaatctggcttgtagacttcttcgggattgtatcattatcactcataatcatttattccattaattaaatccgcactggatagacggtactacctttcacagagtagcaaagttcaactggctatgcggcgttaatcggaacgcatggtgtaatgagttccgatacaaatcatccgatattcggtaatgactccaacttactgatagtgttttatgttcagataatgcccgatgaccttgtcatacagctccaccgattttgagaacgacagtgacttccgtcccagccttgccagatgttgtcgcagattcaggttat

SEQ ID NO: 91 - DNA, 4632 bp, Unknown
  source: /note="Description of Unknown: MKP2_coc_1 Mutant Bacteria sequence"
ccgggagcggatttgaacgttgcgcagcaacggcccggagggtggcgggcaggacgcccgccataaactgccaggcatcaaacaagtgaagagcccatcctgccggatgggctttttgcgtttctgttgtccggccagcgtgccggtatgtctccccggtggcgctgcgcttaccggggctacgggcctgtcgcgttctgtagcccgcaccggtacaccacatcaccaccggtaacgccccgcaatatcattgcccctgtaatcagacaagccttcccccgccagatacgataaactaacgccgattttgcatcaggaagccactatgaaccactccctcaaaccctggaatacctttggcattgaacgcttcgccaagacgatagtacgcgccgaaactgagcaacagttgctaagcgcctggcaaaccgctgccgcggcaggcgaacccacgctgatccttggggaaggcagtaatgtcctgtttctgaacgactatgccggtacggtgatcctcaaccggattatggggatcgaggtgagcgaaacgccggaagcctggcgcttgcacgtcggcgccggcgaaaactggcatcagttggtgcagttcacgctacagcatgcgatgccaggtctggaaaatctggcgttaatccctggctgcgcaggatcttcgccgatccagaatattggcgcctacggcgttgagctacagcgggtttgcgaatatgttgactgcattgagctggaaaccgggcgtaagcaacgtctttcagccgcggaatgccgttttggctatcgcgacagtatcttcaaacatgaatatcaggaccgctatgccatcgtcgcgattggcttatcgttagcgaaaacatggcagcctgtactgagttacggtgatttaacgcgtctcgatccgcagaccgtcacgccgcagcaggtatttgatgcggtctgtcatatgcgaatgactaaattgccggatccaaagattaacggtaatgccggcagcttttttaagaatccgatcgtcagcgctcaggttgcggaagcgctgctggcgcagttccctcatgcaccgcactatccgcaggcaaatggcagcgtcaagctggccgctggctggctaatcgatcaatgtgagctcaaaggacaacgcatcggcggcgcggccgtccatcgacagcaggcgctggtactgattaatgaagatcgagcgaccagcgaggatgtggtgaaacttgctcattatgttcgccagcgggtgggtacgaaattcgatgtatggcttcagcccgaggtgcgcttcattggcacgcatggtgaagtcaacgcagaggagagcattgcgtgaaagaccatactatccctttaacgctaatttctatccttgctgatggtgagtttcactctggcgaacagcttggtgagcagttaggcatgagccgggcggcgattaataagcacatccagaccttacgtgactggggcgtcgatgtgtttactgtgccgggcaagggttacagcctgccggagcctattcatctattagatgagaaaaagatttctcaagagatagaccatggccgagtgacggtccttcccgtcatcgactctactaaccagtatttgctggacaggcttgatgagctgacgtccggagatgcctgtgtggctgaatatcagcaagcagggcgaggccggcgaggcagaaaatggttttcgccctttggcgcgaatctctatctctcgatgtactggcgtctggagcagggcccggcagcggctattggcctaagcctggtgatcggtattgtgatcgctgaagttctgcagcagctcggggccgaacaggttcgcgtgaaatggccaaacgatatttacctgcaggatcgtaagctgtcagggatcctcgtggaactgacggggaaaacgggcgatgccgcacaaatcgtcagcggcgcgggtatcaaccttgtgatgcgtcgcgtggagtctgatgtcgtcaatcaggggtggatcagccttcaggaagcgggggtggtcatcgaccgtaacctcctcgccgcgcgcctgattaaagagctgcgcctgggactggagctgttcgagcaggaaggattggctccctatctaccgcgctgggaaaaactggataactttattcatcgcccggtgaaactgattatcggtgataaagaaatttacggcatttcgcgtggcattgacgcccagggcgcactattgctggagcaggatggtgtaataaaagcctgggtgggtggtgaaatatcattgcgcagtgcagaataaaaaagggagcttcggctccctttttttatttacgtaagcgtacctgattcactgagtgattggcgctcttagtcatgatcaggctggcgcgctcgcgagttggaaggatattttctttaagattcattaggttgatttcattccatagcgaagtggcaatatctaccgcttcttccttcgagagcttagcgtaattatggaaataggaatccggatcggtaaacgccccttcccggaatttaagaaagcggttgatataccagcttttcaataattcttccggggcatcgacataaatagaaaagtcgacaaaatcggaaacgaatacatgatggggatcgtgcggataatccattccactttgcagaacattcagcccttcaagaattaaaatatccggttgcgcgacggttttgtcaccgttgggaataacatcataaatcagatgggaataaaccggcgcggttgcctgcggtacccctgatttgagatcggagacaaacttcaccaggcgatgcatatcataggactgcggaaagccttttttcttcattaacccacgttcttttaaaaccgagttagggtgcaaaaaaccgtcggtggtaatgagttcgacatggcgatgctccggccaacgactaagcaaagcttgcagaacgcgggcggtggtgctttttcctaccgcaacgctgccagcgatactgataatatagggaattcgctgaccattggtgccaagaaattgttcgagaacagcctggcgacgcaggttagaactgatatagaagttgagcaaacgcgacagcggcaaatagatctcggcaacctcttccagagagagatcttcgttgatgccttttaaccgcgtgatttcttcctcggttaacgtcatcgggacagaatcacgaagtgcagcccattggtggcggttaaattgtaggtacggtgtcattaacgtctgctctttttggctcataagcatgttcttactatcaccgaataccttgaaacggtgatgcttcacacgagttaatcaggacaatgggcaggagggtaacaccagattgccgggaataataagaaaaaaactcattgaatgctgctttctcgcgccagcatcacaagagaagaataagtttcttatgctttgcaaagcatggcctttgctaacaggctaggctagcggcctgaatcctttccgtcagcggtcagcatgcgatagaggtaaccggagatgatcggacagcgcctgaagcgccgaattgttggcgaatatttgcactccgctgcttgaaattacaccgttttttcgcgtgagagcacaaaatgtgagcaagagaacgttttatgcaaatttttagttgcatgaactcgctcctctccctagaatgcgcgctacttgatgccgacttagctcagtaggtagagcaactgacttgtaatcagtaggtcaccagttcgattccggtagtcggcaccataacaatttgggtggggttcccgagcggccaaagggagcagactgtaaatctgccgtcatcgacttcgaaggttcgaatccttcccccaccaccactttctggcgacgctttgcggagccggagttggttgggtaaactaatcagctcaatactaaagagagcagtctctttagtattacagaaagaactgggtagccgagtttcaggatgcgggcatcgtataatggctattacctcagccttccaagctgatgatgcgggttcgattcccgctgcccgctccagacgtgctgatatggctcagttggtagagcgcacccttggtaagggtgaggtccccagttcgactctgggtatcagcaccacttcttttctctccttccctgtttctcttctgttatgttcattcaacaagtcgggcatgttgcctggttgatgtggtgatatcaccgatttatccgtgtcttagagggacaatcgatgtctaaagaaaagtttgaacgtacaaaaccgcacgttaacgtcggtactatcggccacgttgaccatggtaaaacaacgctgaccgctgccatcactaccgtactggctaaaacctatggtggttccgctcgcgcattcgaccagatcgataacgcgccggaagaaaaagctcgtggtatcaccatcaacacctctcacgttgaatatgacaccccgactcgccactatgcgcacgtagactgcccgggccacgccgactatgttaaaaacatgatcaccggtgctgcgcagatggacggcgcgatcctggttgttgctgcgactgacggcccgatgccgcagactcgtgagcaca

SEQ ID NO: 92 - DNA, 3485 bp, Unknown
  source: /note="Description of Unknown: MKP2_coc_1 Mutant Bacteria sequence"
gactataacggccaggatgtgtgcggcattacggtgcactttttaccctgcgatgacgtgaaggtgaccaccagctgctggtcaccgagaaatgcgaactatccgataaaagagcccgtcaggatgaaggagcccgccgtatgtccgaagtagcacgccttcgtttccccggggtgacatcaccatcccttcattaccctcaaccgacagggagagtccgatgaaatctgcattaatcagcccgctgctggcgggtctgctgctgttaaccggctgcgcgcagcctgccgcacaggccggaggcggcggtggcggaacaataaaagccatcaaccacaccaaatgggcgatcaaccacttcagtgtcaacggccagtcgggcatcgattcaataggcccgtttcaggggggcggaggcggctgctgcttcagcgtgcccgcccgctggacgccgggtatgacggtgcgcgttgaatgggaaaccgggcagggttcatccgcgggtttcccggggtttgctgatgaggcgaaataccttgcctggaaaaaagggattgatgcccaaaagaggcagcacagcaaaaccgttccgctgcccgactataacggccaggatgtgtgcggcattacggtgcactttttaccctgcgatgacgtgaaggtgaccaccagctgctggtcaccgagaaatgcgaactatccgataaaagagcccgtcaggatgaaggagcctgccgtctgtccgaagtagcccgccttcgtttattcaggatggcatcaccatcccttcattaccctcaaaccgacagggagagtccgatgaaatctgcattaatcagcccgctgctggcggggctgctgctgttaaccggctgcgcacagcctgccgcacaggccggaggcggcggtggcggaacaataaaagccatcaaccacacaaaatgggcaattaaccacttcagtgtcaacggccagtcgggcatcgacattataggcccgtttcagggcggcggaggcggctgctgcttcagcgtgcccgcccgctggacgccgggtatgacggtgcgcgttgactgggaaaccggggtgggggatatggaaggatttcctggctttggcaatgatgaaaagtaccttgcctgggctaagaaaatgaaggcccagaaccggcagcacagcaaaaccgttccgctgcctgactataacagccaggatgtgtgcggcattacggtgcactttttaccctgcgatgacgtgaaggtgaccaccagctgctggtcaccgagaaatgcgaactacccgataaaagagcccgtcaggatgaaggagcccgccgtctgtccgaagtagcccgccttcgtttattcaggatggcatcaccttcacttaatcaccctcaaaccgacagggagagtccgatgaaatctgcattaatcagcccgctgctggcgggtctgctgctgttaaccggctgcgcacagcctgccgcacaggccggaggcggcggtggcggaacaataaaagccatcaaccacacaaaatgggcgatcaaccacttcagtatcaacggtcagtcgggcatcgacattataggtccgtttcagggtggcggtggcggctgctgcttcagcgtgcccgcccgctggacgccgggtatgacggtgcgcgttgactgggaaagtggtgaggcatcgactgaaggttttcctggatttgctgattcaaaaaaatacagagagtggagagataatttaaaacaaaacaaccgtcagcacagtaaaaccgtcccgctacccgactataacggccaggatgtgtgcggcattacggtacactttttaccctgcgatgacgtgaaggtgaccaccagctgctggtcaccgagaaatgcgaactatccgataaaagagcccgtcaggatgaaggagcccgccgtatgtccgaaataaccgaaattcatgccgcctgggtcccgccgccgtttccgccgcagggacgtctgccgggccgggcgctgcaggttgggcagaactgccatcagcagaacagcgacgagcggcgctatcaccaggaactgtgcctggctgccggacggcgcgtggagccgccgtgctgcaagacgctgcatatcagcctgtttttcgacggtaccggcaataacttaaatcatgacttttttatcgcgaagccgaaacatccgaccaatatcgcccggctgtttcgggcgactattggaacgggaacggctggcggggtgccgtctgacgatcagagcaagttgtttgatgatgacggcgggggagacgggaaatattttaaattctatatgcccggcgtgggcaccccgttcccggaagtgaatgacccggactattccaccatgggtctggtgggggcagtcaagggggaggatcggattaactgggcgctgctgcgcataatcgatgtgctgatgtttagtgccaccgaaaaatggctgaccaccacagagagtcgtcgttcactgaaagaaatgagcaccagctggaaccggctgtggtttggcggcagccataaccgctatgaagagttcactcgcttgctgaatggtcttgccccgaaactgatgccgatgctgattcagcctgaaccgggcaagccgaaactgacaggcatcaagctgtatgtctatggtttttcccgcggcgcggcagcggcgcgcacctttgtgcgctggctgagcgaactgctgccccctccggcggcggagggtgaaaaaccgccgcagtgcctgcagacaggcgggatgcagctgcccgtcagcgtggagtttctcggactgctggatacggtggcctccgtcggggtggcgcatgtggtgccggttgccgacgggcatatgtcctgggcagacggcacgatggagctgccggatgatgaaacctatggcgggctgataaaaaaatgtgttcacctggtctccgggcatgagcagcgtctctgctttccgctggactcggtgcggcgggcaaacggcaaatacccgccctgtgccagagaggtggtttacccggggatgcactcggatattggtggaggatatccaccgggggatcaagggaaagcgaatggtaaagatgatgcattattgctgtcgcagattcctttgaacgatatatataccgctgcttttagcgcaggggctccattaaaagtaccacaggatacgctgccagagttttttaaaaatgatgcctggagaaaaatgccattagatttgttagatgcgttttttgttgatgaggctctggtcaaccgcttcaacgcctggcgcgaactcaccctgggccaaaccacgccgaaaacgttcgatcccgaagcagcctctcactacgaaccacctgccgccggcggcagtctggaaaccgtcattgctgagcagatggcctggatcaccgcctggcgcatcgaccgctatgccagaggctcgatgctgaaaacgccct

SEQ ID NO: 93 - DNA, 3053 bp, Unknown
  source: /note="Description of Unknown: MKP2_coc_1 Mutant Bacteria sequence"
tactggctttataatgaccgttttccgccgctatccggtacagacgggcaatctccgcatccaccgttttatcccggttaatcagattatttttttgccgccagcgggcgtatttaaacaggacatcagtatcagcagacgcctcaggaataatctggtgtttacaggtaaacgccaggcgggtatgaatatcggtcagcgggttcatcggcgcgtccttgtgggtattgttctggtcacaggcggtcagtaccatgcagaataaaagtaagagtcgtttcatcaatccagatcgctcagcgttgatttgttgtaaaaaaatttaatcagcgatgctacgggtttgttctttttagtgccttgtaaatctttattttctttcagaatataaccccattcctcaaatgccttcgctggatcatcctgcccccctcgtccgttagtatgcatattccataaccgccgtcgtaaatcccgcgtcacgctggcccattcatgggcaatattcatttcactgtccacccgcatactgcgcgtgttgatattcgctgaaccgtgggtggtaaatacatcattcacaatcatcagcttcgagtgaatatataccggcacccattcctccggtggtgagtccggagccaccagcgagcagatatgaaccttcagtccggggcgttcctccggcaggatttcactgctctgaatttcatcggccttctttttaaaatcagcaagtttctcactcatctcgcgattacgtttattgatatctccggggtcgatataaccaacagaaccaccgaacgttgcgttgctgagttgtccgatcttacgcagtttagtcacttcagggataatgtttgctcgacccagcacctcaagcatccgctgggtattcaccgtacccgccccaatgccttcatcggttacgttagtcacaacaaacaaatgcagttcgcgtcccactttactctgtctttccgcaacctgattaattaactctgccagcggcggccagcgaaaatactgattttcgatatagataaactgcgtcgcattatttacggcctgcagataaagcgtttcaatatcatgctttcctgcctgcgcctgagtgcgcaacagttgcgccatcaccggcgtaccgtgtagcgcacgcagtttcagctttttcgcgatggacacgctatcacgaatagtcagcagatcctgaccggtttccttctcccacgccatggcaaaattatgatgcagatgctccagaatcgggccggttacccgactggagatatcctgccgcggcagcttaccgttagcgcctaagcggggatccatattattgcccgggcgaaacagtgcagaatgtttatccgtatcccagtactcatcaagcatgttgtgacccataacaaaaccaaccgcagactccggcagttcgtagtcaaccagcaccgttttttgatgatgggtcacggtacctgcaagagtaagcatcgtgtcagggctgatatccggatcaagcgccatattcgcagcgcgataggcaatttcagctctctccaggaaattaaacccgcgcccgacaaacaaaggagaaagtgagcttaatttctcttgtcgttgcgctatgggtgcggcagcaatttccgctatcccggcctgtcccttttttaactgatgatcggaccattcccctgacagagaatactgactgaaccattgtcggtcataggcataacgttcatccgtagtactctggcctttccggtccttataacgaatgactcccttacccggtaaattggcctctcctcccacacctgcggcattacagggcatttcccagcccagaatacgcacctggactttttttgtttccgcaatcttgcaaagtaattcgccgatacacagcgactgaccatcacggataaagtacatcgaaggctgaaatccccagcaaataatatccaccgttttctgtgcattcatgatggcatgataaacggcagcaaacgcttcttccccgtttaccagcggcttataggtcgccggcatcggtgagtattctgtattctgcacaaaccagggagaggtgatcatacattgacgggtgtcaaccgtggcaatcggggtaataatgtcttcctgagtcattatattttatccttttaagtgagacttttgccattcagcgaggaaattaccgtcgtggcagtctccttatttttatctttccgttataagttttggtttcagcgtctttattgcaggactttctttctgtttgtgatggttcagggaccgggcaggaaaaaacgctttttactggccagctgacctgttgtatttcccggagtccggtgacgtcggcagcggcctgcccgtcgccgggttcagttgtttcgctttcgcaagtttctctatcagcgctgcgctgggcttcggcggcggcacattggcctcgcgctcttccagccatttcagtttgccgtcccactcagggagcagcgcgggtggtagcgggacgatatcattgatttccgggaccgtggggctggcgtaggaataattgctcaggatcttcgctatctgtttatagcgcctggcacgttccggatccttctgctgagccagataatagagcctgtctccaggttcaggaccactaaatccatttgctaaaaacctcgctgaactcccgttacccgcagcgactcccaactggaaggcttctattgcactctgataatcctctttaccttgtaaattaatacccagcattgccgccgccttcccctctccctgctccgcggcgcaacgacgcatctggtgcgcaatattgggcgccctgtccaccggcgccagcttatcccccacatatgcctgcgcctgcggattgccctcatccgccgccttacggtaatatcgcagggcaagcgccggatcctgctgcagccccgcgacgccccgttccagatagatagcggtcagatagtacccggtcgccaccccggcagcgataagctgctggctcagccggaactgctcatggc

SEQ ID NO: 94 - DNA, 2873 bp, Unknown
  source: /note="Description of Unknown: MKP2_coc_1 Mutant Bacteria sequence"
aacgttccttcaggagacttaaagtctcagggagaactcatctcggggcaagtttcgtgcttagatgctttcagcacttatctcttccgcatttagctaccgggcagtgccattggcatgacaacccgaacaccagtgatgcgtccactccggtcctctcgtactaggagcagcccccctcaattctccagcgcccacggcagatagggaccgaactgtctcacgacgttctaaacccagctcgcgtaccactttaaatggcgaacagccatacccttgggacctacttcagccccaggatgtgatgagccgacatcgaggtgccaaacaccgccgtcgatatgaactcttgggcggtatcagcctgttatccccggagtaccttttatccgttgagcgatggcccttccattcagaaccaccggatcactatgacctgctttcgcacctgctcgcgccgtcacgctcgcagtcaagctagcttatgccattgcactaacctcctgatgtccgaccaggattagctaaccttcgtgctcctccgttacgctttgggaggagaccgccccagtcaaactacccaccagacactgtccgcaaccccggtcaggggccaacgttagaacatcaaacattaaagggtggtatttcaaggttggctccacgcagactggcgtccacgcttcaaagcctcccacctatcctacacatcaaggctcaatgttcagtgtcaagctatagtaaaggttcacggggtctttccgtcttgccgcgggtacactgcatcttcacagcgagttcaatttcactgagtctcgggtggagacagcctggccatcattacgccattcgtgcaggtcggaacttacccgacaaggaatttcgctaccttaggaccgttatagttacggccgccgtttaccggggcttcgatcaagagcttctccttacggataaccccatcaattaaccttccggcaccgggcaggcgtcacaccgtatacgtccactttcgtgtttgcacagtgctgtgtttttaataaacagttgcagccagctggtatcttcgactggtctcagctccatccgcagggacttcacctacacaccagcgtgccttctcccgaagttacggcaccattttgcctagttccttcacccgagttctctcaagcgccttggtattctctacctgaccacctgtgtcggtttggggtacgatttgatgttacctgatgcttagaggcttttcctggaagcagggcatttgttacttcagcaccgtagtgcctcgtcatcacacctcagccttgattatccggatttgcctggacaaccagcctacatgcttaaaccgggacaaccgtcgcccggctaacatagccttctccgtccccccttcgcagtaacaccaagtacaggaatattaacctgtttcccatcgactacgcctttcggcctcgccttaggggtcgactcaccctgccccgattaacgttggacaggaacccttggtcttccggcgagcgggcttttcacccgctttatcgttacttatgtcagcattcgcacttctgatacctccagcatgcctcacagcacaccttcgcaggcttacagaacgctcccctacccaacaacacatagtgtcgctgccgcagcttcggtgcatggtttagccccgttacatcttccgcgcaggccgactcgaccagtgagctattacgctttctttaaatgatggctgcttctaagccaacatcctggctgtctgtgccttcccacatcgtttcccacttaaccatgactttgggaccttagctggcggtctgggttgtttccctcttcacgacggacgttagcacccgccgtgtgtctcccgtgataacattcttcggtattcgtagtttgcatcgggttggtaagtcgggatgaccccctagccgaaacagtgctctacccccgaagatgagttcacgaggcgctacctaaatagctttcggggagaaccagctatctcccggtttgattggcctttcacccccagccacaagtcatccgctaatttttcaacattagtcggttcggtcctccagttagtgttacccaaccttcaacctgcccatggctagatcaccgggtttcgggtctataccctgcaacttaacgcccagttaagactcggtttccctgcggctcccctatacggttaaccttgctacagaatataagtcgctgacccattatacaaaaggtacgcagtcacacccgaaggtgctcccactgcttgtacgtacacggtttcaggttctttttcactcccctcgccggggttcttttcgcctttccctcacggtactggttcactatcggtcagtcaggagtatttagccttggaggatggtccccccatattcagacaggataccacgtgtcccgccctactcttcgagttcacaacctgtgcattttggtgtacgggactatcaccctgtaccgtcggactttccagaccgttccactaacacacaagctgattcagactctgggctgctccccgttcgctcgccgctactgggggaatctcggttgatttcttttcctcggggtacttagatgtttcagttcccccggttcgcctcgttaacctatgtattcagttaacgatagtgcaacgaattgcactgggtttccccattcggacatcgccggttataacggttcatatcaccttaccgacgcttttcgcagattagcacgtccttcatcgcctctgactgccagggcatccaccgtgtacgcttagtcgcttaacctcacaacccgaagatgtttcacttctgattgcgaaaatttgagagactcgaacacac

SEQ ID NO: 95 - DNA, 2314 bp, Unknown
  source: /note="Description of Unknown: MKP2_coc_1 Mutant Bacteria sequence"
cctttcgggttgcgggggtgcggagatgggtataagatacctatcctggtctgccgcctgctgccgtttgtcccgtttgacccggtcagctatgccgccggactaacctcgctgcgcttctggccctttatgctggccaccggcgtgggccagctcccggcgactatcgtttattcctgggccgggagtctgctcaccgggggcaccttctggctggccaccgggctttcgctgctttttgccctggcggtggtcatctctatcgccaaaaatatttaccgtgaacgtcataagagatcgtcgccatgagcttacccccgctggattctgtccccctgatccttcgtccgcaggcctggctgcaccgccggcattacggccaggtgctgagccccattcgctggtggggtcggatcccgtggctgttttacctggtttcgctgttcgtgggctatattgaacgccgccgctcgccgctggatccggtgctgcgctcgctggtcagcgcccgcatcgcccagctgtgccactgcgaattctgtatcgatatcaccagcatgaccctcgcggcgcggagcgggagccaggacaagctgctggcggtcgccgactggcgcagcagtacgctgttcagcgaaaaagagcgcctggcgctggcctatgccgaagccgccacccagacgccgccggcggtggatgatgccctgcgtagcgcgatggccgcgcattttgacgcccgggcgctcaccgagctgaccgccctgatcggcctgcaaaatttatcagcgcggttcaatgccgcgatggcgatcccggctcaggggttgtgccagatacccacctcttcctcgcagaataaggagtaacgatgcgccgtttgcgtgattacagcctctgtctgtgcctgctgctgctctggccgctggcggttaatgccgacgacagctggcggcagattcagacggaagctcgcggacagaccgtctggtttaacgcctggggcggcgatccggccgtcaatcgctatctggcgtgggtcagcgaagaggtcaaacgctattacgcaatcgacctgcgtattgtgcctgtcgccgacgccgccgacgcagtgaaacgcatccagaccgaggcgcaggccggtcgtcgccagggcgggtcagtggatctgctgtggatcaacggcgaaaactttcgcacgcttaaacaggccaacctgctgctcaccggctgggccgaatcgctgcccaactggcgctatgtcgatctgcaaaagccggtacgggaagatttttcagtcgccaccgagggcgcggagtcgccgtggggcagcgcccagctgacgtttatcgcccgccgcggacaaacgccgcagccgcccaccagcccgcaggcgctgctggccttcgccagagcccatccgggcagcgtaacctacccgcggccgccggacttcaccggtaccgccctgctggagcaactgctgatcgcgctcaccgaccagccagccgccctgcgccagccgccgcagccggcaaccttcgcggcggtcaccgccccgctgtggcgctatctcgatgcgctgcacccggccctgtggcgggcgggcaaggatttcccggcgtcgccggcgcggatggacgccatgctcaaccagggcaccctccgcctgtcgctgacgtttaacccgctgcacgcccggcagaaagccgccagcggcgaattaccgacggacagctacagcttcggctttaccgtggggaccctcggcaacgtccatttcgttaccatcccggctaacgcccgcgctgtcgctggcgccaaagtagtggccaatttcctgctctcccctgaggcgcaattgcgcaaggccgatgccgccgtctggggcgatccgagcgtactggatccgcagcgtctgcctgacggccagcgccaggcgctggcggcagccctgccgcaggatctgccgccggtgcttgccgagcctcacgcggcatgggttgacgcgctggagcaggaatggctgcgccgctacggtacccactgatcctgctggcctggggggcgatggcggcgatctatctgccgctgctccccgccgccggggaactggtgggcgctgcgcgctcctgtcgctgatacccatctgccgcttcctatgaagatctgagggtggagctcgctggtcacattaaaattcaaaaaaacaccaaggccacgaacaaacgcacaccgcacacaagcacacaccacactaccagaacggcccacggacacaaacctcacatgcgccacagagcatctcacacccgcc

SEQ ID NO: 96 - DNA, 1788 bp, Unknown
  source: /note="Description of Unknown: MKP2_coc_1 Mutant Bacteria sequence"
ttcacgcattacaatgaaaaccacccgcacagcgcgctgggatatcactccccgagggaataccggcggcagcggacatcgttaacttaagatacaaaagctgttcggagatggagggtcaagatcagcgattcagagcgaacaagcacatcggaagtatagtctttaattttatcccgaaaaatcaggtaagatacgctctcagataatacaaaaaaaatataccagctgaaagaatcgataaagagaggactgatagattatgtatccactttccagggctaatcaaacgttccagcttacgactaaccatgcagatctcccctcaaattgaaaagatataaagctatattttcgccaacttcactgaccgattagctggcactgaacatactattccagtatacctattcttgccttactcatcccgggtatgaatcaaataatgtgacatggttcggatagatactggttatgatttacagagataattcatgcgttattaatagcctcgtgaaggctccagatgcatggtgcaacttttaagcgatgcatgtaatgcggttttttacccactagtatagaacgaatattcatttcttgctgggcgatcgcacactaaggtgtacaccaaaataaagacactcttttttgaaaaaaaaagagtaaaatgttgtgtgacatcggcattacaaaacgaaaattcatgttataatcgggttattattgataatgttacgcattgcaacgtgtaaccggatatctgcatttgggtgaagatagcttaagatggataaaaaatatgatttttcgctcagttatgaagccttaacacgggtatgtgaaaatgcaatatgtgaacatattcgcagagcaggttctctggaagggttaggtttcgcacttgaatatacaaaggcctatgctatcctggaagtatggtctctgctggcagctgctggcgatacatttccagctctcattgagaaagacagaatatatctgttgcaactaatttccgggaaaaataatatagagctacattaaatcataaattatttggcagaacatctccgtttttacttaacgcccgccggaatcactgacgtgaggaaaatgaaatttgttgtgcaataataattctgattattctggtcagtcggattggccgtagagtttcagtattcttgtgcgatgacaaggcgggataactaccgtcatcgcgccctgtctggaatcaatgacttcagttttagatataaagaaaaaacaatatacacattagataaaagtgagaaaaactcgtcctgtataacatcaggtagagtaaagcatttatcattaacttactgaagacggaataactacatttatacccgaaagctattctctttgaatctactttagatttctattatttctgattgccataggcttttttacagtaccctgtgatttccttgacttcactttatattttattatcatcccatataataaaaccagcgaaatagacaaaacaacatacaataacataaaaatacctgtgttaacaattaaaaaaggagattaggtcgagtccgtgagtgattttaacatatacgcgaattgatacaactcatatgtgctagccagtttcatctttttctttatttcttttataggctttgttgaataaatcagatttcgggtaagtctcccccgtagcgggttgtgttttcaggcaatacgcacgctttcaggcatacctgctttcgtcattttgttcagcgctcgtaccagggccat

SEQ ID NO: 97 - DNA, 1741 bp, Unknown
  source: /note="Description of Unknown: MKP2_coc_1 Mutant Bacteria sequence"
ccggaaatcaacgatatcgtgccgctgccgccggccccgctgccggaatgggacggcaagctgaagtggctggaggaatgggaggcaaatatcccgccgccagtgcctgatgcagcgctgatagagaaactggcgaaagcgaaacagctgaacccggcgacgggcaggccgctgccgacgtcaccggactttgagaaggacagcgtggcgcggctgcagtgccgcagcggtgagccctgcccgcaaagcggctactggcagccggcgtggcggccccgtgaaggaatgagcgaacatgccatccgttatttccgcgagggagacatcatgccggtggagaaggtgaccttcgttcgcccacgtccctggccgctgcgcgacagactggtcgtggaagcgcaggagacggtgtggcgccgtgtcggcgaggcataagctctgcagaagataaggaaaaggagagcgtcagggaatgaaagggataacgacatggatagtgctgggcagcctgctgctgtcaggctgtgaccagaaaagcatccacaaggatgtgccggtgaacccgctgaccgatattaatgcccgcctggcgtttacctgtaaacatcagattattcctgaggcatctgctgatacagatgttctgtttaaatatgcccgctggtggcagaaaaataacctgattaaccgggataaaatggtggatgcggaaattgcgcgactgtatcgcatcgcggcggaaaacgggcattacaaagccagtattaacctgcagaacggtgcgctgcgcgggcgtttttcgctgagcagcactgaacttttgcgtctgagccaacaactgattgatgcgaaggttgccgccggctactactttattgccatctatctggagcacggtgcggcaggactggcgaaggatccagagatggcgctgcgctactatcgtaaggcggcagatgaagggaatccccaggcccaggcttatgttggtgaaaaactgtttccggccaaaatggcaccacaagtggccatgcagatgtttcaatgtgccgctgaacagggggaagggaaagcagctaattcgttaggaaatatgcttgcaatttacaaaaaatatccggaggcagttgaggttttccaactgggcgttgcagcaggagattcaacctcagccggtttcctgatgcacggattctccggacctgaaccaacggacaggctgttctatctggcattggaaaaggatcccgagcgtgcccgtcgttatgagcagatagtcaaggtcctggcgaaatactcatgggcccatcctgtcgtcccggaaatcaacgatatcgtgccgctgccgccggccccgctgccggaatgggacggcaagctgaagtggctggaggaacgggaggccaatatcccgccgccagaacccagcgcagcgctgatagagaaactggcgcaggcgaaacagcttaacccggcgacgggcaggccgctgccgacgtcaccggactttgagaaggacagcgtggcgcggctgcagtgccgcagcggtgagccctgcccgcaaagcggctactggcagccggcgtggcggccccgtgaagggatgagcgaacatgccatccgttacttccgcgagggggacatcatgccggtggagaaggtgaccttcgttcggccacgtccctggccgctgcgtgacagactggtcgtggaggcgcaggagacggtgtggcgccgggtc

SEQ ID NO: 98 - DNA, 1656 bp, Unknown
  source: /note="Description of Unknown: MKP2_coc_1 Mutant Bacteria sequence"
acaatctgtgtgagcactacaaaggcaggttctttaaggtaaggaggtgatccaaccgcaggttcccctacggttaccttgttacgacttcaccccagtcatgaatcacaaagtggtaagcgccctcccgaaggttaagctacctacttcttttgcaacccactcccatggtgtgacgggcggtgtgtacaaggcccgggaacgtattcaccgtagcattctgatctacgattactagcgattccgacttcatggagtcgagttgcagactccaatccggactacgacatactttatgaggtccgcttgctctcgcgaggtcgcttctctttgtatatgccattgtagcacgtgtgtagccctggtcgtaagggccatgatgacttgacgtcatccccaccttcctccagtttatcactggcagtctcctttgagttcccggccggaccgctggcaacaaaggataagggttgcgctcgttgcgggacttaacccaacatttcacaacacgagctgacgacagccatgcagcacctgtctcacagttcccgaaggcaccaatccatctctggaaagttctgtggatgtcaagaccaggtaaggttcttcgcgttgcatcgaattaaaccacatgctccaccgcttgtgcgggcccccgtcaattcatttgagttttaaccttgcggccgtactccccaggcggtcgatttaacgcgttagctccggaagccacgcctcaagggcacaacctccaaatcgacatcgtttacggcgtggactaccagggtatctaatcctgtttgctccccacgctttcgcacctgagcgtcagtctttgtccagggggccgccttcgccaccggtattcctccagatctctacgcatttcaccgctacacctggaattctacccccctctacaagactctagcctgccagtttcgaatgcagttcccaggttgagcccggggatttcacatccgacttgacagaccgcctgcgtgcgctttacgcccagtaattccgattaacgcttgcaccctccgtattaccgcggctgctggcacggagttagccggtgcttcttctgcgggtaacgtcaatcgccaaggttattaaccttaacgccttcctccccgctgaaagtgctttacaacccgaaggccttcttcacacacgcggcatggctgcatcaggcttgcgcccattgtgcaatattccccactgctgcctcccgtaggagtctggaccgtgtctcagttccagtgtggctggtcatcctctcagaccagctagggatcgtcgcctaggtgagccgttaccccacctactagctaatcccatctgggcacatctgatggcatgaggcccgaaggtcccccactttggtcttgcgacgttatgcggtattagctaccgtttccagtagttatccccctccatcaggcagtttcccagacattactcacccgtccgccgctcgtcacccgagagcaagctctctgtgctaccgctcgacttgcatgtgttaggcctgccgccagcgttcaatctgagccatgatcaaactcttcaatttaagtttgatgctcaaagaattaaacttcgtaatgaattacgtgttcactcttgagacttggtattcatttttcgtcc

SEQ ID NO: 99 - DNA, 1587 bp, Unknown
  source: /note="Description of Unknown: MKP2_coc_1 Mutant Bacteria sequence"
aatattcctggataacgtcaagcgcgctgacgagctggttaacggtccggccggaacggttaacgaccgcgcaggcgaaccgctcgatacctggcgccagatgatggctaagaatgacgaagttcggcagaacatcatcccgctcagtaagcagtatcaaacgctggaggctgcacaggcggatatcgcgaatattccggtgggctcgaccacgtactaccgtagcccggacgacagcgcgctcgcaatcgaggtgatgaacgttggcgggacgctgcagcctaccgggcgccgtatgccttcatatgacctggtggcggccatcagccaggcagtaacggcggaggtcatggcccgaacaggtctgatattcagcagcgatgaccagaccatgctctctttatgcgatgaatggggatatgaagccgggcggatcactgagaacagtttcgaaacgagaaaactcagactgatccagtcagagacaggtccgctactgacgctggttgatgatttcggttatgcggtgaatctgttttccgaaagaggcgcgctggttgccggaaataatgagttgtcagattcagagtcgcttatttccttccctgatgaattcgggaacgagctgattctggttgataagcaggggcggctgtatgccggggataacatcatatttgacgcgccggactgggcacgctgtaccgttgaccccttcgggtatgttatcgaaggcgtgaaattaaatggtgatgtggtcagcaagaatggaggcggcggtagcgtcgaacctgtgccctctgtactggagagcagcgcagcagcgcactggctgtttggctatgagtccacgtcgtatacaagccgtgtggggtataaaacgctgacaccgcaggccgcgccggaattcaataacaattacatttcgatctccgcctggggcggcgcgctgatgaccgatatccccgatgccggggaatacactgtctgcgcggtggtcagggtacctgaacaggccccgttaaccgactgcgtggtgatttacggcacacagaacgggtattcacttcgggatgacgacgacacctacaccggcaatcagctgtcgatgttttccgacagggatgatcggcgatggctgcgtgtgaaaaattccggttaccggggaacgtcccggcattatccgacactacagccgcctgtcggccagtggctgttcatttcacatgtggtgaaacttgagggcagcggactgcgttaccaggcaatcagcgtgggtggcgaagaatatcagatgctgcgcgaggccgatgcagatcgcctgattctttccggccgcaacatcgccattggcaacgggtggtgtgataacgccatgttcaaaaccaaaaatctcgacatcgctgaattcatctacttcgaccattcgctttctgcgcaacaggtccaggccgtttatcacaattcccgccagcgtatggctgagcgcgcacttaacttacagtaaaggagtctccctatgggcacagcaattatggccgctggcactgatgcatcagcgtacgcaaataattatcttccgccggt

SEQ ID NO: 100 - DNA, 1336 bp, Unknown
  source: /note="Description of Unknown: MKP2_coc_1 Mutant Bacteria sequence"
tgatgtagccccctgaaacaccggacagtagctgtatctccagataagagataggcttgaatatatgtctaacactaacgccaattttgagatgaccgggatcctgttagggcaagaagcccgtaaacgtaaaactcctcaggagaagatcgccattatccagcagacgatggagccgggcatgaatgtctcccatgtcgcccgcctgcatggtatccagcccagcctgctgtttaagtggaagaagcaatatcaggaaggcagcctcaccgccgttgcggccggagaggaagtcgttcctgcttctgagcttactgctgctctgaagcaggtccgggaacttcagcgccttctgggcaagaagacgatggaagttgagatcctgaaagaagccgtggagtacggccagtcgcgaaaatggatagcgcacgcgcccttgttgccaaaggacggggaatagccctggtcagccgcaccatgggcgtgtcgcgtgcgcagctgtcactgcggattaaccgttctgccgactggcaggacaagcgctgtaaccggcgtaatgacgaagcagacgaagaaatactgtcggctatcctcgacatcatcagcgatatgccgagttatggttatcgacgcgtgtggggcatcctgcgcaagcaacgtcgcacagagggacagccacctgtgaacgccaaacggctttacaggataatgagcgagcataacctgttgttgttgcatgacaaaccagagcgaccgaagcgtgaacataagggcaagatagcggtggcagaaagcgatatgcgctggtgttcagatggcttcgagttcggctgcgacaacggcgaaaaactgcgggtaacgttcgcgctggactgctgcgaccgtgaggccatagactgggcagcaagcacgggaggctatgacagttcaaccgtgcaggatgtgatgctgaggtcggtggaaaagcgcttcggcgacaggttgcccgatacagcggtgcagtggctgacggacaacggttcagcgtataccgcgtatgaaacgtggaggttcgcgagagagctgaatctggagccctgcacaacagcggtgagcagcccgcagagtaatggcatggccgaacggttcgtgaaaacgatgaaagaagactatatcgcgttcatgccaaaaccggatgtgagaacagcactgcgaaaccttgcagtagcgttcacgcattacaatgaaaaccacccgcacagcgcgctgggatatcactccccgagggaataccggcggcagcggacatcgttaacttaagatacaaaagctgttcggagatggagggtcaagatca

SEQ ID NO: 101 - DNA, 1059 bp, Unknown
  source: /note="Description of Unknown: MKP2_coc_1 Mutant Bacteria sequence"
ggctttgttgaataaatcgaacttttgctgagttgaaggatcagatcacgtatcttcccgacaacgcagaccgttccgtggcaaagcaaaagttcaaaatcaccaactggcccacctacaataaagccctcatcaaccgtggctccataactttctggctggatgatgaagctattcaggcctggtatgagtcagcaacaccttcttcacgaggcagacctcagcgctattctgaccttgccatcacgactgtgctggtcattaaacgcgtattcaggctgaccctgcgcgctgcgcagggctttattgattccattttttctctgatgaacgttccgctacgctgcccggattacagctgtgtcagcaggcaggcaaagtcggttaatgtcagtttcaaaacgcccacccggggtgaaatcgcacacctggtaattgattccaccgggctgaaggtcttcggtgaaggcgagtggaaagtcaaaaagcatggccaggaacgccgccgtatctggcgtaagctgcatctcgccgttgacagtaaaacacatgaaatcatctgcgctgacctgtcgctgaacaatgtgacggactcagaagccttcccgggtcttatccggcagactcacagaaaaatcagggcagcatcggcagacggcgcttacgacacccggctctgtcacgatgaactgcggcgtaagaaaatcagcgcgcttatcccaccccgaaaaggtgcgggttactggcccggtgaatatgcagaccgtaaccgtgcagtggctaatcagcgaatgaccgggagtaatgcgcggtggaaatggacaacagattacaaccgtcgctcgatagcggaaacggcgatgtaccgggtaaaacagctgttcgggggttcactgacgctgcgtgactacgatggtcaggttgcggaggctatggccctggtacgagcgctgaacaaaatgacgaaagcaggtatgcctgaaagcgtgcgtattgcctgaaaacacaacccgctacgggggagacttacccgaaatctgatttattcaacaaagccta

SEQ ID NO: 102 - DNA, 911 bp, Unknown
  source: /note="Description of Unknown: MKP2_coc_1 Mutant Bacteria sequence"
gcgcacgtagactgcccgggccacgccgactatgttaaaaacatgatcaccggtgctgcgcagatggacggcgcgatcctggttgttgctgcgactgacggcccgatgccgcagactcgtgagcacatcctgctgggtcgtcaggtaggcgttccgtacatcatcgtgttcctgaacaaatgcgacatggttgatgacgaagagctgctggaactggttgagatggaagttcgtgaactgctgtctcagtacgatttcccgggcgacgacaccccgatcgttcgtggttctgctctgaaagcgctggaaggcgacgcagagtgggaagcgaaaatcatcgaactggctggccacctggatacctatatcccggaaccagagcgtgcgattgacaagccgttcctgctgccgatcgaagacgtattctccatctctggtcgtggtaccgttgttaccggtcgtgtagagcgcggtatcatcaaagtaggtgaagaagttgaaatcgttggtatcaaagaaaccgcgaaaaccacctgtactggcgttgaaatgttccgcaaactgctggacgaaggccgtgctggtgagaacgtaggtgttctgctgcgtggtatcaaacgtgaagaaatcgaacgtggtcaggtactggctaagccgggcaccatcaacccgcacaccaagttcgaatctgaagtgtacatcctgtccaaagatgaaggcggccgtcatactccgttcttcaaaggctaccgtccgcagttctacttccgtactactgacgtgactggcaccatcgaactgccggaaggcgtagagatggtaatgccgggcgacaacatcaaaatggttgttaccctgatccacccgatcgcgatggacgacggtctgcgtttcgcaatccgtgaaggcgg

SEQ ID NO: 103 - DNA, 673 bp, Unknown
  source: /note="Description of Unknown: MKP2_coc_1 Mutant Bacteria sequence"
ccgtagtggatgtagttcccggcagcgtcttcgttgatcggcttagagccggaccacagggtcaggttggacggcgcgagatctgcggagccgccgaggaattccggcagcagcgggccgaaagcttcgatggcgttctgcgaggctttacggctggcgattttcgccgggttggcctgcagcttcgcgatgaactcgttagctttcgcgtcgaagtcagacggcatttcgcctttcatacggcgggtgaattcggctgcttcctgcgggaaggctttggcgtaggcagcgaacttctcattccacaccgcttctttcgcctggccggcttctttggcatcccactgggcatagatgtcagacgggatgtcaaacggcgcgtgtttccagcccagcgctccgcgggtcagggcgatttcggcgtcgcccagcggcgcgccgtgggagtcgtgggtaccggctttgttcggcgaaccgaaaccgatgatggttttacacatcagcagggacggtttgtcggtgaccgcccgcgcttcttctaccgcgcgtttgatggcgtcagcgtcgtgaccgtccacgccgcgcaccacgtgccagccgtaggcttcaaagcgtttggcggtgtcgtcggtgaaccagccttcaacgtggccgtcgatggagatgccgttgt

SEQ ID NO: 104 - DNA, 671 bp, Unknown
  source: /note="Description of Unknown: MKP2_coc_1 Mutant Bacteria sequence"
ggcctcaagttcagcggctacgcccgctatggcgcccacttccagaccggcgaccagaaatatgtcggcgtcgacggctcctataacggcgcctcggcgatcggccgtctgggcaacgaaagcaacggcggcgaattccagatcagcaaggccttcaaaagcgcgcagggggctatctgggatcttaacgtgatgttcgaccactggagcgacgaagttaacctgaagaaggcctacgtcggggtcaccaacgtgctggaatccaaccccaacgcctatatctgggccggccgcgacttccaccagcgtccgcaacaggggatcaacgactacttctggatgaaccacgacggccagggcgccggggtgaagaactttgatatcggcggcgtgcagttcgacgtggcggcggtgtcgcaggtgaaatcctgtagtccggaagtgatggccgacgagaccaacccgtcgcgcatcacctgtaccggcagctccgacaccggcgacaacggccactacgcgctgaccaccaaaacccacaacatcaaggccgggccgatcgacgtcgaggtgtacgccaactacggctttgactcaaaggcggtggacagcgacgcgcgtctcgaagcctggcagggcgggctggtgctgagccacaccaacgacagcggggt

SEQ ID NO: 105 - DNA, 666 bp, Unknown
  source: /note="Description of Unknown: MKP2_coc_1 Mutant Bacteria sequence"
tctctatcagcgctgcatcaggcactggcggcgggatatttgcctcccattcctccagccacttcagcttgccgtcccattccggcagcggggccggcggcagcggcacgatatcgttgatttccgggacgacaggatgggcccatgagtatttcgccagcacagcacctatctgctcataacgacgggcacgctccgggtctttctccagtgccagatagaacaacctgtccattggttcaggtccggaaaatccgtgcatcaggaaaccggctgaggttgaatctcccgctgccacacccaactggaatgcctcagttgcctgctgaaatcgcttattatttttcaggttaacacccagatcactggatacctctctctctccctgttcagcagcacagcgacgcatctgacgggatatatccggcgcaatatcaatcggagcgagtttatcccccacatacgcctgcgcctggggattcccttcatctgccgccttacgatagtaacgcagcgccatctccgggtcctgcgccagtcctgccgcaccgtgctccagatagatggcaataaagtagtagccggcggccaccttcgcatcaatcagttgctgactcaggcgcagacgttcatggctgctcagcgcaaagcgcccgcgcagcgcgc

SEQ ID NO: 106 - DNA, 638 bp, Unknown
  source: /note="Description of Unknown: MKP2_coc_1 Mutant Bacteria sequence"
cgtttgatggcgtcagcgtcgtgaccgtccacgccgcgcaccacgtgccagccgtaggcttcaaagcgtttggcggtgtcgtcggtgaaccagccttcaacgtggccgtcgatggagatgccgttgtcatcatagaacgccaccagtttacccagtttcagggtaccggccagggagcacacttcgtgagaaatgccttccatcatacagccgtcgcccatgaaggcgtaggtgtagtggtcgacgatatcgtgtcccggacggttgaactgcgccgccagggttttctcggcgatagccatcccgaccgcgttagcgataccctggcccagcggaccggtggtggtttccacgcctgcggtgtagccgacttccgggtgacccggagttttggagtgcagctggcggaagtttttcagctcttcaatcggcagatcgtagccagtgaggtgcagcaggctgtaaatcagcatcgaaccatggccatttgacaacacaaaacggtcacggtcagcccaggccggattgttcgggttatggttcaggaaatcacgccacagcacttcggcaatgtcagccatacccatcggggcccccgggtggccggatttggctttctgtacagcgtccatgctcag

SEQ ID NO: 107 - DNA, 628 bp, Unknown
  source: /note="Description of Unknown: MKP2_coc_1 Mutant Bacteria sequence"
tgccatccgttacttccgcgagggggacatcatgccggtggagaaggtgaccttcgttcggccacgtccctggccgctgcgtgacagactggtcgtggaggcgcaggagacggtgtggcgccgggtcagcgaggcataagctctgcagatgatgaggaaaaggagagcgtcagggaatgaaagggataacgacatggatagtgctgggcagcctgctgctgtcaggctgtgatcagaagagtgtccacatggaggcatcttcagatacagacccgctgagcgatataagttcctctccggcgtttacctgtcagcatgagacacttcccgcgccctccgcggataccgatgttctgtttaaatacgcccgctggctgcagaaaaataacctgctgaagcaggacaagagcgtcgatgcgcaaaccgaacggctgtaccggatagcggcagagaacgggcactataaggccagcattaatctgcagaacggcgccctgcgctggcagttttcgctgagcagccatgagcagttccggctgagccagcagcttatcgctgccggggtggcgaccgggtactatctgaccgctatctatctggaacggggcgtcgcggggctgcagcagga

SEQ ID NO: 108 - DNA, 619 bp, Unknown
  source: /note="Description of Unknown: MKP2_coc_1 Mutant Bacteria sequence"
agccccactgttcgtccatttcagcgcagacaatcacatcactgcccggttgtatgcgcgaggttaccgactgcggcctgagttttttaagtgacgtaaaaccgtgttgaggccaacgcccataatgcgtgcactggcgcgacatccgacgccattcatggccatatcaatgattttctggtgcgtgccgggctgagaggcggtgtaagtgaactgtagttgccatgttttacggcaatgagagcagagatagcgctgatgtccggcagtgcttttgccgttacgcaccacgccttcagtagcggagcaggaaggacatctgatggaaatggaagccacgcaagcaccttaaaatcaccatcatacactaaatcagtaagttggcagcattaccaatcatctgttctccaatgactggtctaaaaactagtattaagactatcacttatttaagtgatattggttgtctggagattcagggggccagtctagtgatcttgaccctccatctccgaacagcttttgtatcttaagttaacgatgtccgctgccgccggtattccctcggggagtgatatcccagcgcgctgtgcgggtggttttcattgtaatgcgtgaa

SEQ ID NO: 109 - DNA, 607 bp, Unknown
  source: /note="Description of Unknown: MKP2_coc_1 Mutant Bacteria sequence"
gttccggtcagcgtcccgcagggcaaaaagccgccgcgagtcgtgactgacgatgagcaaccgcgcccggagaccagcgagcagcagctggcccagctgcgcccggcgtttcgcccggctgacggcagcgtcaccgccgggaatgcctcgtcgctgaacgacggcgccgcggcggtcctgctgatgcgtgtcgataaagcgcgcgagcttgggctgccggtgctggcgcgcattgtcagctcagcggtcgccggggtcgacccgtcggtgatgggcatcggcccggtgagcgcctgccgccaggcgctgcagcgcgccggctggacgctggacgaggtggaccttatcgaagccaacgaggcttttgccgtccaggcgctggccgtcggtcagctgcttgagtgggatagcgagaaggtcaacgtcaacggcggcgccatcgccctgggccatcccatcggcgcctccggctgccggatcctcgtcagcctggtgcatgagatgcagcgccggggcgccagcaaagggctggcaaccctgtgcgtcggcggcggccagggcatcgccatgaccctacaacgttaacaggagccactatgtttacacc

SEQ ID NO: 110 - DNA, 587 bp, Unknown
  source: /note="Description of Unknown: MKP2_coc_1 Mutant Bacteria sequence"
gagggcgcttaccactttgtgattcatgactggggtgaagtcgtaacaaggtaaccgtaggggaacctgcggttggatcacctccttaccttaaagaacctgcctttgcagtgctcacacagattgtctgatgaaaatagagcagtaagtaatctctgcaggcttgtagctcaggtggttagagcgcacccctgataagggtgaggtcggtggttcaagtccactcaggcctaccaaatttgcgaagcaaatttgaagaggttgcaaacgatggggctatagctcagctgggagagcgcctgctttgcacgcaggaggtctgcggttcgatcccgcatagctccaccatctttactgcgaacacaagaaaacttcagagtgaacctgaaaaggtgcactgcgaagttttgctctttaaaaatctggatcaagctgaaaattgaaacgacacacagttaatgtgtgttcgagtctctcaaattttcgcaatcagaagtgaaacatcttcgggttgtgaggttaagcgactaagcgtacacggtggatgccctggcagtcagaggcgatgaaggacgtgctaatctgcg

SEQ ID NO: 111 - DNA, 511 bp, Unknown
  source: /note="Description of Unknown: MKP2_coc_1 Mutant Bacteria sequence"
gggggggggggggggggggggggggggggggggggggggggggggggggggggggggtggggggggggggggggggggggggggtgggggggggggggggggggggggggggggggcggggggggggggggggggggggtggggggggggggggggggggggggggcgggggggggggggggggggggggggggggggggggggggggggggggggggggggggggggggggggggggggggggggggggggggggggggggggggtggggggggggggggggggggggggggggggggggggggggggggggggggggggggggggggggggggggggggagggggggggggggggggggggggggggggggggggtgtgggggggacggagggggatgcgtagcggggggatgggggaggggttcggggggcaggtggtggataccgtggatatcgaaaacgatatttgggtggcgaaaactgaaggccagaagctggcaggcgcgctg

SEQ ID NO: 112 - DNA, 491 bp, Unknown
  source: /note="Description of Unknown: MKP2_coc_1 Mutant Bacteria sequence"
ccaacttactgatagtgttttatgttcagataatgcccgatgaccttgtcatgcagctccaccgattttgagaacgacagtgacttccgtcccagccttgccagatgttgtcgcagattcaggttatgtcgctcaatgcgctgagtgtaacgcttgctgttaacgtgcagctttcccttcaggcgtgattcatacagcggccagccatccgtcatccataccacgacctcaaaggccgacagcaggctcagaagacgctccagtgtggccagagtgcgttcaccgaagacgtgcgccacaaccgtcctccgtatcctgtcatacgcgtaaaacagccagcgctgacgtgatttagcaccgacgtagccccactgttcgtccatttcagcgcagacaatcacatcactgcccggttgtatgcgcgaggttaccgactgcggcctgagttttttaagtgacgtaaaaccgtgttgaggccaacgcccataatg

SEQ ID NO: 113 - DNA, 468 bp, Unknown
  source: /note="Description of Unknown: MKP2_coc_1 Mutant Bacteria sequence"
tgccatccgttacttccgcgagggggacatcatgccggtggagaaggtgaccttcgttcggccacgtccctggccgctgcgtgacagactggtcgtggaggcgcaggagacggtgtggcgccgggtcggcgaggcgtaagctctgcagatgataaggaaaaggagagcgtcagggaatgaaagggataacgacatggatagtgctgggcagcctgctgctgtcaggctgcgaccagaaaagtatccacaaggatgtgccggtgaacccgctgaccgatattaatgcccgtttggcgtttacctgtaaacaccagattattcctgaggcgtctgcggataccgatgtcctgtttaaatacgcccgctggcggcaaaaaaataatctgattaaccgggataaaacggtggatgcggagattgcccgtctgtaccggatagcggcggaaaacggtcattataaagccagta

SEQ ID NO: 114 - DNA, 439 bp, Unknown
  source: /note="Description of Unknown: MKP2_coc_1 Mutant Bacteria sequence"
ttaccactttgtgattcatgactggggtgaagtcgtaacaaggtaaccgtaggggaacctgcggttggatcacctccttaccttaaagaacctgcctttgtagtgctcacacagattgtctgatgaacgtaaagaagcaaggcgtcttgcgattgagacttcagtgtccccttcgtctagaggcccaggacaccgccctttcacggcggtaacaggggttcgaatcccctaggggacgccacttgctggttcgtgagtgaaagacgcgtgccgatgtatctcaaaactcatcttcgggtgatgtttgagatatttgctctttaaaaatctggatcaagctgaaaattgaaacgacacacagttaatgtgtgttcgagtctctcaaattttcgcaatcagaagtgaaacatcttcgggttgtgaggttaagcgactaagc

SEQ ID NO: 115 - DNA, 359 bp, Unknown
  source: /note="Description of Unknown: MKP2_coc_1 Mutant Bacteria sequence"
caatggccagtcggggatcgacattttaggcccgtttcagggcggcggcggtggctgctgcttcagcgtgcccgcccgctggacgccgggtatgacggtgcgtgttgactgggaaaccggggtggggtactccatggactttccggggtatcaggatagggaaaaataccttgcctggaaaaaaggaattgatgcccaaaagaggcagcacagcaaaaccgttccgctgcctgactataacggccaggatgtgtgcggcattacggtgcactttttaccctgcgatgacgtgaaggtgaccaccagctgctggtcaccgagaaatgcgaactatccgataaaagagcccgtcaggatga

SEQ ID NO: 116 - DNA, 356 bp, Unknown
  source: /note="Description of Unknown: MKP2_coc_1 Mutant Bacteria sequence"
cgcagattagcacgtccttcatcgcctctgactgccagggcatccaccgtgtacgcttagtcgcttaacctcacaacccgaagatgtttcacttctgattgcgaaaatttgagagactcgaacacacttaaacagtgtgtcgtttcaattttcagcttgatccagatttttaaagagcaaaatttcacaatgcacttcgcagtacattttgaaatttattatttatcaaacaatctgtgtgagcactacaaaggcaggttctttaaggtaaggaggtgatccaaccgcaggttcccctacggttaccttgttacgacttcaccccagtcatgaatcacaaagtggtaagcgccctc

SEQ ID NO: 117 - DNA, 351 bp, Unknown
  source: /note="Description of Unknown: MKP2_coc_1 Mutant Bacteria sequence"
ctcacacagattgtctgatgaaaatagagcagtaagtaatctctgcaggcttgtagctcaggtggttagagcgcacccctgataagggtgaggtcggtggttcaagtccactcaggcctaccaaattcgctctcgtgctttgttgtggcaaagctcgcatacttcagtatgcttcgcttcaccacgccgcgcccgaaaacgaattaaggttaaagagattcattcgatggggctatagctcagctgggagagcgcctgctttgcacgcaggaggtctgcggttcgatcccgcatagctccaccatctttactgcgaacacaagaaaacttcagagtgaacctgaaaaggtg

SEQ ID NO: 118 - DNA, 269 bp, Unknown
  source: /note="Description of Unknown: MKP2_coc_1 Mutant Bacteria sequence"
cctgccgcaccgtgctccagatagatggcaataaagtagtagccggcggccaccttcgcatcaatcagttgctgactcaggcgcagacgttcatggctgctcagcgcaaagcgcccgcgcagcgcgccattctgcagattaatactggctttataatgaccgttttccgccgctatccggtacagacgggcaatctccgcatccaccgttttatcccggttaatcagattatttttttgccgccagcgggcgtatttaaacaggacatc

SEQ ID NO: 119 - DNA, 256 bp, Unknown
  source: /note="Description of Unknown: MKP2_coc_1 Mutant Bacteria sequence"
agctgaaaattctctcaatccgccaaaacatcttcggcgttgtaaggttaagcctcacggttcattagtaccggttagctcaacgcatcgctgcgcttacacacccggcctatcaacgtcatcgtctttaacgttccttcaggagacttaaagtctcagggagaactcatctcggggcaagtttcgtgcttagatgctttcagcacttatctcttccgcatttagctaccgggcagtgccattggcatgacaaccc

SEQ ID NO: 120 - DNA, 256 bp, Unknown
  source: /note="Description of Unknown: MKP2_coc_1 Mutant Bacteria sequence"
gtctcctgaaggaacgttgaagacgacgacgttgataggccgggtgtgtaagcgcagcgatgcgttgagctaaccggtactaatgaaccgtgaggcttaaccttacaacgccgaagatgttttggcgatttgagagaattttcagctctgatacagattaatcgatacgtcggtgagacgtattgataaaacagaatttgcctggcggcactagcgcggtggtcccacctgaccccatgccgaactcagaagtgaa

SEQ ID NO: 121 - DNA, 255 bp, Unknown
  source: /note="Description of Unknown: MKP2_coc_1 Mutant Bacteria sequence"
aggagggattttcccggaggcggtgctgcgcaccttgtccggccacagggacgtagccccgtgtcggatccgtagccccggtaagcgcagcgccaccggggaggcatgccggcacgctggccggacgccagaaacgcaaaaagcccatccggcaggatgggctcttcacttgtttgatgcctggcagtttatggcgggcgtcctgcccgccaccctccgggccgttgctgcgcaacgttcaaatccgctcccggc

SEQ ID NO: 122 - DNA, 252 bp, Unknown
  source: /note="Description of Unknown: MKP2_coc_1 Mutant Bacteria sequence"
agccccactgttcgtccatttcagcgcagacaatcacatcactgcccggttgtatgcgcgaggttaccgactgcggcctgagttttttaagtgacgtaaaaccgtgttgaggccaacgcccataatgatgtagccccctgaaacaccggacagtagctgtatctccagataagagataggcttgaatatatgtctaacactaacgccaattttgagatgaccgggatcctgttagggcaagaagcccgtaaa

SEQ ID NO: 123 - DNA, 236 bp, Unknown
  source: /note="Description of Unknown: MKP2_coc_1 Mutant Bacteria sequence"
agacgatgacgttgataggccgggtgtgtaagcgcagcgatgcgttgagctaaccggtactaatgaaccgtgaggcttaaccttacaacgccgaagatgttttggcggattgagagaattttcagctctgatacagattaatcgatacgttggtgaaacgtgttgataaaacagaatttgcctggcggcactagcgcggtggtcccacctgaccccatgccgaactcagaagtgaa

SEQ ID NO: 124 - DNA, 231 bp, Unknown
  source: /note="Description of Unknown: MKP2_coc_1 Mutant Bacteria sequence"
cccccccccccccccccccccccgcccccccccccccccccccccccccccccccccccccccccccccccccccccccccccccccccccccccccccccccccccccccccccccccccccccccgccccccccccccccccccccccccccccccccccccccccccccccccccccccccccccccccccccccccccccccccccccccccccccccccccccccc

SEQ ID NO: 125 - DNA, 134 bp, Unknown
  source: /note="Description of Unknown: MKP2_coc_1 Mutant Bacteria sequence"
gaatctaagctgaaaattctctcaatccgccaaaacatcttcggcgttgtaaggttaagcctcacggttcattagtaccggttagctcaacgcatcgctgcgcttacacacccggcctatcaacgtcatcgtct

SEQ ID NO: 126 - DNA, 128 bp, Unknown
  source: /note="Description of Unknown: MKP2_coc_1 Mutant Bacteria sequence"
cccccccccccccccccccccccccccccccccccccccccccccccccccccccccccccccccccccccccccccccccccccccccccccccccccccccccccccccccccccccccccccccc

SEQ ID NO: 127 - DNA, 351599 bp, Unknown
  source: /note="Description of Unknown: MKP2_2161_1 Mutant Bacteria sequence"
tgacgatcgcgtggctctctgtagtcaggtgttcgtctctctaccgccgcttccgggtctcatcgtgtgtcgtgtgccgcaaccagcggtgtgtgttagtgtactgaacttcgatacgctgctggccctgcggcgcaaccgctgcctggccctgcgtcgggttcgcggcaataggcggtaccgttacgtcctgctgtgaggtgctgttagcggcggcagtctggtcctggccggcagcaggcatgctggcggactggtcgtcagacagattaatgctcttctcgccggaagcggtctgctggctggaagatgatggcgatttcagtgcggaaccgatacccacgatcaacagcagcagcaccagaatccccacacccatcatgatgtactggcgggaggccggtttggccggcgcttttttacgcttgcgcggacgacgctctacaggctgctcttcgagcatctcctcgtcttgcgcatccagttcttcttcgaactcttcctcttcacgctcgcgacgggccttaccagcgcgcgtcggacggccttcatcggcatcaagatcaacatcgtcaaaattgatctgcggatcggcatcacgctcggaagactgacgggaacgaccagcacgacgatcgttgcgatcggctttcatatcgtcttctggtttgaaatcatccatttaacaccccactaaaaggcttatgctcacgattattgcacatcacccgaaatgataacgccgcgcgaacgcggccagaccttcttattgttgcgcctgctgagtatcagcaatcgcgccaagaaccacatcgtgcggcactccgccgcgcagctcgctgcttcctattgcgagcgggagcaccagccgcatttcgccagccagtacctttttatcgcgcatcatatggggcaaatacgcctgcgcactcatttcctgcgggccgcgtaccggtaagcctgcacgcttgagcagatcgataatgcgctgagtatcctgcgcgcggaactgccccagccgttcggacgtgcgtgccgccatcaccatacctgccgccaccgcttcgccatgcagccagttaccgtagcccatttccgcttcgatagcatggccgaaggtatgtccaagattgagtaaagcacgtaacccggtttcacgctcgtcggctgccacaacctccgctttcagttcacagcagcggcgaatgcagtacgccatggcggtatcgtccagcgccagcagcgcatcaatgttgttttccagccagctgaagaattcaccatccaggatcaccccgtacttgatgacctcagccagtccggaagcgagctcgcgcttcggcagagttttcagacagttaagatcaactaccacggaaaccggctgccagaaggcgccaatcatgtttttgccgagagggtggttcactgcggttttgccgccgaccgacgagtcgacctgcgacaacagggtggtagggacctggatgaaacgcacgccgcgctgatagcttgccgcggcgaaaccggttaaatcaccgatcacccccccgccaagcgccaccagagtggtgtcgcggccatgtggtttttgcaacagcgcagtaaacacggtatccatcaccgccaggcttttgtattgctcgccgtctggcagaatgacgctgtcaacgttgacccctgactgctccagcgcagagcggacggtatccagataaagcggcgccagcgtttcgttggtgaccagcatagcctggtcgcccgacttgagtggcaggaaggaagctggatcgttaaacaaaccagccgcgatggtaatcgggtaactacgttccccgagggtaacagtaagcctctccataacgcgacatccacctcaatgactattactctgacgcacttttattaagccagaatcagttgctttccagcatatgaataatctggttcgcgacgactttcgcactctgatcgtctgtgcggatagtcacatcggcgatctcttcatacagcgggttacgctcgtcagccagcgcttccagcacttcacgaggcggcgcatcgacttgtagcaaaggacgctttttatcgcgctgcgtacgggccaactgcttctcgatcgtagtttccaggtagaccaccacgccgcgggcggagagacggttacgcgtttcacgggattttacagagccgccgccagtcgccagcacaatcccctgtttttccgtcaactcattgataattttctcttcacggtcacggaagccttcttcgccttcaacatcgaagacccagcccacatcagcgccagtgcgtttctcaatctcttgatcagaatcgtaaaattccatgttgagctgttgggctaactggcgcccaatagtgcttttgccggcacccataggcccaaccagaaagatattgcgtttctctgccattttttcggtactactaagactattcgttaatgataaacccgcttcgcagacacccagcgccgcagggcatgaactgaaacctcatatgcaatagagcgagagtcagactaaaaattatctcaatactccggctggtttggcaactgaataaaatcgccggacaataaagggaggattgatgtcgtacccgactctcaaatcggtaccccttgtatgctaaatccgtcctcacgtcaaacacctgaaacgtgtttagcatgaaaaacctgcttaacgtactgccagaatccgtggcgtaataaagacaaccagttcgcgacgttcattatctttcccgtcacgacgaaacagacgtcccagtaccgggatatcgccaagcagcgggacgctgtcgcgggcggttttgtttttctgcgaaaagatgccgcccaacgctaaagtctcgccgctgcgaacttccaccagggtctctatctcctgcttatcgatggccagcgcttcgccgttttcctgcttcagcacctggcctggcgtattctcgcttattcgcagcttaagccgcactcttccctgctgcagcaccgtcggcgtgacctccatgcccagcaccgcctctttgaactccaccgaagtggcgccgctttcgccactggaaacctgataggggatctcgcttccctgcttgatgctggcaggctgcatgtgggaggccaataaacgcgggctggcaataatttcgacctgctgcttgcgctccagcgcggatagctccagctcaagcaagcgaccgttgatcttgccgatgttaaaccctgcgcgggtgctggcatcgtttaccgatacatcgctgcttagggtggtgatttgcccggagcctggcgggcttccggcttccgcaagccgccacttcacccccagctcacgaaggctggtttcgctcatcgacacgatatgggcggccagctccacctggccgaccggcagatccatctcctgcgcccaggccttcaacgccggcaggtgccgggcatcatcgcggatcagcagccgattagtccgtttgtccgccatcaggtgtcccctggcgctgagcagctttccgccgcttttagccagctcctcagcgtcggcaaagtgcagggtcacgctctccgcctgcaggggcaggttctgcaggcgtttctcctgttcggcttcacgctgcgcctgatttgccttttgccaggcctgagtgtgcgcgtagatgaccgtcccctgctgttgcaaagagagacccgcgctatccgctaccgcccgcagcgcctggctccagggaaccttctgcagacgcagggagagcgtgccgctgacgtccggcgcgacgacgaggttcttatggttcatttcggccagggcttgcagcacctgggccactggcgcatcgtcaatcaccagcgaaaccggtttatcattgcgggcggcgggggccaccgccagcggcagcagcagaagcagcaggcttatccatcgcatcatgttgtttcccttcacgttgccagcgccacgctggcggttcacatcccgaagacgtgacgatgtccagctcaccggccgtcagccggctcacccgccagcccgtgggcaattgctcatccatgcgtacccgtcgccactttccgttcccatcctgcagaaaccccgtccagccagcctcatccccaaccgccccgccatagcgccattgcgaaagctgcgccgtgcggcagggatcctccaccggctggaaagggtcacgctcggccgccagcagcgacagcggtagccacaggaagatccagcgtttaccgctcatcttccgcctccagcagcagtcgcaggcggagcgtctgcgcctcacggcccagcgaaaacgaacgcggattcatcccgcagcgcgccagccaggaaaaaagcgcgggtaccgttgaccaggacagggtcagctccatctcgccgccgcttccctgcggacgccaggcgataagcttcgctccggagagcggaatggctatgggcgaaaatgactgcgtgtcgatgcgcgccccgggattttcctcgccggggatgcgcagcgccatgatccgccgccactgcgtttgcaacgccgcatcacgggttaccgccgcctgcggcgggcgcagatcgcgccagagcgccacgccgcctcccgacagccccattgcgagcaggatcggcagccccgtccaggcgccccgaaggttaatccgcatcagcgcgcgctcccgtcagggtaaaactgaactgccaacgcccctcggcgtcgcgctgggtcccgccggcttttgccggcgcgaatcccgcgacgcgagtcagcgcagcctccacgctggttagcgcctgcaggttaagggccaggccgtccagcgtgaggagtacgccctggtactccagccgcgtcagccacgcctgcgcgggcagatctgccgccagcgcctgcagcctgggttgccaggcggcgatcgccgatctgcgctggtactgctggcgctgccgttgatgctgctgccacgcctcacgcatcgcctgctcgcgctgcttaagcgaagcgagcagctgcgcgtcggccgtcgtgtgaagcgtcgccaggaagtcgcgctgcagacgcgccgttcggctcaccagcaggcccatcccgcccagcagcacaatgccgatggttaacaacaggacgtagcgcaggcgctggcggcgacgcaggtcgcgccagggaagaagattaacgacatgcgtcatgccgcccgcctcccagcgccagcccaagggcaatggcgtaacgatcgccatcggctggcagcgggggctgccgacggtgaatcacttgccagacatcaaagcgactggcctcatcgcccgcgtcaatacacaggcgcagcggaatctgaagctgccccgccagctggcttaaggacccgacatcagcgcaggcgtcgctgccccaggcctcacgggtcgcccacagccagcgcttttcatcccgccacgccaggccctggtctgccgcagtcatccaggggaaaaaggcgccgagcgcactggcatccggtacgatggccgccacccgcagccgcagccgccctgccagctcccgcagaacattgatatccagccgctgcgccgccgtaacctgccagccgtcatcccgcgaggtgggcgcataatcaatacatagcgcggaggcaggcattgccagctgctggctcatggcgctggctacccacgtcgcctgttcccgctcccgcagggcgaactggggatacggaagacgcttttgcagtgtgcgcaccgcgggaaaggcgatactaacctgatgctgcgccggtagctcccgccgccaggcggccagccgcgaaccgagtgcgctgacgtccgccaccattccctgacgcaccagccccggcggcaatgggatacgccaccagcggcgcagcgcccagtgtgaacgttcatgcaatagcgcgacaatggcaatgctatcctgttggatatgcattccaagccgccagtttctgaaagccatgcttacgatctccttatccggcaaaactgcccggctatatcaatgcacctggcttgcctttatactaccgcgcgtttgtttataaactgcccaaataaaactaaatgggaaaacaccggtgaagttcgtaaagtatctattgatccttgcagtctgttgcgtactgctgggagcaggctcgatttttggcctctacaaatacatagagccgcaactccccgacgtcgcaaccctgaaggatgtgcgtttgcagatcccgatgcaggtctatagcgccgacggtgagcttattgcgcagtacggcgaaaagcgccgtatccctgtgacgttgcagcaaattccccccgagctggtgaaagcgtttatcgccaccgaagacagccgcttctatgagcaccatggcgtcgatccggtaggtattttccgcgccgccagcgtggcgatgttttcaggccacgcctcccagggcgccagcaccatcacccagcagttagcgcgtaacttctttctcagccccgagaagacgttgatgcgtaagattaaagaggcctttctggccatccgcatcgagcagttgctgaataaagatgaaatccttgagctgtatctgaacaagatctacctcggctaccgcgcctatggcgtcggcgccgcggcgcaggtctattttggcaaacctatcgaccaactgaccctgagtgagatggcggtgattgccggtctgccgaaagcgccttccacttttaacccgctctattcgatggatcgcgcgaccgcccgtcgcaacgtggtgctgtcgcgtatgctgagcgaaggatacatcacccaggcgcaatacgatgaggcgcgcagcgaacccatcgacgccagctatcacgcgccgaaaatcgccttctccgccccttacctgagtgaaatggtgcgccaggagatggtgaatcgctacggcgagcaggcctacgaagatggttatcgggtctacaccaccattacccgtaaaaaccagcaggcggcccagcaggcggtacgcaataacgtgctggattacgatatgcgtcacggctaccgcggcccggccagcgtactgtggaaagtcggcgaaacgccgtgggagacgaagaagatcgtcgattcgctgaagcgtcagtctggctacggtccgcttttcccggcggtggtcacctccgcgaatgcccaggaggctgtcgcgctgttggctaacggcgactccgtttcgctgacgatggagggcgtgcgctgggcccgtcgctttatctcagatacgcagcaaggggcgaccccgcgtaaagccaacgacgttgtgcaggccgggcagcagatctgggtacgcaaggtgggtgacagctggtggctgtcccagctcccggacgtcaactcagcgctggtctccattaacccgcaaaacggcgcgattattgcccttgtcggcgggtttgactttaaccagagcaagttcaaccgcgccacccaggcgctgcgccaggtcggctccaacattaaaccgttcctctataccgccgcgatggataaaggcttaacgctggcaagtatgctcaacgatgtgccgatctcgcgctgggatgcgggcgcaggttccgactggcggccgaagaactcgccgccgcagtatgccggtccgattcgtttacgccagggcctggggcagtcgaaaaacgtggtgatggtgcgcgctatgcgcgccatgggcgtagactacgccgccgagtatctgcagcgctttggcttcccggcgcagaacattgtccacacggaatcgttggcgctgggctcagcctcctttacgcccctgcaggtcgctcgcggttattcggtgatggccaacggcggcttcctggtcaatcctttctttatcagtaagattgagaacgatcagggcggggtcctcttcgaggagcgtccgaaaattgcctgtccgcagtgtgatttaccggtaatttacggcgatacgccaaaatccaacgtgctggaaaacaaggatgtggaagatgtcgccacctccgcggaaccgcagaatggcaacgtgccgccgcagccgcagctggagcaggccaaccagtcgctggtcgcgcagagcggcgcacaggaatacgcgccgcatgtgattaacacaccgctggccttcctgagcaagagcgcgctgaacagcaacatctttggcgagccgggctggatgggcaccggctggcgcgccggacgcgatctgcagcggcatgacatcggtgggaaaaccgggaccaccaacagctcgaaggacgcctggttctcaggctacggaccgggcgtggtgacctcggtttggatcggctttgacgatcatcgtcgcgatcttggccggaccaccgcctccggagcgattaaagatcagatctctggctatgaaggcggtgccaaaagcgcccagccggcctgggacagctttatgaagagcgtgctggaaggcgttccggaagaaccgttaactccgccgccgggtatcgtcacggtgaatatcgaccgcagcaccggtcagttggcgaacgggggcaatagccgggcggagtactttattgaaggaacccagcccacccagcaggcagtccgtgaggtgggcaccaccctgactgacggcggcggtgaaacccacgaattgttctgacaaaaaaagcgcctgcgggcgcttttttattgctgcttagcgtggacgctcgttcagagtcggccctgggcctgcagccattcccgcactaaaaacagcgcgctgacgttacgggcctcgttaaaatcttcttcatccagcagcgacatcagctgcgccagcggccagcgcacctgcggtagcggctcaggttcatcgcccggcagtgactccggatagagatcttccgccaccatgatattcattttgctggagaagtaggagggggccatactgagcttcttcaaaaacgtcagcttattggcgccatagccaacctcttctttcagctcgcgattggccgcttcatccacggtttcacctggatcaatcagccctttggagaagcccagctcgtaggactccgtccccacggcatactcacgaatcaaaataatgtgatcatccacaatcggcacaatcatcaccgcttcacgggtggaaggccgcatacgttcataaacgcgacgcacaccgttgctgaactccagatcgacgctttcgacattaaagaggcgcgaacgggcgacagtttcaacattgagaatggtgggtttttgtaatgatttgctcattgtcatcggtctatgctgtgattaagcagtcattgtgcgatacgcaacacgctttcggcaatccaaattgctacttatttacagagttgcaaccttttccctgcagggggaaaagtaataaagataaaaaagtcaatagcttgaattcgctttgagaatttaccgatttctgcgctttaacgtttttggtaagcttgtgcgctgctgcatgacatattcactaccctgtaagcaggtgcgccgctaacactgcagcttgacgttagtcttcacgttcaccgacgatttcgtaagaaaaaaataactttgatgggatgggcatgggcacctttctgatattccttacagctctgctaatctgcgtattgctcatcggatggtggtatcgcgctcacgccagacgccgccgactccccctactgcacgcctttagcgacgctaccacgcggcagcttcctgcggatgagcgccaggctattgagaagtatgttgccgagttgagccacgcccagcaggtgccggcgtccggtgcgaccagcgcgcctgtcgctctggcgctcaacgaacagagtgataccgtctatgcggtgacacgcgccatcacccgctacgggatcaccaccgacgcgccgaataaatggcgctatttcctcgattcggttgaagttcatctgccgccgttctgggaacagcatatcaacgatgaaaacagcgtcgagctgatccccaccgacagcctgccgctggttatcacccttaacggtcatagcctgagcgactatcgccaggaagcgcaaagctacgccctggaacgcgcttcggccacccaggcctccattcgcggcgaagagagcgagcaggtagagttgcggcagatccgtcgggaaacgcctgaagaacacgctctgaatcgcccggacgggctgcgcgaagcgatcctgatcgtcgcctcctttctgttcttttatttcagcctgattgggccagctgtctttaccccctggctggtcgccgcaggtttgttgctgctcgccgccggactgtgggggatttatgccccgccgcgtcgcgccgcgctgcgcgaaatccattgcctgcggggcgtccctaagcgctggggattgtttggcgaaaacgatcaggagcaaatcaataacatctcgctgggcattatcgatctcatctatccgcgccactggcaaccctggattgcccaggacctggggcagcagaccgatattgatatctatctcaaccgccacgtggcccgtcagggacgctacctgtcgcttcatgatgaagtgaaaaacttcccgctgcagtactggctacgcagcgcgattatcgccgccggcgccctggtggtggtgattatgctgtgggccagcgtaccgttgaatatgccgtttaagttcaccctgtcgtggctgaagggcgcgcaaacgattgaagccactaccgtcagccagctggaaaaagcccatgtgcgcattggcgatacgctgcgcctgaccggtaccgggatgtgtaatatccgcacgccgggcagttggtccgccaaagaggattcgccgttcctgcctttcgattgttcacagattgtgtggaacgacgcccctcctctgccgctgccggagtctgacattgtcagcaaagcgaccgccctgatgcagtccgtccagcgccagctgcacccggaaaccgacgatgattcccgcgtcagccctgccctacgctccgccattcagaaatcaggcatggtgctactggatgatttcggcgatatcgtgcagaaaactaacgatctctgctcggcaaaggatgattgcctgcggctgaagaatgcgttggtcaatcttggcaatacccgtaactgggaaacgttaaccaagcgcgccaccgccggcaagctggatggcgtgaacgtgctgctgcggccggtcagcgccgagtcgctggagaatctggtgaccacctcaaccgcgccctttgtgatacgcgaaaccccgcgggccgcgcaggcgctgaacagcccggctcccggcggttttcttatcgccagcgatgagggcagcgtattggtcaatccgccgtggccggcggtgagtctgtatgattatccggcccatgagcagtggggcgaactgcggcggctggccggtatgctcatgcatacccccttccatgccgaaggtatcgttaccaacctgtttactgacgccaacggcacgcagcatatcaacctgcatcgcatccccgaccgcagcggcctgtggcgttatctgggcatcaccctgctgctgctgtcaatggtggggtgcatggcttaccacgccgtgcaggccctgcgtcgttatcaacgccatcgtcagcgtatggaagagattcagaaatattacgaaagctgccttaatccggttttgctcccctcagctgactcgcaagattaattttcccggcgacagggtgtgataccctgtcgcccattttccgctcgctggagagtcatcatgcactttgatatcgcctggcaggaggtcgataccgttctgctggatatggacggcacgctcctggacctcgccttcgacaactacttctggcaaacgctggtgcctgaaacctggggggccgcccgcggcctcaatttgcaggaggcgaaagacgccatgcgccaggagtatcacgccgtgcagcatacgctaaactggtactgtctggattactggagcgagcgcctgggtttggatatttgtgcgatgaccagcgaacaaggtccgcgcgccacgctgcgcgaggataccgtgccgttccttgatgcgctcaaggcctgcggtaagcgacgcattctgttgactaatgcccatccccacaatctggcggtgaagctcaaacacaccggcctggacgcgcaccttgatttattactttccacccacacatttggttatccgaaagaggatcagcgtctgtggcgcgccgtggcggaggaaactggccttgaggcgcacaaaacgctgtttgtcgacgacagcgaggcgatactggatgccgcgagggagtttggcattcgttactgcctgggtattaccaatcctgactccggactggcggaaaagcagtatctgcgccatccggggctgaatgattaccgacgactgatcccttcgcttaccccgaaggagaggcgatgaaagagaagcccaccgaaaccgtcagactggacaaatggctttgggccgcccgcttttacaaaacccgcgcgctggcgcgggaaatgattgaaggcggcaaggtgcattacaacggacaacgtagcaaacccggaaaaattgtcgaactcgacgccatgctgacgctgcgccagggcaacgacgagcggacggtgcgcattatcggtattaccgaacagcgccgcccggcaagcgaagccgtcaacctgtatgaagagacagcggagagtatcgagaagcgtgaaaaaatggccctggcgcgcaaaatgaacgccctgaccatgccgcaccctgacagacgtccggacaagaaagagcgccgcgacctgatgagatttaaacacggcgagagtgaataactcgcgccagaaagagagatgattatgactcaacacgatcaattacatcgttatctgtttgaaaactatgccgtgcgcggcgagctggtgacggtgtcggaaaccctagaacagattctggcgaatcacacctatccccaaccggtcaaaacggtgctggcggagctgttggtcgccaccagtctgctgaccgcgacgctgaagtttgccggcgacattaccgtacagctgcagggggatggccctttacagctggcggtgatcaacggcaataaccagcagcagctgcgcggcgtagcgcgcgtgcagggcgagattgcggacgatgcggatctgaaaacgatggtcggcaacggctacctggtcattaccatctctccggaagaaggtgagcgctatcagggcgtggtcggtctggaaggcgatacgctggccgcctgcctggaagattatttccagcgttcagagcagctgccgacgcgccttatcatccgcaccggcgatcatgaaggccagccgatggcgggcgggatgctgctgcaggtgatgccggcgcaggatgcccagactgccgacttcgagcacctggcgacgcttaccgagaccattaaggcggaagagctgttcaccctgccggcaaatgatgtgctgtggcgtctgtaccatgaagaagaagtcacggtctacgacccgcagagcgtggagttcaagtgcacctgctcccgcgaacgctgcgccggcgcgctgaagacgctgccggatgaagagattgatagcatcctcgccgacgaaggcgaaattgatatgcactgcgactactgcggtaaccactatatcttcaatgccatggacatcgccgagatccgtaataacgcctctccggccgatccgcaggttcattaatccccgcatctttctcaggcacagggcggcaatgttgtttgtcgcgttgtgcctgacttttaatttattcgcgagttgaatcgattttccctgaaagagttacgtaatttaatttcaggaaagcgattacattcacatttcggcagtttttttaattactttttaaccattgagaaacatctaaccccaccatccgcccatttcctgagataatccactccacttcgtgacaggagtcaccgtttttatcgtcattctgaggaatgtcgagatacgtaaatctatgagcctggtcgcggtcaatacccggcaattaaccctacaatttacagcagtacatcttggctaaggagcagtgacatgcgcgttaatcatggtttaaccccgcaggatctcaaggcttatggtatcaatgacgtccaggatatcgtccacaaccccagctacgacatgttgtttcaggaagagctcgacccgaacctggaaggctacgaacgtggcgtattaaccactctgggtgctatcgccgtcgacacgggcatttttaccggtcgttctccgaaagataagtatctcgtgcgcgacgacaccacccgcgacaccgtctggtggtccgataaaggcaaaggtaaaaacgacaacaagccgctttcgcaggaaacctggcagcatctgaaagggctggtgacccagcaactgtccggtaaacgcctgtttgtcgtcgacgctttctgcggcgccaacgccgatacccgtctcagcgtacgtttcattaccgaagtggcctggcaggcgcacttcgttaaaaacatgttcatccgtccgagcgatgaagagctggctgaattcgagcccgacttcatcgtgatgaacggcgcgaaatgcaccaatccgcagtggaaagagcagggcctcaattcggaaaacttcgtcgccttcaacctcaccgagcgcattcagttgatcggcggcacctggtacggcggcgagatgaagaaagggatgttctcgatcatgaactacctgctgccgctgaagggcatcgcctccatgcactgctcagccaacgtcggcgagaaaggcgatgtcgccattttcttcggcctctcaggcaccggcaaaaccaccctctccaccgacccgaaacgccgcctgattggcgatgacgaacatggctgggatgacgacggcgtgtttaacttcgaagggggctgctacgccaagaccatcaagctctctgaagcggccgagccggatatctatcacgccatccgccgcaacgccctgctggaaaacgtggtggtacgcgccgacggcacggtcgatttcgatgacggttcaaagaccgaaaatacccgcgtctcctaccccatcgaccacatcgacaacattgttaagccggtgtctaaagcgggtcacgccaccaaagtgatcttcctgacggccgatgcgttcggcgtcctgccgccggtctcccgcctgaccgccgaccagacgcagtaccatttcctgtccgggtttaccgccaaactggccggcaccgagcgcggcgtaaccgaacccacgccaacctgctccgcctgcttcggcgccgccttcctgtcgctgcacccgacgcagtacgccgaagtgctggtcaaacgcatgcaggcggctggcgcgcaggcttatctggtcaataccggctggaacggcaccggcaagcgcatctcgattaaagatacccgcgcgatcatcgacgccatcctcaatggctcgctggacaacgcggagacctttaccctaccgatgtttaacctgcagatcccgacggcgctcccgggcgtggatacccacatcctcgatccgcgcagcacctatggttccccggagcagtggcaggaaaaagccgaccagctggcgaagctgtttattgagaattttgagaagtataccgatacgccagcgggcgccgcgctggtggcggcaggaccgcagcgctaacgggcgcaaaggtgaaaaagccgggcttgcccggctttttattgtgcaacatcctgagtagctaaccgcgggcgcgatcagctctccctggcgggtttcatcggcgtcagcatccggtgcaccggcagccaggcgcggatcagtaacccgccgcgttcgctggagccaatctccagccggccgttgtgattgtcgataatacgctgaacaatcgccaaccccagcccggtgccgctggtgctgcgggcgctgtcgccgcgtacaaacggctgaaacaggtgctccctctgctcaggtttaatccccggtccatcatcttctacctggaaccaggcccggctcgcttcgctgccgctgctgaccttgatccagccattgccatagcgggccgcgttgaccaccatattcgccagcgcgcgcttgatagacagcgggtgcatacgtaccggaatttcgccggcctgcagggcggtggcgatttcccgctcatagccgctctccgcagcgatcacttcccccagcaccgcattcagatccgccagctccatcggcatctcctgcccggtgcgcagatagtcgataaactgctcgatgatggcgttgcactcttcgatatctttgttgatcgactccgcgagatagccgtcctgctcgcccatcatctcggtggccagacgaatgcgggtcagcggggttcgtaaatcatgactgaccccggccatcagcagcgtacggtcatcagccaactgcttcacgcccgccgccatatggttaaaggcgcgcgtcaccgaacgcacttcggaggcgccatactcgcgcagcggcggcggaataatgccgcgcccgacctgcagcgccgcgtgctccagatccaccaacgggcggttctgaatacgaataaacagccaggcgccgcctatcgccagcagcatgatcgccagggtatagcggaacagcggcgagaagtcgccctgatggatctcggtcagcggcacccgcacccagatattgggcgacagccaggtcttcagccacaccacaggggagcttttattgacctctacccgcacctctgtggggccaccaagctgatgggccatctgctgacttaagaattcataatgctgcgcccagcgcaggcctgcgtcttccgccgcttcattggaatagagcgaaatccccagctcgcgataaatttcacgacgaaacgccgggggcaccaccagctgggtgccatcctccagctgcagtttgtcggtcatcagcatacgcacttcgtaggctaacactttattaaactgctggagactcggcaggatcgcgaaattcagtaccaccagataggtcgtcaccaggctgacgaacagcaaggtgacgatcaggagcagtgtgcgagcaaaggagctgcgcggcgaaaagcgcacgcgtttcatgccttagaaccgtccgggacgaagacgtagcccagaccccagacggtctggatgtagcgcggatgcgccgggtcctcttccaccatgcggcgcaggcgggagatctgtacgtcgatggagcgctccatcgcagagtattcgcggccgcgggcgaggttcatcagcttatcgcgcgacagcggctcacggggatggctcaccagcgccttcaggaccgcgaattcgccgctggtcaacggcatcggctcgtcttcacggaacatctcgcgggtacccaggttcagtttgaatttaccaaaggcgataaccgcctcttcctgcgacggcgcgcccggcagctcgttcgcctggcgacgcagcaccgcccggatgcgggccagcagttcgcgcgggttaaacggcttcggaatatagtcgtcagcaccgatctccaggcccacgatccgatcgacctcttcgcctttcgccgtcaccataatgatcggcatcgggttactctggctgcgcagacgacggcagatagagagaccatcttcgcccggcagcatcagatccagcaccatcaggtggaaggattcacgggttaacagacgatccatctgttcggcgttcgccacgctacgaacctggaagccctgctcggtcagataacgctcgagcagcgcacgcaggcgcatgtcgtcatccacaaccagaatcttataattctcttgcattgtttgtactcccaaaggttcactgcaatagtcagtgcgtattctcaaaaaagcccggcgcgctcaccagctaaatctggtatatattccaggctaaattgttacaaagcatatttaacagcaggttaagtatacatttaatcataagacacagtatttatcctgtcggtattattacgcgctacaaattgtgcgcaacgacagacagtcagaaggttgaactcacgatgaaaacgccgctgatcacccgcgagggatatgaaaaactgaagcaggagatggactacctgtggcgccaggagcgtccggaagtgaccaaaaaggtgacctgggccgccagcctcggcgaccgcagcgagaacgcggactaccagtacaacaaaaagcgcctgcgggagatcgatcgccgggtccgctatctgaccaaatgtctggaacagttgaaaatcgtcgattactcgccgcaacaggaaggtaaagtcttcttcggcgcctgggtagagattgaaaacgatgaaggcgatatcaagcgctttcgcatcgtcggttacgatgaaatttttggccgcaaagactatatctccatcgactcgccgatggcgcgcgcactgttaaaaaaagaggttggcgatctggccatcgtcaacacgccggcgggcgaagccagctggtatgtcaacgagatcgaatacgttaaatagacaagaactttccgagagacgcccggcgcggctggtatttttagccgtcagtccgtataactagtccctgttttttgaccctaaagatgaattaaaagccatgatgaatgattcgctctgccgcattattgcgggtgaacttcaggccagagccgaacaggtagaagctgccgttcgcctgcttgatgaagggaacaccgtgccgtttattgcacgttatcgtaaagaagtcaccggcggtctggatgacacgcagctgcgtaatctggaaactcgcctcggctatctgcgcgaactcgaagaccgtcgtcaggcgatcctcaaatccatcgctgaacagggcaaactgaccgacgcgctggaaaaagccatcaacaccacgctcagcaaaaccgaactggaagatctctacctgccctacaagccgaagcgccgtacacgcggccagatcgctatcgaagccgggctcgaaccgctggctgacctgctgtggaacgaaccggcccacgatccggaagcggaggccgcaaaatatattgatgccgataagggcgtagccgacagcaaagcggccctggacggcgcgcgctatattctgatggagcggtttgccgaagacgccgcgctgctggcgaaggtccgtgactatctgtggaaaaacgcccacctggtctccaccgtcgtcagcggtaaagaagaggaaggcgctaaattccgcgactacttcgatcaccatgaaccgatcgccaccgtgccgtcgcatcgcgcgctggcgatgttccgcggtcgcaacgaaggcgtcctgcagctctctttaaacgctgacccgcagtttgacgagccgccgaaagagagccacggcgagcaaattattatcgaccacctgggcctgcgcctgaataacgccccggcggacagctggcgtaaaggcgtcgtcagctggacctggcggatcaaagtcctgatgcatctcgaaaccgagctgatgggccccgtgcgcgaacgcgcggaggacgaggcaatcaacgtcttcgcccgcaacctgcacgatctgctgatggccgcgcccgccgggctgcgcgccaccatgggactcgatccgggcctgcgcaccggggtgaaagtggccgtcgtcgacgccaccggtaaactggtcgctaccgataccatctatccccacaccggccaggccgccaaagcggccgtcgccgtcgccgcgctgtgtgagaagtacaacgttgagctggtggccatcggcaacggtaccgcctcgcgtgaaaccgagcgtttcttcctcgacgtgcagaaacagttcccgaaggtcaccgcccagaaggtgatcgtcagcgaagccggggcttccgtttactccgcctccgagctggcggcgcaggagtttccggacctcgacgtgtcgctgcgcggcgcggtctccatcgcccgccgtctgccggatcccctggccgagctggtgaaaatcgacccaaaatccattggcgtcggccagtatcagcacgacgtcagccagacccagctggcgcgtaagctggacgcggtggtggaagactgtgtgaacgccgtcggcgttgacctgaacaccgcctccgttccgctgctgacccgcgtcgccggcctgacccgcatgatggcgcagaacatcgtcgcctggcgcgacgagaatggtcagttccaaaaccgccagcagctgctgaaagtcagccgtctggggccgaaagcctttgaacagtgcgcgggcttcctgcgtatcaaccacggcgacaaccctctggatgcctccaccgttcacccggaagcttacccggtggtcgaacgtattctggccgccacccagcaggcgctgaaagatctgatgggcaatagcagtgcgctgcgccacctgaaggcagtggacttcaccgatgagaagtttggcgtcccgacggtcaccgacattatcaaagagctggaaaaaccgggccgcgatccgcgtccggagtttaagaccgcgaagttcgccgatggtgtggagaccatgaatgacctgctgccgggaatgattctggaaggtgccgtcaccaacgtcaccaacttcggcgcgtttgttgatatcggcgttcatcaggacggactggtacacatttcgtcgctttctgaccggtttgttgaggatccgcacaccgtggtgaaagcgggcgacatcgtcaaggtcaaagtgatggaagtcgatctgccgcgtaagcgtatcgccctgaccatgcgtctcgacgagcagccgggcgacagcaacgcccgccgcggcggtggtcaggagcgcccgcagggtaaccgcccggccgcgaaagccgccaaaccccgcggtcgcgaggcgcagcctgccggcaacagcgcgatgatggatgccctcgccgcagcgatgggtaaaaaacgctaaactctccctgcccctttttcaggggcagttttttttcatgaccaggccatcgccatcacgcgcaaaacagcttcagttgtttctgataacctacttttattccacgcctgaaaggcagcgaaattaatattttcatttcgttaacttcagaaaccttaattaaacattagatcgccgaaataatatttcgcgcatttttgattacaggctgactttgcggcatatcaataaaaaggtgattttcactttaaaaatagcctgcagcgcatcatatgtattgatgataaaaaccattctcattatcatcgattacagaacgttttttcttttttcgttggctacggtccccggcgcaactgcctccaggcgtccggaaaattcttcttcggttagcgatagacaagtaggccctatgcaattcacacctgatagtgcgtggaaaattaccggtttttctcgcgatattagcccagcataccgtcagaaactgctctccctcggcatgctgcccggttcctcttttcatgtggttcgcgtggcgccgctcggcgatcctgttcatattgaaacccgacgcgtcagtctggtattacgcaaaaaagatctcgccttaatcgaactggaagcggttgcacaataacggctggcccggcacaagagtctgaaatatgcaaaaattaaccgttggtttaattggtaatcctaattccggcaagaccaccttatttaatcagctgaccggcgctcgccagcgcgtgggcaactgggctggggtgaccgttgagcgtaaagaggggattttcgccaccactgaccaccaggtcacgctggtcgacctcccgggaacctactccctgaccaccatctcctcgcagacctcgctggacgagcagattgcctgccactacatcctgagcggcgacgccgacatgctgattaacgtggtcgatgcctccaacctcgagcgcaacctctatctgacgctgcagctgctcgagctggggatcccctgcgtcgtcgcgctgaacatgctggatatcgccgaaaagcagcaggtgcggatcgatatcgacgccctcgccgcccgtctcggttgcccggtcattccgctggtatcgactcgcggacgggggatcgaagcgctgaagatcgccctcgaccgtcatcaggcgaacagcgatcttgagctggtccactatccgcagccgctgctgcgcgaagctgacctgctggcgcagcagatgtcagcgcagatcccgacccggcagcggcgctggctgggtctgcagatgctggagggcgatatctacagccgggcctatgccggcgacgccgccgataaactggatatcgccctggcgaatctcagcgacgagatcgacgacccggcgctgcacatcgctgacgcgcgctatcagaccatcgccgccatttgcgacgccgtcagcaataccctgaccgccgaaccaagccgcttcaccgccgcgatggacaaagtgatcctcaaccgcttcctcgggttgccgatttttctctttgtcatgtccttgatgttcctgctggcgatcaacatcggcggcgcgctgcagccgattttcgatgccggctcggtcgcgatctttgtgcatggcattcaatggctgggttacaccctgcacttcccggactggctgaccgtgttcctcgcccaggggatcggcggcggtatcaacaccgtgctgccgctggtgccgcagatcggcatgatgtatctgtttctctccttccttgaggactccggctacatggcgcgcgccgcctttgtgatggatcgcctgatgcaagccctcggcctgccggggaaatccttcgtcccgctgattgtcggttttggctgcaacgtgccgtcggtgatgggcgcccgcacccttgacgcgccgcgcgagcgtctgatgaccattatgatggcgccgtttatgtcctgcggcgcgcggctggcgatcttcgccgtcttcgcggccgccttctttgggcagaacggcgcgctggcggtcttctcgctctatgtgctgggcattgtgatggccatcctcaccggcctgatgctgaagcacaccattatgcgcggcgaagcctcgccgttcgtgatggagctgccggtgtaccacgtcccgcatatcaagagcctgattatccagacctggcagcgcctgaaaggctttgtgctgcgcgccgggaaggtgatcgtcatcgtcagcatcttcctcagcgcgctgaacagcttctcactgagcggtaaggtcgtcgacaacatcaacgactccgcgctggcctcggtgagccgggtcattacgccggtgtttaaaccgatcggcgtgcatgaagataactggcaggccaccgtcggcctgtttaccggcgcgatggcgaaagaggtggtagtgggtacgctgaacaccctctataccgccgaagatatccagaatgaggaattcaatccgcagaccttcagtctcggcgaagaactgctcgccgccgtcgatgagacatggcagggactgaaagacaccttcagcctcagcgtcctggccaaccccatcgaagccagcaaaggcgatggcgaaatggccaccggcgccatgggggtgatgggcagtaaatttggcagcgcagcggcggcatacagctacctgatcttcgtcctgctctatattccctgcatctcggtgatgggcgccatcgcccgcgaatcaagccgcggctggatgaccttctccatcctgtgggggctgaatatcgcctattcgctctcgacgctctattaccagaccgttagctttagcgatcacccgcgctacagtctggtatgtatcctggcggtagtgttgttcaacgtggtgctcttcggcctgttgcgccgggcgcgcagccgggtggacgtctcgctgctggccacgagaaaaacgccggtctcctgctgttccagcccggctggcgattgccactaaggagggactgtggcgtcgttaatggaagtccgcgatatgctggccctgcagggccgcatggaggcgaaacagctcagtgctcgcctgcagacacctcagccgctgattgacgccatgcttgagcgaatggaagccatgggtaaggtggtccggatcagcgaaacgagcgagggctgcctctccggcagctgtaaaagttgccctgaagggaaagcggcgtgccggcaggagtggtgggcgctgcgatgaaaggagtcaggccaggtcgcgcaacgaggtaaaacgagtaagacagctatgaaaaacgggccagcaggcccgttttcttatgactggattatttataaacgtcagcgttcgcgtgtacggttttttcgtttttctgcccggcaatcacaacaaagtatttcccacccagctcatcggcttttttcgacagatcgcggcgggcgtccatcggcgacgtcgtcctggaggtcgtaatgctaccgaccttggtcagattcatcttcgccacgtcttctttttggatctctttcgcggcgaatgcgccgaaagagagggtgcctatcaccagagatgcaaccattcctgtaacaagtttcatagcctctactctccataaggttgttattgtaggtcacggtggcggattgaaataatcaaccaccgtaacaacctaagtattgctaggaatggcccttttaccatggcgcggcaaaaaaaattaccccagccgcgtcttcagcgccagcagcggctcgcagaaggccgcgggatgggaaacaaacggcgcatgcgcggccttatcgaagaggattgactcgctttccggccacaggtcatccagcaacgggacgatcttgcgcggcaccagtccatccagccggccatacagccgcagaaacggcatcggcagcctgaccagcgcctgacgcagatcgacggttctgaggatctccagtccgccattcagcgcctcggcggaaggcatcggcagcgagagcaccgcctgctttaacgcccgcgcatcctgacgcgcgctctctgtgcccatggtttgcagggcgaggaatcgctcgacggtgcgctggaaatcgtcgctcagctgctgctgaaatccggccagcacctcgggcttgatgccgagccagtcgtcacgagccgcgaaacagggggaagaggcgaccgtcaccagcgcctgcacgcgttccggacgcataatcgcgacctggctggccaccagcccgcccaggctccagcccagccacaccgcctgtggaggggcctgctccagcacccgctgcgccatcgcctccagcgacatcgccccaaacccgccgctgcgcccatagcccggcagatccaccaggtggagggtaaaatgcgaagccagctgcggcgtgatgcaatcccatacctgagcgttcagcccccagccgtgcagcagcacaagatgacaatctccttcgccgattgtttgccaccagatgtcgttcatccgttaccgttctctttttactggacagaaggccaaatatgctaacagcacacagcttatgctggctatgccaaatgccgctggcagtcgcccgctgggggatctgctcccgctgcagccgcgccctgctcgcctgtcccccgctctgcccgcagtgcggcctgccggcggcggcatcccgtcacccctgcggccgctgcctgcaaaagccgcctccctggcattggctggtggcggtcaatgactatcgcccgccgctgagcggtctggtgcagcagctgaagtttcaccatcgcccggagctgggccccgccctcgcgcgtctgctgctgcagcgccttctgcagcgtgacgatttgccgccagtagacgctctggtcggcgtgccgctatggcatcgccgtcgctggcgccggggttataatcagtgcgacgaactgtgccgaccgttagcccgctggcgaggatgcgtctggcatcgcgaaggcctgactcgccagcgagccggcgccgtccaacattcgctcaatgcccgccagcgcaggcagaacctgaaaaatgcctttcagcttgaatttgccgtgcagggactccatatcgctctggtggatgatgtcgtcacgaccggcagcaccgtcgccgagatatcccgcctgcttttgcgaaacggcgccgcgacggttcaggtatggtgtttgtgccgtaccttgtagacccccgctgatgggcgtattataacccagtaaaatagtcaactattaggccaacgctatgatccgtatttccgatgctgcacaagcgcactttgccaaactgctggcaaatcaggaagaagggacgcaaattcgcgtatttgtgattaatcccggcaccccaaacgctgagtgcggcgtatcctactgcccaccggatgcggtggaagacaccgacacggcgctgaaatttgaacagctgaccgcctatgtcgatgagctcagcgcgccctatctggaagacgctgaaattgatttcgtcactgaccagctcggctcgcagctgacgctgaaagcgccgaacgccaaaatgcgcaaagtctctgacgatgccccgctgatggagcgcgtcgagtacctgctgcagtcgcagattaacccgcagctggcgggccacggcggccgcgtatcgctgatggagatcaccgacgacggtctggctatcctgcagttcggcggcggatgcaacggctgctcgatggtcgacgtgaccctgaaagaaggtattgaaaaacagctgctgaacgagtttccggagctgaaaggggttcgcgatctgaccgagcatcagcgcggcgagcactcctactactaagcccttcctccggcggcaccctgccgccggtcctccctggccctttctgtgttaccgcgcaacatctcccgctaaacgaccggcaaaaaccggggaaagagtatgacttaagtctcatatttaacattttcccccgtcaggtgattctcaaccctcacatgttacccgtatcatccatttcaggcgccaccggcaaaaaaatagccagctatcctttctctgggtaaggataatgcaagcgtttacggcgccagactattttgctccctgacggagcggatgctctacaggttcgaactttgacgttacccataacaaattaaggccaggtaaatcatgccattagtcatcgttgctatcggggttgccctgttgttgctgttaatgatccgtttcaaaatgaacggcttcattgcgctggttctggtggcgctcgccgtcggattaatgcagggtatgccactggataaagtgatcgtctccatcaaaaacggcgttggcggcacccttggcagcctcgcgctgatcatgggcttcggcgctatgctcggtaagctgctggcagactgcggcggcgcccagcgtatcgccaccacgcttatcaataagttcggtaagaagcatattcagtgggcggtggtcctgaccggcttcaccgttggcttcgccctgttctatgaagtgggcttcgtgctgatgctgccgctggtgttcaccatcgccgcctcggcccgtattccgttgctgtacgtcggcgtaccgatggcagccgcgctctccgtcacccacggcttcctgccgccgcatccgggtccgaccgcgatcgccaccatcttccatgccgatatgggcaaaacgctgctctacggcaccattctggctatcccgacggttatcctggcgggaccggtgtttgcgcgcttcctgaaagggatagataagccgatcccggaaggcctgcataacccgaaagtgttcactgaagaagagatgccaggctttggcgtcagcgtctggacctcgctggttccggtgatcctgatggcgatgcgcgccgtggctgagatgatcctgccgaaaggccacgccttcctgccaattgccgagttcttcggcgacccggtgatggccaccctgattgcggtactgattgccctgttcaccttcggtttgaaccgcggccgctccatggagcagatcaacgataccctgacctcttcgatcaaaatcatcgccatgatgctgttgatcatcggcggcggcggcgccttcaagcaggtgctggtggatagcggcatggataaatacatcgcctctatcatgcacgaatcgaacatgtctccgctgtttatggcgtggtctatcgccgcggtgctgcgtatcgcgctgggttcggctaccgtggccgccatcaccgcgggcgggatcgccgcgccgctgatcgccaccaccggcgtcagcccggagctgatggttatcgccgttggctccggcagcgttatcttctcccatgttaacgatccgggcttctggctgttcaaagagtactttaacctgaccatcggcgagaccatcaagtcctggtcggtgctggaaaccattatctcagtctgcggcctggtgggcagtcagcagctggcctttacccaccaggaggcgaaacaatttttcgactgtcgtctgacatcgcctatcgaagccgacgacagtagccggctgtgcgacgatgtcgccgggtgggccaccgcgctacaactcatcgccctctccgcccgccagaataactcctccgcccaacactccgcccgccgcctcgccgggattaacgccagccatctgtcggattatctggtggatgaagtgctggataacgttgacgcccgcacgcgcaactttttgctgaagagttctctgctgcgctcaatgaacgacgcgttaatcgtgcgcgtcaccggcgaagagaatggccagatgcagctggaggaaatcgaacgccaggggctgttcctgcagcggatggatgattccggcgaatggttccgctatcacccgctgtttggcagcttcctgcgccagcgctgtcagtgggagctggcggttgaactaccggagatccaccgcgccgcggcggaaagctggatggcgcaaggtttccccagcgaggcaatccaccatgcgctggcggccggcgatgccaaaatgctgcgcgatatcttgctcaatcatgcctggggcatgtttaaccatagcgagctggggctactggagcagtcgctggcggcgctgccatggtccaatctgctggaaaatccgcgcctgatcctgctccaggcctggctgatgcagagccagcatcgctacagcgaagtcaataccctgctggcgcgcgccgagcaggagatgagtgtggaaatggacaccgcgatgcatggcgacttcaacgcgctgcgcgcacaggtggcgattaacgatggcgaccaggacgaggcggaacgtctgtcaatggtggccctggaagagctgccgctggccaactattacagccgcatcgtcgccacatcggtgcatggcgaagttctccattgtaagggaaagctgaccaaatccctcgccgtgatgcagcagaccgaacagatggcccgccgtcacgacgtatggcattacgccctgtggagcatcattcagcaaagcgaaatcctcttcgcccagggcttcctgcaggccgcctgggagagccaggagaaagccttccagctggtacgcgaacagcatcttgagcagttgccgatgcatgagttcctgctgcgcatccgttctcagctgctgtgggcatgggcgcgcctcgacgaggctgaagcttgcgcccgccaggggatggacgtgctatccacctatcagccgcagcagcagctgcagtgcctggcgctgatggtccagtgctcactggcgcgcggcgatctggataatgcccgcagccacctgaaccggctggaaaacctgctaggtaatggtcactatcacagcgactgggtctccaacgccgataaggtgcgagtgatctactggcagatgaccggtgataaaaccgcggcggccaactggctgcgccagacgccaaagccggagttcgccaacaaccacttcctgcagagccagtggcgcaacatcgcccgggcgcagatcctgctgggcgatttcgaaccggcggaaatggtgctggaagagctgaacgaaaatgcgcgttcgctgcgtttgatgagcgatctcaaccgcaacctgctgctgctcaatcagctgtactggcagtcgggacgcaagagcgaagcgcagaaagccctgctggaagccctgacgctcgccaaccgcaccggttttatcaaccactttgtgattgaaggcgaggcgatggcccagcagctgcgccagctgatccagttgaacacgttgccggagctggagcagcatcgcgcccagcgtattctgcgcgacatcaaccagcatcatcgccacaaattcgcccactttgacgaagggttcgtcgagcgactgctgaatcatccggaggtgccggagcttatccgcaccagcccgctgacccagcgcgagtggcaggtgcttggcttaatctattccggttacagcaacgagcagattgccggcgagcttgacgtggcggccaccaccatcaagacccacattcgcaacctgtatcagaaactgggcgtcgcccaccggcaggacgcggtacagcatgcccagcagttacttaagatgatgggatacggcgtctgacgacgccgttgccgtttagcacagctccagctgaaggttgttatcagtgatcaccttcagcacgccggccggcggcagcacgtcggtatagaccgcatcgaccatactgatgctgcccatgttgaccatcgcattgcggccaaacttggtatggtccaccaccagcatcacgtggcgtgaattctcaatgatcgcccgcttggtgcgcacttcatgataatcaaactccagcagcgagccatcgctgtctacgccgctgatgccgagaatgccgaagtcgaggcggaactgcgagataaagtcgagggtggcttccccgatgatcccgccgtcccggctacgcagttcgccgccggcgagaataatgcggaagtcctctttcaccatcagcgtgttggcgacgttaaggttattggtcacaatccgcagatcgttgtgatcgagcagggcgtgcgccaccgcttccggcgtggtgccgatatcaataaacagcgtcgccccgtccgggatctcgctggccacccgccgggcgatacgctctttctccgccgtctgggtcgctttgcgatcgtgccaggaggtgttcaccgagctggagggcagcgccgcgccgccgtgatggcggaggatcattttctgttcggctaaatcgttcaggtcgcggcggatggtctgcgggcttaccgcgaactgctcaaccagctcttccgtgctgacgtaaccctgtttttttaccagctcgataatggcgtcatgacgttgtgtttgtttcatgaaatatccctggaaaaatatcgcctacccgacccctgtcggtaagtctttatgcgcgttttcgcccatgtaaggtatcaacaaacgccatcgccaggccggtcgccagaccagccacgtgcgcgccgttggcgatcgccatgccgaaaacatcaaaccagccagcaattaaccacactaaagagaagagtatcaacccgcgctgcagataaataccgctctgcggatcgcgctcgccccgcagccagacgtagcccatcagcgcgtagaccacgcccgacaagccaccaaaccacgggccgctaaactggtgctgcacgaagccgcttagcagagcgctgatgacggtgatcaccaccagcttgccgctgccgatgcgcttttccaccgcgccgccaagataccaccaccatagcaggttgaagagaatatgcatcagcgagaaatgcatgaaagcatggctgaaatagcgccaggcttcgaactgcagcgaaggatcgtagggccaggccagccaaatcatcaccggctgatcgcccagcagattttgcaggatgaacaccgcgatgcagatcagcagaatcgcccaggtgaacggaccggcgttatgccgcagcgtggcaaagaaaggaaagcgctgatagcgcaacccgctattggtctgtccggactgccagctcgccgccagatagcgcgggtccgccgggttttcgagaaaacgcgccagctcagccctgacgcgcccggcctgactctcatcagccagccagacgtcgctctgggtatgctgctggatggtcaggataatcccctgcgtcgccatataatcgacaaacgcctgggccacccgcgggttggcaaaagaggtaatcattaacatgcagcgaatcgcttattccacacaaagggggatagtatacctgccagtcgttaaaacgtcccgcgcgccacttccgccgggaaatggcgatgccaggcgtcgaacccgccgtcaacgctatagaccttatcaaacccctgctgcagcagatactgcgcggcgcccttactgctgttgccgtgatagcacatcaccatcaccgccgtgtcaaagtcgttgtcacgcataaacgcgcccagcgtatcgttggtcagatgaaacgcgcccggcgtatgacccatcgcatagctttgcggatcgcggatatcgaccagtaccgccgtctgctgatgcagtttctggtgcgcttcttcaacattgatgcattcaaactgttccatgattctcttctctttctcgtcatgacgggcgatggccggcccaattttaccctgtagtgtaccgtcaggcggtaaagaaacgccaatatgttacacccatcacttcaaaatgtttttttgatgttaccaaaagcgcgtttgtttgctatagtgagcgatatcgagcatttatgagcttaaacgaaagtgtgagagggtaagaacgtggaaaccaaagatctgattgtgataggcggaggcatcaacggtgccggtatcgcggcagatgccgccgggcgtggtttatccgtactgatgctggaagcgcgcgatctcgcctgcgccacctccagcgccagttccaaactgatccacggcgggctacgctacctcgaacactatgagttccgtctggtcagcgaagcgctggccgagcgtgaagtgctgttaaaaatggccccgcatatcgccttcccgatgcgctttcgcctaccgcatcgcccgcatctgcgcccggcatggatgatccgtatcggcttgtttatgtacgatcatctgggcaaacgcaccagcctcccgggatccaccgggttgcgttttggcgcagaatcggtacttaaaccggaaattgtgcgcggtttcgaatattccgactgctgggtcgacgatgcccgcctggtgctggccaacgcgcagatggtcgtccgcaaaggcggcgaagtgcgtacccgcacccgcgctatctcggcgaaacgtgagaatggcctgtgggtggtggaagcggaagatattgatagcggtgagaagtttacctggaaggcgcgcggcctggtcaatgccaccggcccatgggtcaaacagttcttcgacgaagggatgcatctgcgctcgccttacggcatccgtctgatcaagggcagccacatcgtggtgccgcgggtgcatacccagaaacaggcttatattctgcagaacgaagataaacgcatagtatttgttattccgtggatggatgagttctctatcatcggcacgacggacgtcgagtataagggcgatccgaaagcggtggccattgatgataaagagatcaactatctgctgaacgtctataacgcgcactttaaaaagaccctcagccgggacgatatcgtctggacctactccggcgtccgtccgctgtgcgacgacgagtcggattcgccgcaggccattacccgcgactataccctggatattcacgatgagaacggtcaggcgccgctgctgtccgtcttcggcggcaagctgaccacctatcgcaaactggccgagcatgcactggaaaaactgaccccctattacaaagggatcggcccggcatggaccaaaaccgcggtgctccccggcggcgatatcggcggcgaccgcgacgactacgcggcaaaactgcgccgtcgcttcccgttcatcagtgaatcactggcccgccattatgcccgcacctacgggagcaacagcgagtggatcctgaaggaagccagcgccctgagcgatctcggggaagatttcggccacgagttttatgaagccgagctgaaatatctggtggagcacgagtgggtgcgcagcctggatgacgccatctggcgtcgaaccaaacagggtatgtggctgactgccgagcagcaggcgcgcatcagcgaatggctggcgcagcatgcgggaaagtctgaactgtcgttagcgtcctgacatcgcgtggcgccaggagagaaatacccgggctatggcttgcgcttggcccggatacctgttcacaaattaaacgagactttttttccagtcggcaatgtgacatttatactgagttctccccccaatgccgcaatgtagcgttttagggtcgaaagccgagggtcgttatcagcctgttccattttagcgatcgttggctgctttacccccatagccgcagccatctctgtttgcgacatttgcaactcttctcgaagcaagtttaaagcgacagactggcgtatctctgccgctttcgctgcaatacgctgctggctatcaggactctgtttcgccatgagttcttttagcgtggccattatcgctccttagtcaggtgttggctgaattctctgtcagccagagtaatcatctctttgtaaaaacgtttctcattcatgccatccttatcgcccgcacataaaacgatagctttccgcagaggatcaaaagcaaaaaaggcgcggatggggagcccatgatgctgaacccggagttctttcatattctgaaacgttgaatctttcaccgtatcaacatacgggcgcccaagctgcggagcaaactcagacaggatgagaatcgtggccaacatatcctcttttaaagctctactttgtaattcgaaccaggtatcaaacgtatccgtcgtttctacatcccacataggctatgaacgtaaacttattgagcatttatcgtactgctggcgaattcacgtcaatagtatattcccgcaatagcctgaatcctccccggcacttttccgaataaaacgttcgccacacaacacaacggggccaaatggccccgttgtgttgtgtggtgttgcattgactggcttacagccttaccgggtcgatatgccagatatatttcgcgtactcctggatcgtccggtcagaagagaagtagcccatgttggcaatattcaacattgccttataagcccactcttccgggttttgatacagctcgtcgacgcgatcctggcagtccacatagctacgatagtccgccagaacctggtagtggtcgccaaagttaatcagcgaatccagcaggtcgcggtagcgccccggttctgccgggctgaagacgccggtaccgatctgcgtcagcgcctggtggagctcttcatcctgctcgtaatattcgcgtggtttatagccgctgcgacgtagctcctccacctcttccgcggtgttaccgaagataaagatattctcttcgcccacgtgctcctgcatctccacgtttgccccatcaagggtgccgatagtcagcgcgccgttaagggcaaacttcatattactggtgccggaagcttcagtgcctgcgagggagatctgttccgacaggtctgccgccggaatgatcagctgcgccaggctaacgctgtagttggggataaagacgaccttcagcttgtcgccaatctgcggatcgttattaatcaccgccgccacatcgttgatcaggtgaataatgtgcttggccatgtagtaggccgaggccgccttaccggcgaaaatattcacccgcggcacccactcggcctgcggatcggccttgatccggttatagcgggtgatgacgtgcagcacattcattagctgccgtttgtattcatggatacgtttgatctgcacatcaaacagcgccttcggattgaccaccacattgagctgttgagcaatatagctggccagccgctgtttgttctcaaacttggcctgacgcaccgcctgattgaccatcggatagtcgatatgctgtttcagctcatcaagctgactcagatcggtccgccaggtgcggccgatatgctcatccagcactttcgacagcggcgggttggccagcgccagccagcggcgcggcgtcacaccgttggtcacgttgataaagcgcattgggaagattttggcgaattcggcaaacagtgactccaccatcagtcgggaatgcagctcggacaccccgttgaccttgtggctgaccactaccgccagccaggccatccgcacacggcggccgttagactcgtcgataatcgaggtgcggctgaggaggtcggtatcgttcggatactgctcctgcaaagtcttgaggaaatagtcgttaatctcgaagataatctgcagatggcgcggcagaattttacccagcatatccaccggccaggtctcgagcgcttcgctcatcagggtgtggttggtataggagaagacctgacaggtcacctcgaacgcctcgtcccagctgaacttatgttcgtcgataagcagacgcatcagctccggtatcgacagcaccgggtgggtgtcattcaggtgaatggcaatcttgtccgccaggttgtcataggtcttatgcaacatgtaatggcgactcaggatatcctgcaccgtggccgacacgaggaaatactcctggcgcaggcgcagctcgcggccggagtaggtcgagtcgtccggatagagcacgcgggagacgttttcggagtggtttttatcctctaccgcggcgaagtagtcgccctggttgaatttaccgaggttaatttcgctactggcctgcgcgctccacagacgcagtgtgttggtggcgtcggtgtcaaagccggggatgatctggtcgtaggcttccgcaatgatctcctccgtctcaatccagcgggttttctttccttcctgctgaatgcggccgccgaagcgcactttatagcgggtgttgtggcgctcaaactcccacgggttaccgtactccagccagtagtcaggagactctttttgtcggccatcgacaatattctgtttaaacatcccgtagtcgtagcggatgccgtaaccgcgtcccggcagacccagcgccgccagggagtcaaggaagcaagccgccagacggcccagaccgccgttgccaagcccggggtcattctcttcatcgatcagctcttcgagatcgagccccatctccgccagcgcgctgctcacatcgtcataaatgcccagcgacagcagcgcattcgagagggtgcggccgatcagaaactccatcgacagatagtacacctggcgcacttcctgggagagctgcgcgcggttggagcgcagccagcgctccaccatgcgatcgcgaacggcaaacagcgtggcgttaagccattcatgcttgttggcgatggccggatctttaccgatgataaacatcagtttataggcaatagaatgctttaacgcctcaacgctcagcgtcggtgatgcatagctaaagggtacattcataacaatgactccagtggttacatcaagcgttgataaagttcgcgataggagttcgcggcaacctgccagctaaaatccatattcatcgcctgacgctgcacgtagcgccagagcgacgggcgcgaccagaggacaaaggcgcgacggatagcgcgcagcaatgacagcgcattgctgtcctcaaagacaaaccctgtcgccagaccatcggccagattctccagcgaactgtcagcgacggtgtccgccagaccgccggtgcggcgcaccagcggcagcgtcccgtacttcagaccatacagctgggtcaggccgcagggttcaaagcgactcgggaccagaatgacgtcggcgccgcccataatgcggtgggagaaggcctcatggtagccaatctgcacacccactttgcccgggtgttcggcggcggcggcgaggaaaccttcctgcagcaccggatcgccggcacccagcagcgccagctggccgccctgctcaagcagacccggcagcgcttcaagcaccaggtccagccctttctggctggtaagacggctgacgacggcaaacaacggcgctttatcatcgaccttcaggcccatggcaatctgcagctgacgcttgttctccgccttctcctccagcgtgtcgcgatcgtagcgcatcggcagcagcagatcgttttgcgggctccagataccgtcgtcaacgccgttgagaattcccgacagccgaccttcatgatggcgctggcgcagcagcccctccatgccgtaggcgtactgcggctcggtgatctcgcgcgcgtaggtcgggctcaccgccgtaatatggtcggcgtagtagaggccggccttgagaaacgagatctgcccgttaaactcgaggccatgcatgttatagaacgaccacggcagctcaatgtcattcatatgccaggagtaaaacatcccctggtacgccaggttgtgcacggtaaacaccgatttagccgggcgtccgcgcgccgccaggtaggccggcgtcaggccggcgtgccagtcatgggcatgcaccacatccgggcgccagaacggatccagtccgctggccatttcacttcccacccagcccagcagcgcaaagcgcaggacgttgtcgggataagcgtgctggttggtatcgtggtaagggctccccggacggtcatagagatgcggggcgtctatcaggtagatccccacgccgttaaagtggccgtacagcagcgtgatccgcccggcgaaggtatcccggcgggtcaccacctgggcatccaccacgccgcgacggatatcgggaaacgccggcaacagcacgcgcgtatcgataccctccgcgatttgcgccgccggcagtgcgccgatgacgtccgccagaccgcccgtctttaacagcgggaacatctcagaacatacatgtaagacctgcattagcgctcctgtttgtgccctaatttccgcagcatgtcgcgggtcaccagcacgataccttcctctgagcgatagaagcggcgtgcatcctcttccgcattctcaccaatcaccattccttccgggataacacaggcgcggtcaatcacgcagcgacgcaggcggcatgagcgccccacccagacatctggcaacaagactgccgaatcaatgttacagaacgaattcacccgcacgcgcgggaacagcaccgactgcaccaccaccgacccggagataatgcaccccccggaaaccagcgagttcagggtcatgccgtggctaccggagcggtcctgcacgaacttcgccggcggcagcgattccatatgggtgcggatcggccagttctggtcgtacatatccagctccggcgtgactgacgccagatcgaggttagccttccagtaggcttccagcgtccccacgtcgcgccagtaaggttcggcgttcgggtcggattgcacgcaggagagcgggaaaggatgtgcataagccatgccagcttcggtgatcttcggaatgatgtctttgccgaaatcgtggctggagttctcgttgcgatcgtcttcttccagcagctcataaagataggcggcgtcaaagacataaatgcccatgctggccagcgatttggtcgggtcggtcggcatcgccggcgggttggcgggtttctcgacaaactcaatgattttttcgttttcgtcgaccgccatgacgccgaaggcggatgcctcttcaatgggcaccggcatgcaggccacggtgcaacgcgcccctttttcgacatggtcgatcagcatgcgcgagtagtcctgcttataaatatggtcgcccgcgaggatcaccacgtactcggccttgtagcggctgatgatatccaggttctgcgtcaccgcatccgccgtgccgcgataccaattttcgccatgcacgcgctgctgagccggcagcagatcgacaaactcgttcatctcttcgctgaagaacgaccagccgcgctggatgtgctgcaccagcgtgtgcgactgatactgggtaataacgccgatgcggcggatccctgagttaatgcagttagataatgcgaaatcgataatacggaacttgccgccaaagtgaacggcaggtttcgcacgcttaatggtgagatccttcagccgggtgccacgcccgcccgcgaggatcaacgccacggatttgatgggtaattgacgcgccagcatcagcggatcgtttttttcaagcctaaccatgattaactcctttttacacccccgctttccagctcatcccgccgcgccgccgccacgggtccaaccgaaagcttcagggcttacgacctttgaaatacgcacactccgtgcgcgggcccatgccagacagccatgatgaccggattatcctctccggcgaatggaggaacggcgcgccattccccctcgggtaaaaccatatcgaccacctctgcggtggcgttcagcgtgagcagccagcgatccgacaactggatctgcatacacgcggccccctgctgccactccgcggcagtcaggggctgggcgttgcgattaagccagcggacgttgccatccccctcctgccaccagcggttgcgggtgagcgccggaatacgacgccgcaggtggatcagcgccgcggtaaaggcggttaatcccgggttcgcctggcgccagtccagccacgtcagggcgttgtcctggcagtaagcattattgttaccgtgctggctgtggccctgttcatcgcccgccagcagcattggcgtcccctgagccagcagcagcgtcgtcagcagcgcatgcgcgctggcgcgccgccgttcaatcaccgcaaaattcgcttctaatccttctataccatgattgttgctgtagttattgttagtcccatcgcgattctcctccccgtttgcctcattgtgtttctgattgaaacaaacgcagtcgcgcagcgtgaagccatcgtgggccgtcaccaggttgaccgtcgccgatggcggcttgccatcgcgggcaaagagatcgctggaggccgcgaaacgttgcgcaaaatcccccagggagacattttgctgtagccagaagcgtcgggcgctatcgcgaaaatggtcattccattcagcgaacagcggtgggaaattacccacctgatagccgcccgggccgatatcccaaggttccgcaatcagtttcacctgcgacagcacgctgtcgcggcggatagcctcgaacagcggcgcatcctggcggaattccggcgtccgccccatcactgaggcgaggtcgaagcgaaagccgtcgacatggcactcatccacccaaaagcgcaaacactggcgcgcccactccaccacgccggggtggctaagattgagcgtattaccgcacccggtccagttgtgataatcgccatcctcccttacccaataatagctacggttgtcgattccgcgcagggagacggtgggcccttcgagatcgatttccgcactatggttgagcacgatatccagaatcacttcgataccggcggcgtgcagcgccttaaccgcatcgcgaaactcatccagggcgcgatccgggtcgctggcgtagcgcggatccagcgcgaaccacgccaacgggttgtagccccagtagttgcttaaccccatccgctgcagtcgcggctcgctggcgaactgcgccaccggcaacagctcaagggcgctgatgcccagcgatttgaagtaagcgatcatcgccgggtggcccagcgctttataggttccgcgaatggcttccggtagctgcggattaagcaaggtgagccctttcacgtgcgcttcataaatcaccgtttccccccatggggtacgcggcggtttatcgccacgccagtcatagcgcagatccaccacctgcgattttggcgcgaccgcggcgctgtcgcggcgatcgggctgccacatgccgccgtgcaggcgctcatcgtcaggcagatcgccctcgacccggtgggcgctgggatcgatcaacagcttggccgggttaaagcggtgcccctgcgccgggtcccagggaccatgtatccgatagccgtagcgcaggcccggcccggcggcggccagccagccgtgccagatgtcgccgctgcgcgccgggagatcgaagcgttgctcgttgccctgctcgtcgaatacgcacagctccacccgctccgcatgggcggagaagagggcgaaattcacccccttgccgtcatagctggcgcccaatggcgcaggtttgcctgccgcgagtgaggtcattgcgcctcccggaccagccagatcgtcgccagcgggggcagggtcagcgacagcgaatgttcgcggccatggctggcgatagcgtcgctttccaccacgccgccattgccctgattgctgccgtgatagtgcatggagtcggtatttagcgcctcgcgccagcggcccggctggttaatgccgaagcggtagtcgtggcgcggcaccggcgtgaagttgctggcgacgataatctcgttgcccgcccggtcacggcgtacaaagacaaacaccgagcgctcatggtcgtcgaccaccagccattcgaagccgtaggggtcaaaatccagctcgtgcagcgctttatgatgacggtaggtatggttcaggtcgcgcaccagccgctggacgccgtggtgccagttgtcgccgccctccagcagatgccagtcgaggctaacgtcatggttccactcgcggccctgagcgaactcattgcccataaacagcagctttttccccgggaaggcgaacagccagccgtagtaggcgcgcaggttggcgaacttctgccaggcatcgcccggcatgcggtcgagaatcgattttttgccgtgcaccacttcatcgtgggagagcggcagcacaaaattctcggtgtagttgtagagcatgccgaaggtcattttgtcatgatggtagcggcgatgcaccggatcgagcttcatgtaatccagggtgtcgtgcatccagccgaggttccatttgaaccagaaaccgaggccgccgccggcgggcggacgggtcaccccggcaaaatcggtggactcttccgccatggtgaccgcgcccggcgtctgttcgccaaggatgcggttggtgttgcgcagaaactcaatggcttccagattctcccgcccgccgtattcgttggggatccactctcccgccttgcggctgtaatcgcgatagatcatcgaggccaccgcgtcgacccgcagcgcatcgatgccgaagcgttcgatccagtacagcgcgttacccaccaggtagttgctgacttcccgacgtccgtagttgtagatcagggtattccagtcctggtgatacccctcgcgcggatcgctgtgctcatacagcgaagtgccgtcaaacgaggcaagggcaaaatcatccgccgggaagtggccgggcacccagtcaagaatgacgttcagcccggcggcgtgcgcggcattgataaagtaacggaaatcgtcgcgggtgccgaagcggcgggtcggcgcatagagcccggtgggttggtagccccagctgccgtcgaacgggtgctcgttaaccggcaatagttcgagatgggtgaagcccatccatttcgcatagggcaccagctggtcggccagctcgcggtagctcagccagaaattattatcggtatgacggcgccaggagccgagatgcacttcatagatagagatcggggcatcaaactggttcgccgctctgcggtccgctggctgttccactttgggcggcaggtcgcagataagcgaggcgctttccggacgcatttgcgactcaaaggcgtaagggtcggctttgacccgcagattgccgtgggcgtcaatcagttcgaatttatacagctggccattatgcgcgccgggaacgaacagctcccagatcccggactctttgcggaatcgcatcgggtggcgacggccatcccagtagttaaactgccccaccaccgatacgcggcgggcgttcggcgcccacaccgagaaacgggtaccggtgacgccgtccatggtggcagcgtgcgcgcccagcgtttcataagggcgcaggtgggtcccttccgacagcagccagacgtcaaggtcctgtaacagcggaccaaagcgataagggtcatcgatcagattctgctgcccgtgccaggtgacggccagctgatagcgaaaagcgtttttacgccgcggcaggacgccgctgaagaaaccacgcgagtcgagacattcgagcttgccgactttgcgtccggttttcggttcaataacccacacgtcggtggcatcgggtaataatgcgcgcacttccagcccggcgtcagtacggtgcatgccgagcacggaaaagggatccgcgaaatgaccggcgattagcgcattaatcacgtctctatcaatatgattagacatgctttcatcctgttgtaagtgtcgctcattcctgtaactggcgactttttttgacctgaacggcgcagtgctctcagcatcctcctgctccgtcccaccttcaggtaaggaattccttacttaaagcatagccaaggctgagttacctccgtggggaaaaatctaacatccgcgtttactccttgtattacgcaaaaaaaaagggggcttgaagaccccctttctgttcatcctgggcttacgccagctggcgaagcatccggcgcagcggctccgcggcgccccacagcagctggtcgccaacggtaaaggccgatagatactccggccccatattcagtttacgcaggcgtcctaccggggtggtcagggtgcccgtcaccgcggctggggtcagctcgcgcatggtaatctcacgatcgttcggtaccactttggcccacgggttgtgcgcggccagcagctcctcaacggtcgggatagaaacatctttcttcagcttgatggtaaacgcctggctgtggcagcgcagcgcgccaacgcgaacgcagaggccgtctaccgggataacggacgaggtggcgaggatcttgttggtctccgcctggcctttccactcttcgcggctctgaccgttatccagctgtttgtcgatccacgggatcaggctgcccgccagcggtacgccaaagttatcgaccggcagctcgccgctgcgggtcagcgacgtcactttgcgctcaatatccaggatggcggaagccgggtccgccagctccgcggccacatgattatgcagctgccccatctggctcagcagctcgcgcatatgacgcgcgccgccgccggaagccgcctggtacgtcgccacgctgacccactccaccagatcctgagcaaacaggccgccgagggacatcagcatcaggctgacggtgcagttgccgccgacaaaggttttcacgccgttgttcaggccggcggtgatcacgtcctggttaaccgggtcgaggataatgatcgcatcgtccttcatgcgcagcgaagaagccgcgtcaatccagtaaccctgccagccgcttgcgcgcagcttcgggtaaatctcgttggtgtaatcgccgccctggcacgtgacaataatgtccagcgccttcagcgcgtccagatcgaacgcatcctgcagcgtgccaccggtgctaccgccgaatgacggcgctggctgtcccagctgggaggtagagaagaacaccgggcgaatggcgtcgaaatcgcgctcttcaaccatgcgttgcatgagaacagagccgaccattccgcgccagccgataaaaccaacatttttcataacgtattcctgcgaggtgtgtgctgtttgtgcctggccagtttccaactggattatccctcaccttacaaaatgcagctaaagtcgcaagtgaaattaatcaatgattgctgaacaatcagaaaagcaacttatcctgcacattgtccaccgtcgctggtcgtcgtcaaaagcgcaacgattatcggggaaatcccccggggaatggaatattttccgtcgctattttattgatcctgattatggattaagcgtgaaatctggtgcttttccgcttgccaaaaaaaagcgacaaacccagtcacagcaagggatgacgagggatacgagcatcgtcgtagcgctaataagggccaatagctggcaaggaaaagagggaaaaagggcggtttattgcaaagaagccagggtaagcagcgttaccctggctttttatttcccgcgagcgggagatgagcgggcttagctcagcagctggaaggcgatcataccgacaatcgccccggtggtgccaaggatggtttccatcatggtccaggtcttcagcgtctgggcttcactggcgccggtaaatttaccgaacagccagaagccggcgtcgttcacgtggcttaccacaatcgagccgccggcgatacagatagacaatgccgccatctgcgcgccgctgtagttcagctgctcaatcaccggcatcaccaggccgaccgccgtcaggcacgccacggtggcagagccctgaatgatacgcaccgccgccgccagtacgaagcaggtaatagcgatcggcagccccattccggtcagcgcttcaccaagcgccgggccaacgccggagtcaaccagcacctgcttgaagacgccgccagccccgatcaccagcagaataatcccggccggctgcagcgcgtggccgcaaatctccatcacccggtctttcgccattccctgacgtaccgccagaccgtaaatcgccaccaggcaggccaccaggatcgcggtgaacgggtggccgataaactcgaaccattcgtaggcagtggaacccaccggcacaaagcgcgcggcgatggttttcaggccaaccagcaccagcggcagcaggatcagcgccaggctgaagccgaaggagggcattttgccttcgccgagatgcggttccgtgacgtcgtcaggaatatgcaattcgacgtagcggctgatgaagttgccccatagtggaccggcgataatcatccccggaatggccgcgcacaggccaatcaggatcatccagccaaagtcggcgtgcatttgcgacgccagcagcatcggcgccggtccaggcaacagaaacgccgcggcggcggcaacgccggcaaacagcgggatcaccagcttcacgaggttagtaccggtatggcgcgccatcgagaaggcgacgctaatcagcagtacgatcgccacttcgaagaacagcggcagcgcgcagatgagaccggcgagaccaatcgcatagtgcgcgcgattgtggccaaaggatttgagcatcttgacggcaatctgatcgaccgcccccgtttcatgcaggatcttaccgaacatcgcgccgagcgcgacgacgatcgccaggaagcccagcgtaccgcccatccctttctccatcgtcgccgcgattttatccagcggcatgccggagaagagaccggcgccaatagaaaccaccatcaaagccacgaaggcgtgcattcgcgccttcatgactaaaaacagcagcagcaataccgagccgactgctgttaaaacaagcgttaaagtactcactagtgactgcctttgttgatcacctcgatggtgctggccaccacgccttccagcggctggtcgatatcgacgataagcacatcgctctcgtcggcgcctggttcctgcagcgtttcaaactgcgtcaccaacatttgggttttaaagaagtgccctttacgcgccttcagacggctttcgatcacgtcgaaatcgcctttcaggtagatgaaggagaggttcggattgcccttgcgcagaatgtcgcgatagctcttcttcagcgccgagcagacgatcagcgacaccttgttggtacgctgcatggcgaacgcggcgtcatttagcgcctgcagccacggcgtgcggtcgtcatcgttgagcggctcgccggaggccatcttggtgatattgctgcgcggatggagaaagtcgccgtcaagaaacgcggcatgcagttgatgcgccacttcgctggcgacagcggattttccgctgccggaaacgcccatcaggacatagacgtggtgatcatggttagtcgtgctcaaagcgtcctcccactggactggtacgccgcgccggggctgactcatccagcgcgaaggcggcgtatcggttaattgttacgggtaactgttatcggtaacattgtcatgccggacctgtggagaagcaatatccattcgtgccagatgtgaatatgtgtgatctacttcaaacttgtcagtttaaattgatccgcccggtgacaatgtgaaacctaaatctaacatcttaggggtaatcgcttcaccacgaatgcgcgccagcagccgttcggcgccgatgcgccccattcgctcgcgcggggtcaggacgctggccagccgcggctccatcacctggccgatatcatggccgtggaacccggcgatcgccatatcatcggggatcttcagccccagacgctggcactcgaacgccgcgccgaccgcgaggtcatcgttggtgcagaaaatgccgtcgagctgtggatattcgcggcgcgcctggcgcatcagctcaatccccgaagaataggacgaggattgctccaccatcacgctgtagggcgtcatcccggcgtcaagcatcgcctgctcgtaccccttctgtttgatgatagtacgttcatcaagacgcgcccccagataggcgacatggcggtggccgcgggcgatgatcgccgcggtcatctgccgggcggcttcaaagttatcaaacccgacggcaatatcgagacacggcgaccggctgtccatcagctccaccaccggaatgccagcgacttcgatcatcttcagggtgcgcggcgtatgggtgcgttcggtgaggatcaggccgtcaatgttccaggagagcatcgattcgaggcgtttctcttccatttccggcttatagccgtagtgcgccagcatggtttgatagccgaaggcgtcggtgacgctttcgataccgcgcagcacttccgagaagacctggttggttaacgacggcagcagcacgccgatggcgcggctggtggcgttggaaagaatgtcaggggcgcgattgggaatataacccagttcatcgagggcaacggcaatcttgccacgcagcgcttcggagacctgctccgggttgcgtaaatagcgactgaccgtcattttggtcacgccgacaagatcggctacatcctgaagtacgggtcttttctttttcatcgtcctgactgtgatcaacgggaaacattttctcagtttatcacggacaaagcgcaaccttccctaacatgagggaaggctgcgcaatttatttaacctggctcagataactatcaaaccggcggcagatcgaacagcaggatctcgctatcgctgtcggcatgaaccgaaatcgcctgctcgtcccagatggccaaaccgtcgctggtggtggctttagtaccgttgatggtcacttcgcctttgaccacctggatccacacgcggcgttccgcggcaatctggtgaaccgactgctcatctttcagcagcgcccagcgatagagttccatatcctggtacaccttcagcgagccatctcgcgcatctggcgacagtaccagctgtttgccctgggcggcgtcgaagcggcgctgctcgtagcgcggggtaatgccggtttcttccggaataatccagatctgatacagacgcagacgatcggttttgctcgggttgtactcagagtggcgcaccccggtacccgcgctcatgatctggaactcgcccgccggcacctgctctttgttgcccatgctgtcctggtgctccaccgccccttccagcacataggtcaggatctccatgtctttgtgcgggtgggtaccgaagccctgaccggcgtcgatgacgtcgtcgttaatcacccgcagggcggagaagcccataaagttcgggtcataatagttggcgaaagagaaagtatgccaggaatccagccagccatggttagcgtggccacgttcgttcgctttgcgtaaatagatcatgttgcacccccgtatgttgtcgatggagtcagtgtggacccatttcgccggcgatcatagagggtgaaaattgactcctctgttcaaaaaatatgaacaagcgcagaggagccaatttgacttatcgggtaagggtaatggtggccggtgaaggctgctcaaagccgcgctgcaggatctccatattggtgagaacgtcagtttccttgacgtaattcggctggccgttgacgagggtgtcgtacagcgcgtcgtacacccgcccataatcgccgctctccagcggcaccgcttcgcgcaccatctcccctgcctcgttgacatacaccagctcgccaacgctgtcgtccgcgccaaatcccggctcgcccggcatgatattggccttcaggctggtctcctgctggtcaatgccgtacttcacaaacgaacctttgtgcccgtgaacgataaatttcgggtaatcgatctgcaccagatggctggtcttaacgatggccttcatatcgccgtagaacagctgggcttcaaaggtgtcatccgggttggctttattgcgcagcgagcgcagatcgtaagagacatggtccgggcggccgaacagcgaaatgatctgatccagggtatgcacgccaaggccatagaactcgccgttttgcggaccgccggggttggtctccgccagtgggcggtagttatcaaaatgactttcgatctccaccagttcgccgagtttcccgctctcaatcacctttttggtggtcaggaagcaggagtcgaaacggcggttctgatagggcgtcaccgtcagacctttgctgttcgccagggcaaacagagtttttgcttcctccagcgtcggggtgaacggcttttccaccagcacgtttttccccgcctccagcgcctttttcgcatattcaaaatggctgtcggcgtgagtgcagaccaccaccagcttgaccagtggatcgtttaatacttcatcaaggtcgctggtgaaatgaatatgggaatactgcggcgcctgctcctcgggcttcgcccggcggcggtaaatgtgcgctacctgccagcggtctttgcggtgcaaaacgtaaggaaggtgatagcgggtggtgcttttaccaaagccaataaatgcgcagtgcagagtcataacgctgtccttagttaatgagctaccttcaaccatagcgcaagccggtccctcacttcatcctctctgttcgcttgcagtgaagattcgttaggaaaatagttcgagtatcactcatacgtaattattaataacttattgattaataagtgattaaatcagcagttttcggcaaaaaaccttgatcgccatggcaaaactgcggataagtggagagcaaaccaggaggttgctgatgactaacggagtagccagccgctgctgatggacaaacagtatctcgccataaacggcgccctttttttctggcttctcgcgctgatcgcctggtctgtcgatgcaagcgcgctggcgcgcctggcggccgcctgcgcgcttatcgctttcctcctccatagccaacggaacaagattaacgcgatgtttattaagaaaaataaaacggaacctcagatatcagaagcagccacgcctccggcaattaacccagaacccgaagcggtcgccagcaaaaaacacgagactacggtcatcgccagcggggtgcatttcgtcggcaatatagtcgccagcggccatgtctatatccacggtcaggtcaccggcaacattgaggccaaagagcatttgattaaggtaatgcgtgaaggccaggtggagggcaacgtcagctgccgggagctaataattgacggcaaggtgcagggccagtgtcatggcgacagcatcaccatcgaggagcacggccatctggagggtaccctcgcctatcgcgcgctggcgatcaagaaaggcggcgtttttagcggtcgcgctgaactgctggccgccgcggagaacaaaagtcatattctcggtctggtagtagacgcaccctccaaaaccgacgcggagcccgtcaggccgcagagcgcctgagatagcagcaaaaaaaaagccagcacccggctggctaaagtaatactggaagcaatgtgagcaatgtcgtgctttcaggctttccgcaagggtctccctgaatgcaggacaataataatcattctcattcgcacttgtctacttttttttgcaaataatgcgtgttgactcgaacgccgtagtcagtgatgtttaaagggacttttcacctgaatgaggaacaaggaatgagtgacatcgtgatacgccatgctgaaccgaaagatattgacgcgattcgtcaaattcacgcccagccggaggtgtatcacaacacgctacaggtccctcatccatccgaacatatgtggcgggagcggctaaccgatacgcccggcgtgaagcaactggtggcctgtatcgatgagcaagtcgtcggccatttaagcattgccgtcgtccaacgtccccgccgtagccacgtcgccgattttggtgtcagcgtggattcgcgctggcacaaccgcggcgtcgccagcgcgctgatgcgtaccatgattgatatgtgcgacaactggctgcgcgtcgagcgtattgagctgacggtgttcgccgataatgccccggcgattgcggtgtataagaagtacggctttgagatcgaaggcaccggcaggcgttacgcgctgcgcaacggtgagtatgtggatgcgtattatatggcgagaatgaagtagcgtgttgccgggtggcggcttcgccttacccggcctgcgttcgtgcagttgtaggcccggtaagcgcagcagcgccaccgggcaacacatcaataccccgccgttaaatcatccggcgaacgcggatcggaggcgccatacagcatgccgtccggtcccaccatgatgctctgggtactgcccatcgcctctttcagcgccactttctgccccttcgcctccagcagcttgagggtatccgggctaaagcctttctccacccgcagctcatccggcagccattgatggtggaaacgcggcgcgttggtggcttccgcgacgttcatcccgaaatcgatggtattgaccaccatctgcagtacggtggtgatgatccgactgccgcccgggctgccggtcaccagccaggttttgccatctttcaccacaatggtcggcgacattgacgacagcgggcgttttttcggctccaccgcattggcgtcgccgcccaccagaccatagacgttaggcacgccgggcttcgccgagaaatcatccatctggttattgagcagaatgccggaattaccggccacaatgccggtaccgaaggtcgtattcagtgtataggtcaccgccaccgcattgccgtctttatcgaccaccgagaagtgggtggtctggttgctttcatagggcgccagcttgcccggacggatctggctggaaggcttcgccttgttgacatcaatctcggcggcgatcgctttggcgtaagccttgctggtcagcgcctgccacggcacgttgacgaagtcagggtcgccgagatattcagagcggtcggcgtaggcgtgtttctctgcctccgccatcacctgcatggcgtcggcgctgccaaaaccatatttctgcatatcgaagttttcgaggatattgaggatctgcacgatatggatcccgccggaggacggcggcggcatagagtaaacctcatacccgcgatactcgccgctaaccggcgtacgctccacggccttatagccggcgagatcggctttggtgattagcccgccgtgctttttcatctcgtcagcgatctggtcggcgatggcccctttatagaaggcgtccgggccgtgctcggcaatcagctccaggctcttaccgaggttcttctgcaccagccgatcgcccttcttcagcggctcgccgttcttccagaagatcgctttactattttcatgctgcgggatcacttcgctgccgtaggtcttcagatcgtccgccagcgcatcgttaacgataaacccctcttccgccagcttaatcgccggacggatcactttgttcaacggcatggtgccatacttttccagcgcgagggagaaaccggcgacgctgcctggcgtgccggaggccagatgcgaagtcagtgattttttactgtccgggttgccctggtcgtcaaggaacatgtcgcgggtggcctgctctggcgccatttcgcggaaatcgatcgccgtggtcttgccgtctttagtccgcagcatcataaaaccgccgccgccaatattcccggcctgcggatgggtgaccgccagcgcgtagcctaccgctaccgccgcatcgacagcgttaccgccctggcgcaggatatccacgccgacgcgggtcgccagcgcgtccaccgaggccaccatcccctgccgggcgcgtaccgggtggaacacatcttcctctacgccataagagaccggcggcggtggcggattggcggcgacggtaaagctgccccccgccagcaacgcagcgatgaccacctgacgccatattgttgtttttatcattgtcttactcctgaaaggtaggtttcattccccgcttaagcctggttgataactcctaaaaaatcattgttatggcagattcgaggtacacttaagtgatcccacgcacgggaggagaaaaccatgaaagcgattctgtttctggcggcgctgatgccgcttggcgtattagcccagccgatcaatattaataacaaccctaaccagccgggttacgtggtccccagccagcagcgcatgcaaaatgagatgaaggtgcagcaacagcagcagcagagcatgctgaagcaggatctgaacaatcagacccgctcgcagcagcagcatttgcaaaaccagctgcagactaatcagcagcgcgcggcccagggcggcaatctgaatgcgccgcagcaggtgcggccaaataacaacggtggaatgctgcggcagactaatccgtaaaggtcgtccgccgcaaatccgtcttaaggctggaaattcggcccgataacatcaatggcatcggtgcagatgcagtctacgccccagcacagcagttcggcggcgcgctggggtttattgaccgtgtacaccagaatgtgcaggccggcctgtttcaggctcgccacccgcgccgcatccagcagtttgtgattgaggtgaatcgacacgcagcccaaccgggtggtcaattcgcgccagtcatcgcgccactcatccagcagcagcccgcgcggcagctcgggcgcggcttcttgcgccgcctccagggcgtcgatttcaaaagaggagagcagcggcgcggtcatgccttgccatagatcgcgcgcggccagcgccaccactttcccggtctgcggccccagcccggtggtcggcttaatttcgatattcgccatcatgccgtggcgacggcagcgctccgccacctgggagagcaacggcagcggctcgcccttaaattcacggctgaaccagctaccggcatcgaccttcagcagatcgtcccacgccagctctcccgccacgccccagccattgctggtgcgttcgagattatcgtcatgcagcagaaagatctgcccgtccttcgacagcttggcgtcaaattcaatcatcgtgtgcccgtagcgggcgccgacgtcgatagccgccagggtgttctccggcgccagtttaccgccgccgcgatgggcgacgatgcggggataaggccagttactcatgcgcgttgtcctgtttcaccatcaaagaggtgcagatgttccaaaggcagatgcagccatagcgtgctgcctgccgccgggcgctgctggtgcggcagtctgaccaccagcttctgttcgccccagcgcccgtgagcgaggttatcggcacctaaaatttccagggtgtccatcagcagcggaataccaccttgcgcctgcgagcttaagataaaatgctccggacggataccgagcgtcattttacgcccagcgtggcgccggtgctcatgattcgtcggcagctgcatgccgcccgccagctcaaagcgaccgccgtcatcgctgatgcgcccttccagcaggttcatggccgggctgccgataaagctcgccacaaagcggctggctggcttctcgtacacttccaccggggtgccgatctgctcggcaacgcctttgttcatcaccatcacccgctgggcgagggtcatcgcctccacctggtcatgggtgacgtacagcgaggtggttttcaggcggcgatgcagctgctgcagttccagacgcatctgcacgcgcagcttggcgtcgaggtttgacaacggttcgtcgaagaggaataccgccgggtcacgcacgatggcgcggcccatcgccacgcgctggcgctggccgccggacagttcccgcgggcggcgcttgagcagaccatccagctcaagaatgcgcgccgcctcctgcacccgctcggcgatcaatcccttacccatgccgcgaatcttcagcccccacgccatgttctcttccacgctcatatgcggataaagggcatagttctggaacaccatcgcgatgccgcgatccttcggctccatctcggtcacccgtttacgatcgatccagatatcgccgctggtcacccgttcaagtcccgcgaccatccgcagcagcgttgatttcccgcagcccgacgggccgaccatgacgataaattccccgtccgccacgtccagcgtcaacggttgaattacctgggttttgccatcccagcttttgcttactgcctgtagttttaaaccagccattttatttctcactatcgaccaggccgcgcacaaacgcgcgctgcatggctaaaacgatgacgaccggcgggatcagggtcagcagcatcgccgccatcacctgattccactgggtagtaccttcgccggtggcgatcatgcctttaataccggcgacggcagtgccaagattcacatcctgaataatcagcaacggccacagatactggttccagccgtagataaaggtgatgacgaacagcgcggcgaggttggttttcgacagcggcagcacgatgtcgcgaaagaagcgcatcggcgaagcgccatcgatacgcgccgcttcaatcagctcgtccggcagggtcataaagaactggcggaacaggaaggtggcggtggccgaagccatcaacggcagcgttaacccggcatagctgtcgagcatgttgaggttggcgatcacctccaccgtcgggaaaatacgcacctcgaccggcagcatcagggtgataaagatcatccagaagaacaggttacgcagcggaaagcggaaccagacgatggcgaacgccgaaagcatcgacaccacgattttgccgaccgtaatggcgaacgccatgatgaaactgttgagcatcatcagccagaacggcgcgctgttgacgccgacgccgttcacccagatggtcttcatgttctccagcagatggccaccggggatcagcgtcatcggcgtttcaaataccgatttgttatccagcgtcgccgccacgaaggcgacgtacagcgggaataaaatgacggcgatacccaggatcagcatggtgtggctgaaaatcgtcagcccgcgacggttctcaatcattggtaacgcaccttactttcaacgtaacggaactgcaccaccgtcaggataatgacgaggaacatcagcaccaccgactgcgcggcggaagcggatagatcgagcccggcgaaaccttcgcgatagattttgtagatcagagtggtggtcgcctgcaccgggccgccagcggtggcggcatcgatcaccgggaaggtgtcgaagaaggcataaaccaggttgaccaccagcaggaagaaactcaccggcgcaatcagcggcagcgccagcttaaagaagcgacgaatcggcccggcgccgtcgatggcggcggcctcaaccagcgaacgcggaatcgactgcagcgcggcgaagaagaacaggaagttgtagcttatctgcttccacaccgaggcgaagaccaccagaaacatcgcctggccgctgctctgcgcatggttccagtcatagcccagctcgccgaggaaatgggtgatcagcccgcgcccggggttaaagaggaagatccacagcaccgccgcgacggcgggggccacggcgtacggcagcagcatcagcgtttgataaaagcggctgccgcgcaccacatagtcgaccagcgcggcgaaaaacagcgaaatgagcaggccgctgacggtcaccagggcgctgaattttatggtggtccagaacgagtccaggtagtacggatcgtggaacagcgcaacgaagttatccaggccgacgaactggctggaaaggccaaagggatcgacgctctgcagcgagtaccacagcgcttcgcctgcgggccagataaagaaaatcagcgtgataatcagctgcggcgcgaccagcacatagggcagccagcgcgagcggaataccggacgggatgatgacattgagattgggttcctgaacaatgccgggtggcggctacgccttacccggcctacatagggcacatcgtaggcccggtaagcgcagcgccaccgggcaagttacagattacgatttggtcgcttgctcgacgcgacgcagcagctggttcccgcgctgcacggcggaatccagcgcctgctgcggggttttcttgccggtccacacgctctccagctcttcatcgacgatggtgcggatttgcggcatgttgcccaggcgcagacctttggtgaacggcaacggcggcttgttcagcatctggcgggtagcgatatcggcgcccgggttcttatcatagaagccctgctgacgcgtcagatcgtaggccgcggtagtgatcggcaggtagccggttttctggtgccactcggcggcgttttccggtttggtcaggaagtcgaggaacttcgccacgccggtgtaggtctctttgtctttgccctgcatcacccacaggctggccccgccgatgatggcgttctgcggcgcgcctttcacgtcggcatcgtaaggcatcatgccgacgccgtagttaaatttggcgtactggcggatatcggccagcgatccggacgaggcagtggtaatggcgcagtcgccgttatagaacttttcggtagactcgtctttacgcccgaagtagctgaaatcgcccttcttgttcatctcttcgagcagcgcgatatgcttcacctgctccggcttgttgaactcaagaaccgcgtcggtaccgtcgaagccgttattcttcgtggccaccggcagaccgtgccaggcgctgaagttttcaatctggatccagccctgccagccgctggcgtagccgcacttcatcccggcggctttcagcttcgcggtgtaggccgccagatcctgccaggtcttcggcggctgctccggatctaagccggcttttttgaaggcgtctttgttgtagtagagcaccggggtagagctgttaaacggctgggagagcagatggccggttttcgaatcggtgtaatacccggccaccgtcggtacgaactgcgattcatcaaacttgatgcccgcctcgctaaacacctggtagaccggcttaatggcttttgacgccatcatggtggcggtgccgacttcatacacctgcaggatagccggcgcgttgccggtacggaaggcggcgataccggcgctcaggctctgctcgtagttgcctttgtataccggaacgattttgtaatcaggattggccgcgttaaagcgttgcgccagagaatccacttctttacccagctcgccttccattgagtgccagaacgggatggtggtaaccgccagggcctgaccggcaaaagccaggctcagcgccagtcctaaagctgtatgtcgtaacgatatcatcggttatctctcttgttgtgccggatgcgcgatttcacgcgttttatgctcgcggggtaacatgacatgttcgaattacagaaaaataacttttttattacaaaaaaaagatagtaacgggtcagagagatgacaagccgatgaaaggacgggggaagtaaagtgggagctgagacacggataatattcgtgcggtcggctcccggggtcggcgcaagcgcctcgcccgggctacaaaccggcgaagccgccgggttgcaacgagttaaccgtcatccgcgcaagcgcgcgacaatctgttccagggtaagttgccctgctgccgcctcgacggtcatgccgacgaagtctggattcgccggcaatataattccatttcgctttaaaaaaagcagagtgataaacagtgccgtacgcttattaccatcattaaatatatgaccgcgagaaatcgccagcagatgcatcgcagcgagtcgccacacgtctgtcacaccttcatattcaattttgtttagcaccctatacattatcgcttcggcacgccccggatcgggcataccggcaacgccaggcgtgacgcggagcagcctgtcgtgaaactgtattatctcttccgctgagataatctgcagcgtcatttatccgcaagctccctgatctcatcaccatgaaccgccatgatagccgcgaactcatcatccattctggccgtctggtagcgttcaaactcttctgcactaatgatgactgcagatttatgcccacgacgggtaatggtcacaggtacacctgtcactgcgctttccagcacatcggccagattttgccgggcttcgctatagttaaccgttctcataaaaacctccaaagctgtactcttttattgtacaacatacatgtacaaaaaaagagccaacaggctcttttaaatgtattcgtgcgatcggctcccggggtcggcgcaagcgcctcgcccgggctacaaaccggcgaagtgaacgacgccgggttgcgatgaattaaccgccgagataggcgctgcgcaccgcctcgttggccaacagcgcgtcgccggtgtcctccagcaccacgtggccgttctccagcacatagccgcggtcggccagcttcagcgcctggttggcgttctgctcaaccaggaagatcgtcattccctgctcgcgcagctgctcgatggtgtcgaaaatctgctgaatgataatcggcgccagccccagcgacggttcatccagcagcagcaggcgcggttggctcatcagggcgcgaccgatcgccagcatctgctgctcgccgccggacatggtgccggcgcgctgaatacggcgttcatgcagacgcgggaacagctcatacacccatttgatgcgggtctggaactgatcgcggtcggcaaaaaaaccgcccatcgccaggttctcttccaccgtcatacgcgaaaagacgcgccgcccttccggaacgatcgccaccgcctcgcgcatgatcttcgcggtttgccagtcggtaatatccttaccgtcaaagacaatgcgcccgctggaggcgcgcgggtcgccgcacagcgtgccgagcagggtggttttccccgcgccgttggcgccgataagcgtgacgatctcgccctgtttgatatgcaggctgacgttgtgcagcgcctgaatcttgccgtagtgggcgctgacgttgtcaaaagttaacatcgcgttttccatcttatgcctcaccaaggtatgcgcggatcacatccgggttattacgaatctcttccggcgtcccgttggccagcggtgttccctggttcacgacgtagatgcgatcggaaatgcccatcaccagcttcatatcgtgttcgataagcaggatggtggtgttgtgatggttacgcagctcggcgataagctcgtccagctctttggtctctttcgggttcagccccgccgccggttcatcgagcatcagaatttccggctgggtcaccatgcagcgggcaatctccagccgacgctggtcgccgtaggccaggttgctggcctgacggttggcatgctccagcaggccgatgcgctccagccaggtggcggccctgtccagcgcttcgctctgcgcccgacggaaggccggcgttttcagcaggccggagaagagcccggttttcagctgctgatgctgcgccaccagcaggttttcaatcaccgtcatttcgcggaacaggcgcacgtgctggaaggtccgcaccacgcccatccgcgcaatctgctgacccggcagcccttccaggtgctggtcgcgcagcagaatagtgccgccggtgggcttgtaaaaaccggtcaggcagttaaagacggtggtcttcccggcgccgttggggccgatcagcgagacgatctcgcgctctctgagctccagcgacacattgttgacggccagcagaccgccgaaacgcatcatcaggccgctaacggataataatggctgactcatgcctgctctcctttcgcctgaccgtttttcagcttcaactgcacgcgcgtcattggcagaagcccctgcggacgccagatcatcatcagcaccatcaggccgccgagcattaacatgctgtattcgttgaagtcacgcatcaactcgcgcgagaccaccagcagaatagccgcgaggatcaccgcgaactgcgagcccatcccgcccagcacgacgatcgccagcacaaaggctgactcggcgaaggtaaaggattccgggctgacgaagccctggcgcgcggcgaacagcgtgccggcgaagccagcaaacgcggcgctgatggtaaaggcagtcagcttgatgcgcgtcgggctcaggcccagcgaacgacaggcgatctcatcttcacgcagcgcttcccacgcccggcccagcggcattcgcagcaggcggttgatgacgaacaggctgagcactaccagcagcaacgccaccaggtagaggaaaatcactcggtcggagggatcgtatttgacgccgaagaagttgctgaaggtatcccagccgccttcgcgggcgctgcggctaaattcgaggccaaagaaggtcggtttcgggatctggctgataccgttcggcccgccggtgatctcggtattgttgagcagcagaatgcgcacgatctcgccgaagcctaaggtcacaatcgccagatagtcgccgcgcaaacgcaacaccgggaagcccagcaggaaaccggccgccgcggagaccaggccggccagcgggagacaggtccagaagccaagaccgtaatagtggttcagcagcgcaaaggtatacgcgccgatggcatagaacccaccgtagcccagcaccagcaggccggaaaggccgaccaccacgttcaacccgaggccgaggatgatatagatcatcgtcagggtggcgatatccaccgtgccgcgcgacaccataaacggccaggccacggcaatcaccagcagggcgatcaggaacagcttctgcttcaccgtcgacccgtcaatcgccggcataataaacttcggcccggagacgttcttaaccgctttctggaacagcggccgcagcagctggaagaaaaagaccaccgcggtaccgatgaagatccacggccagcgaatatcggcggcggtatcgaccaccagtttggtgccgttcagctccagctgcacgcccataaagacgcccgccagaatgaagaacatcacggcagagagcatcgccattgcaatttgcatcggtttcatactttttccacctccgggcggcccagaatgccggtcggcatcactaacagcaccagaatcagcagcgcgaaggaaacgacgtccttatattcggtgctgagataggcggaagagagcgcctcggcaatacccaggatcaggccgccgatcatcgcgccagggatactgccgatcccgccgagcacggcggcggtgaacgccttcatcccggccataaagccgatgtaggggttaatcacgccgtagaactgccccagcagcacgccggccaccgccgccatcgctgcgccgatgacaaaggtcagggcaatgacgcggtcggtgttaatcccgagcaggctggccattttcagatcttccgcgcaggcgcggcaggcgcgccccatccgcgagtagcgaataaacagcgtcagggccagcatggcgataaaggtcaccacccagatcaccagttgcatggtggtgatcgtcgcggagaagctgtcgctgtggccgacgacccactggccgttaaacaagctcggcagcgccacgtcgcgggagccctgggtcaggctgacgtagttctgcaggaagatagacatcccgatggcggagatcagcgcaatcaggcgcttggagttacgcaccggccgataggccacgcgctcaatgctccagccgtaggtgctggcaatcacaatggcgcccacgaatccggcggcgaccagcagccagctagtgtcaatgcccatcatcatcagcgcggcgatgatcatgaaggagacatagctgccaatcatatagacctcgccgtgggcgaagttgatcatgccgataatgccgtacaccatcgtatagccgatggcgatcaacgcataggtactgcccagcgtgacgccgttaaacatctgctgcagaaaatagagaaactgctcggacataaggtaacctttttcaaaccgcccgcggttcgcaggcggagggataactcgtcttcagcgcttatttcgccgcgctcgaagagccgtcggcgtgccactggaagacaccaaactcaaatcccttcagatcgcctttttcatcccaggtcagcggcccaatcacggttttcgccccgtgcgctttcaaatctttgattaaatccagcggctgctggctgccggttctgtccatcgcctgcgccagcgactgaacggcggcataggtgatccagacgtacggtccgctcggatctttcttctccgctttcagcgcgttgacgatggcgctgttggcagggtcctgatcgtagcgttttggcattgtcaccagcatgccttccgccgcggcgcccgcgatattggacagcgaggcgttgccgaccccttccggccccataaacacggttttcaacccgacggagcgcgcctggcgcagcatctggcccatttccgggtagtagccgccgtagtagacgaagtcgatgttctctttcttcaggcgcgccagcagggcggagaaatctttttcccccgcggtgatgccatcgaagaagacgatgttggccccggctttcttcaggttgtcctgcaccgaacgcgccagcccttcgccgtactgctgcttgtcatgaatgatggcgatacgctgcggtttcactttctcgacgatatatttcgccgcggtcggcccctgcgaggagtcgaggccggcggtacgcatgatgtactggtatccgcgctgggtcagctccggattggtcgccccgggggagatcatcaggatgccttcatcctcatagatgtcggaagccggctgagtggaagaggagcacaggtggccgataacgtactgaataccgtcgttgacgattttgttggccaccgcgaccgcttgcttcggatcgcaggcgtcgtcatattcgacggccaccagcttgtcgcccttaatgccgccgctggcgttgatgtctttaatcgcctgacgcgcgccattgaactccatgtcgccccactgggccaccggacccgacatcgcgccgaccacggcgaccttaatatccttggccatcgccgcgtgcgacatcgctaatgcgacaatgcccgcgacgatggttttcgcgttccttttcatgctgcagaaccccgttcgtgatgtggtgtaaatgttttgtatttttatggttaaaaagcattctgtgcttttattaaacaacgccatttttaccattgagtttaatggtttagcgcagtttttcactaaaaaacagattaaaacctctatttttcagtcgattaagcaaagataatattctgtattttggtgaagataaacaaaaaaaagtccatcctgcagcataaaataacgatacataaggcggaataaaacgctgcacattaggttaaaattctgcttatttttcgatccatgacggattgcgctaccctgacaacgccaggaaaacgaatcccctgatgtacgcgcaaaaaacagcgctccgccagacagcaatattgggtacactggcgcctctgttttgcactggatttgccgcccatgaaactgaccattatccgtttacagcacttcagcgatcaggatcgcattgatttggggaaaatctggccgtcacaggatctgtcgacgctgacccttgatgaaaaccatcgtctctacgccgcccgctttaacgaacgcctgctgggcgccgtgcgcgttaccctgcgcggcgtcgaaggtgagctcagcgatctgtgcgtgcgtgaagtgacccgccgccgcggcgtcgggcaatacttagtggaagagacattgcgtgataacccggcgatcaatagctggcgcgtcgccgaccatggggtggaggaccgcggcgtgatggcggcctttatgcaggcgctcggctttagcgcccagcagaatggttgggaaaagcattaagccgtagccccaataagcggagcatgcccaaggaagaacccggcggcgcttcgcttagccgggctacctggcgactgtagccccggtaagcgcagcgcgaccggggtcagacaacgcatttgcagtgggaaaggcgccccccatttaatccagcatttcgcgttgtaaaaaggcgtcaagacccgaaatccccgggagcttacatcagtaagtgaccggggttgagggccgcagacaacgcatttgcagcgtgaaaggcgccccccatttaacccagcatttcgcgttgcaaaaaggcgtcaagacccgaaatccccgggagcttacatcagtgagtgaccgggattgagggccgcagacaacgcatcggcagcgtgaaaggcgccccccatttaacccagcatttcgcgttgcaaaaaggcgtcaagacccgacatccccgggagcttacatcagtaagtgaccggggttgagggccgcagacaacgcatttgcagcgtgaaaggcgccccccatttaacccagcatttcgcgttgcaaaaaggcgtcaagacccgaaatccccgggagcttacatcagtaagtgaccggggttgagggccgcagacaacgcatttgcagcgtgaaaggcgccggttaaattatttggcgtcggtcgccgtaccgttcgcatgccaggtaaagaccccgaactcgaagcctttcaggtcgcctttctgatcccacgacagcgggcccatcacggtgtctactgtcgcgcctttcaggtatttagcgatttccgccggatcgtcagactgattcaggcctgcctgcagcgactgcagcgccgcgtaggtggtccagacgaaggcgccgctcggatcctgtttcttcgccttgatcgcgtccacgatcggtttgttcgccggcacctggtcgtagttcttcggcttggttaccagcaggccttccgccgactcgccggcgatgttagacagggagacgttcgctacgccttccgggcccataaactgggttttcagaccggcggcgcgcgcctgacgcaggatctggcccatttccgggtgatagccgccgtagtagacgaaatcgatattctctttcttcaggcgcgccaccagggtggagaaatctttctcaccggcggtgatcccgtcgaagaagaccacgtttgccccaccttttttcaggccatcctgcaccgcacgggccaaaccttcgccgtactgctgtttgtcatgtaccactgcgatacgctgcggcttcactttgtcgagaatgtatttcgccgcggttggcccctgatcggagtccagaccggtggtgcgcaggatcagcttatagccgcgcgccgtcagttccggagcagtcgctgccggggtaatcatcagaatgccttcgtcttcatagatatcagacgccggctgagtggaagaggaacacaggtgaccaataacgtatttgatgccgtcgttgaccactttgttggctaccgctaccgcctgtttcgggtcgcaagcgtcatcatatttgacgatctgcagcttattgcccttgatgccgcccttagcgttgatatccgctaccgcctgctctgcgccggtaaactcctggtcgccgtactgggccaccgggccggacatcgccccgactaccgcgattttgatatcttccgccagcgccgcgctgctcataactaaggcaatacatcctgccagtaacgctttacccttcatattcatcctgaggctccccattattatggtttttgcatttgttgtgatgttgtttattagcgcattattttgtttataccgataggaaaagcatatgatagctaatcaaccgggggctgcccgcgcttttgcagcacactatgctaaacataccgtcattctgaggaatttgaaacgactaaattgcgggctatgtaacagataagtgacaaataaaaaaaccgcgccagcatgaaccggacgcggtgcaaaacagagcctgattaccagcctacgggtaggtagcccaccgcggatgctatcgcgtaggcggcgctgcaaagatacaacaacacaatgaagcattggataagcggatgggtcatccaggccggacaggtccagcccggggtcagatcgccacgctggcgggcgcccttgagcatcaggatcggcataatcgataaaatgacgccgctgaacaccccggcaaaatagagcgcgttgacgaaggagaccatgccgctataggccagcacgaacggcgggatcgccaccaccagcagcaccatcaggcgccgggcgggctgttcgtcattccccaggcggaactgatcgaagatattggtcaggaagctgccgcccagtccccagtaggaggtcaacatcgcgcacagcgcaaacagattggctgagaagaaggcccattcgccaagcgcccgaccccaggagatggtggccacatccgagatattgtccagaccgttaagcgagatcaccgacaacggcaccagcgccagcagggtaaaggtcagcgccatgccgaccatgatggctttaggcaatttttccggtttatcggcgaagccccgcgccatctccggcacgatatactgtgccgagaagcagaatgccacgacgttgaagaccggaaccatatacagccagttgccgtcgagcagatagccgacgcgggtggtctctttcaacagcgtggcaatcaccagcaccgagatcatcaccaccatgccgatgctgataaatttctcaccgcggccgatcgccttcagccccaggtagagtacccctgccgccggaacgaaaaacagcacgctgcccagcgccggcgagatgccaaacagggagtgcagcagcttaccgctgccggtcatatacgccgtcaatgccccgacgctattgacgcagacggagagaaacatcatcagcgcgccaaaaccgccgacatagcgcttcgataaaccgctgagctgcagatgtttacgggtgcgcagcgtggattccgcgacatagagcatagtcaccgtcgtcaggctgcccaccagcaccagccagaacagcagcggtaagaagcccgctttgctcgacgcataggcgatagagaggacgcccgcgccaatattggtaccgacaatcatcgataccccttcgacgaagctcagagattttgcagagacagccgtacgttcccggccggtgaggacgggagaaaaggtggagttttcagacataatactttccgttttactccggcggttttcaccgccggaaaaaaggtgatatcagggtgataaaccactcacgctgagcataaacagccggctgcggcgtcctgtttctgttcggcttccctgccgccgcagcccgccggggagacgttagctcttcagtacgcgcgccagaatatccagcgctttcgagaactgggcgtcggggatagtcaacggatacaggaagcggatcacgttgccgtagacgccacagctcagcagcagcaggccgttctcctgcgctttctgttgcacctggcgggtgaactccggcgacggctcgccagtttgcggatcgttaaactccactgccaccatcgacccccggccgcggacatcaacgatcgccgggcaggtagcgcgcgcctggttgagcacttcctgcagatggctacccagctgttcagcgcgctggcacagctgctcttcggcaatgacatccagcaccgcgtgcgccgcggccaccgccagcgggttaccggcataggttccgcccagcccgcctggggctggcgcatccatcacctcggcgcgaccgacaacgcccgacagcgggaaaccgccggcgaggcttttcgccatcgtcatcagatccggtttcacctcatagtgctgcatagcgaacagcttgccggtgcgggcgaaaccggtctgcacttcatcggcgatcagcagaatgccgtgggtatcgcacaggtcgcgcagcgcctgcataaaatcggccggcgcgacgttaaagccgccttccccctggatcggctcgagaatgatggccgctacctggtccggcgcaatatccgctttgaaaatgcgctccagacttttcagcgcatccgcggtggtcacgccatgcgccgcattggggtaaacgccgtgatacaccgagcccgggaatggcccgaagccgattttgtagggcgcgaccttaccggtgagggccatggtcataaaggtacggccgtggaaaccgccgccgaaggtaatcagccccggacgaccggtgtaagcgcgggcgattttcaccgcgttctcgaccgcttccgcgccggtggtgaagaaagccgtttttgccggcccgtcaattggcgccagatcgttgatacgctccgccagcgaaacatagctttcgtacggcacaatctgataggcggtgtgggtgaacgcctgcagctggtcggcaaccgcggcgaccactttcggatggcggtgaccggtatttaacacggcgatcccggcggcgaaatcgatcacctcattgccttcgatatcccacagcgtggcgttttccgccttctcgacaaagtagttacacattacgcctacgccgcgcggcgtcgcctgctggcgacgttgattcagttctgagcttttcacctgcgaatctcctgtcgtgtatgtcacgttatcgcaacaaattagaaacgatgtcgtttatttacacaggagttggccctataatcgagtaccaattttgaatatctgagggatccaattgcgttcgctggtgggtgacctggtgctggtccgtctgcaggaagagcgggatcctcttctgcacaaacgcttatataacgcgctgcgccgcgcgatcctcgacggttcgctggcgcctcaaagccgtctgccgccgtcgcgggacctggcgggcgaacttggcgtatcaagaaacaccatattaacaacttatgaacaattgctggcggaaggatatgtggtttcccgtcggggaagcggaacattcgttgcccaaaccgcccctgagagctcattgacggctaaaggtcagcaagaaaacagcagtatcgcagcaccgacggcgcatatttcacgccgaggccagcatctgctcggccaggtcagcgccagcccgcgccagtggggagcgtttatacccggcgtgccggacgttaacgcctttccccacccgctgttcagtaagatccaggcccgcatcagccgtcggcccaaaccggagcggctcagctatagctgcaacggcggcactccggaactgcagcaggcgctggtggattatctgcgcgtgtcgcgcggcgtccactgtcagtcagatcaaattcttatcaccgaggggatccaccaggcgatcgatctggtcacccgcatgctgtgtgataacggcgatctggcgtgggtggaggagccttcctactgggggatccgccacgtgctggcgatgaacgacgttcgggcagagcccctgaccgtcgatgccaacggcctgtgcccgccggagacggttgacgatgcgccgaggctgatcttcgttacgccttcccaccagtatcctctgggcgcggtgatgagccttgagcgccgccagcgcctgctggcactcgcccgtcagcaggggagctggatcgtcgaagatgattatgacagcgagtttcgcttttccggtcagccgatccccgccctgcagggtctggtcgccgacgccccggtggtctatatcggcaccttcagcaagacactctatcccggcctgcgcctgggctacgtggtgatcccgcggccgctggtcagcgacctgaagcacgcccatgccgagctttaccgcggcggccattcgctgatccagatggcgctggcggagtttattaccgccggccactattcggcccatatccgccgtatgcggctgctctacagccgtcgccgcgcctttttaactgagcttatccagcggcactgtatgccgtacgccctgtctgacttcagcgataaggccgggctgcatttgatcctcaatttgcccgcagaggctgacgatgtggcgatcgccagagaggccaatgcgcggcacattctggtgcggccgctgtcgcgctactacctgacggcggcgcgcaagaaaggattactgatgggattcgccagccagcccgaagagcagatggcgtcggcgttcagcgtcttactcggctgcctgcagacgcactgcccgcagatgctcctgcccccgggggacgcagaaaaacaaaacgccccaacctgaggcggggcgttatcgtggagcctgatatcaggtatcaggcaggcgtggcgtatcaggcttcgatagcggcgcgcagttttttcatggcgttcttttccagctgacgcacgcgctctgcggagacgccgtagcggtcggccagttcctgcagcgtggacttgttatcttcgtccagccagcgggcgcggatgatgtcctggctacgctcgtccaggccctgcatcgcgtcagtcagcttattcgccgcctgctcttcccagttatcgtcttcgatgccgtcggcaaagttagacgttttgtcctgcagatacaggaccggcgccatcggctggctgtcggactcatcgtcggacgacatgtcgaaggtcatgtcctgggccgccatacgggattccatctcgcggacgtctttgctcgacacgcccagctcacgggccaccatttccacttcatcctgattgaaccaacccaaacgctgtttggttttacgcaggttaaagaacagcttacgctgtgctttggtggtagcgaccttcacaatacgccagttgcgcagcacgtattcgtgaatttcggctttaatccagtgcacggcgaaggagaccaggcgcacacccacttccgggttgaagcgacgcacggctttcatcaggccgatattgccttcctggatcagatccgcctgcggcaggccatagcccgagtagttacgagcaatgtgaacaacaaagcgcaggtgagacagaatcagctttttcgctgcttccagatcgccctggtaatgcagcttttcagcaagctcccgctcttcatcagccgacagcatcggccaagtgttagcggcccggatgtacgattccaggttaccaacgggggctaaagctaaagtttgcatttctttggtcattcaaatcctctcaattgatatcttctgacgcgttcttgtccccatcaggcaacaagcatgccagcattcatgagcaacgagaatatcactcacattagtatcagacagtgattttatccacaagttccatgcaacggtgtgaataaattacgcacaaaatgtgacaccacgatgaaaaagtgagggcaggaaaaggggaacaagcttgcggtatctttccctgcgaacaggaactcattgcagcagggaaagattatatcacgcttttattaatcgggagtaaagtgacgtaaatgttgcactgtcgccagccaggcggctacccacccgatcatcgagcagacgatcaacatcaacagacactcgtcgaagcctaagccgctcagctcaaactgggtgccgaagactttcgccacttcggtcaccgccgacgagaggcgcattaccagaatctccgacaggatcagcgataaaaacgcgccggaaaagcccagcatcgctccgccgtagaggaacggacgcaggataaagccgtcggtggcgccgataagcttctgaacgttaatggtatcgcggcgggcgaagatgctcaggcgcacgctgttgccgatcaccaggaacaccgccgccaccatcagcacgccgatcatcgccgacacgcgtcctaccagcccggtgagcgaggagagacgggcaaaccaactgtcgtccatccgcacttcatcgacgccctggatccgcgttacccgatcgcgcagggtattcagcgcctcggtgctctggaaatccagcttcggcaccacgatggcgaccgccggcagcgggttctcctccagcatatccagggcgccgccaaagccagaccagttacggaattcccccagcgcctcgtcacgggacaaatagtttaccttgtcgacgccctgctccgcctgcagctggcccaccacccgcgccgcggcatcgtcatccagcgttttttccagataaacggtgatctgcggcgagggataatactgggacgccgcgctgctgacgtttttgtagaccatgtagcagacgcttggcagggtcaacgaaatggcgatgaccattaccgtcaggaaggtcgccagcggcgtgctttttagatcctgcagcgcgccgtgccaggcatagcgcacctgctcgttgaatacgttgctcttacgcgaggccgggttaggcgccgctttcggccgttttggcgcattgcgcccgccgccgccgccgcccgcggcgttgcgcaggcgatcgaacttgctgccgaactggcgaatctggttcattgcgtcgcgcttattcaccccgaatgcctccatgcagatggccgtcgctaagcgtcagcacgcggtacggacgactggagataagccccagatcgtgcgtggccatcagtaccgtcaccccgacgcggttaaactcttcaaacagacgtaaaatcccctccgagagcgcctcgtcgaggttgccggtcggttcatccgccagcagcaccgccggcttgttgaccaccgcgcgagcgattcccacgcgctgctgttcaccgccggagagctgaatgggaaaattcttcgctttgtccagcaggccaaccttgtccagcgccgccgagacgcgacgacgaatatcatcgccgctggcgccggcgataatcagcgggatcgccacgttgtcatacacggtacgatccatcagcaaatggtggtcctggaaaatcataccgatctggcggcgcaggaacggcacctcacggctcttcagacggctgatttcatgaccgctgaagaagattttcccggcgctgggccgttcgataccacagataagcttcagcagggtactcttccctgcgccggaatggccggtcagaaacgccatctcgcccggctgcaggtggaaggtcaccccctgcagcgcttgtctcccaccgagataggctttgctgacttgttcaaagcgaatcattcttaatcctctcgggcaaaaagtgcctcaataaagtcgcccgcattaaacggacgcagatcctcaatacgctcgccgacgccaatatagcgaatcggaatgccgaactgatcggccaccgagaagatcacgccgcctttggcggtgccgtccagcttggtcagagtgatcccggtcaatcctaccgcctcatgaaacagtttggcctggctaatagcattctgcccggtgctggcgtcaatggttaacatcacctcgtgcggcgcgtcgacgtccagctttttcattacccggacaatcttcttcagctcttccatcaggtgcgatttattttgcaaacgcccggcggtatcggcaatcagtacgtcaacatggcgcgccttcgccgcctgaatggcgtcgaaaatcaccgaggcggagtcggcgccggtgtgctgggctatcaccgggatattattacgctggccccagacctgcagctgttccaccgccgccgcacggaaggtatcccccgccgccagcatcaccgacttaccctgctgttcaaactgacgcgccagcttgccgatggtagtggttttccccaccccgttcacgccgaccatcagaataacaaatggcgttttgccttcaacgttcagcggctcgtctactttggcgagaatctcgcccatctcttctttcagcaggccgtacagcgcttccgcatcgcgcagctgcttacggctggcgccttccgtcaggttggtaatgatcttgcgggtggtttccaccccgacgtcggcgatcagcagctgttcttccagctcttcaaacagatcatcgtcgatcttcttaccgcggaacaggctgataaatccggaaccgagattttgcttcgttttcagcaggctacgtttgaggcgggcgaagaaaccttcttttgtcggtttttcctgctcctgagccagcgcttcaagcggcgcctcgtcctcgggcgccggcaccactaccgccgcctcttctgccgcttcggccgccagcgcctgcgcttccagctcttcatcgcttaacggcgcgtcctcttcgggcgcttctgtctcctgcggctggacaacgatgccttccacaggctgctctgctacggcttccgccaccaccggttcggcgataacctcttccgccagcggctcaaccaccgcaggctgttcaggcggttcgctgaccgcgggctccggttcaacaacaggcgtttcttcggtcagagcaggcgtttccacccactcttcttcctgcgcgctggcaggctccgcgaggtgcgctttttcgctttcgaccaccgtctcggtcacttcgacgacgtcttcggcaaacgcctccgggtctgctttcggcgcgctcggctcagcaggggtttcaaccgccggtatctcttcggcaaccgcttgctgttcttctactttttgctctgtctcggtttcctgtgcctgttctttctgtccaaagcccagccaggaaaagaagccacgttttttctcttttgccatttgcgaccacactcctcgctgtttattcatggcgcagcttcatcagaagctgaaaaaatgatgaaattagttggatagtctatcacttaacttaactcgcagcaccgcccccggattaaggtttcgtcaaccgccgtcgatcgctagaatagcaggctggaagttgagacttgagcagagagatgaaaaaaccaaaccacgcgggcagcggtcagatccgcatcatcggcgggcaatggcgcggccgtaaattaccggtgccggagagcccgggcctgcggccgaccaccgaccgggttcgcgaaaccctttttaactggctggcgccgtccattgttgacgcgcactgcctcgattgctttgccggcagcggcgcgctggggctggaagcgctgtcccgctatgcggccagcaccacgctgctggagatggagcgcggcgtagcccagcagctgcaaaaaaatctcgccaccctgaaagcggatcgcggcaaggtgatcaccaccaacaccctcagcttcctgagccagccggggaccccgcaccagatcgtgttcgtcgacccgccgttccgtcaggggctgctggaggagacgctacgtctgctggagacacaaggctggctggccgatgaggccctggtgtacgtcgaaagcgaagtcgaaaacggcttaccgccggtgccggctaactggcaattgtatcgtgaaaaagtggccggacaggtcgcctaccgtctttaccaacgtgaggcccaaggagagcaccatgctgattaatttaggccgcctgctgatgctgtgcgtctgggcctttctgttattgaatctgtttcagcccttcccgaagccgctgaatatctttgtcaacgtcgcgctgattttcatgatcctgatgcacggtctgcagctgacgctgctcaaggcgacgcagccgaaagaggcgccgccgctgagccgctttgagcaaatccgcatttttattttcggcgtgtttgagctcgtcgcctggcagaaaaaactgaaggcgacgctgaaaaaatagtcctgaaaagggctcagggatcgggcgtaaacgccacgaacgctgtgcccttataactcaacattccacgatcgccgacgctcagcgcgtgatattgcggcgcgtcaaggcgaaacaccacctccagaccaccgttttcggggcgaaagctcgcttcatagcgcatctcactgcctgcaggcgtcaccgtctgctgccgcgatcgccgatcgttaatcactttttcccgtttattgctgacgataacccgcttttgtagcaacggcgcggcgtcattcgcctgtttctcacggcgctgctggacatagcgaaacgaagccgccaccacaatcaccgcgacgaccagaacaaaaaagaggggcattttactcatcaaggttacccataaaaaatatcaggaatcagcatactgcgtcgggaataacattgtcatctgctacaccaaaccactacactgagtagtagcatcacgcatccgtaactttctttatgataacagatacagggacttactatgctttggtcatttattgctgtctgtttctccgcatggctttatgtcgatgcatcctatcgtgggccggcatggcgacgctgggtttttaaacctgtcaccctgattctgttgctgttactggcctggcaggcgccgatgttcaatgccatcagctatctggtgctggccggcctgtgcgcctcgctgctcggcgacgccctgaccctgctgccgcgccagcgggtgatgtacgcggtgggcgctttcttcctgtcacatctgctgtataccatctggttcgccagccagctgacgctgtcgttcttctggccgctgccgctggtgctgctggtattcggcgccctgctaatggcggtgatctggagtcggctggaagagatgaaaatgccggtgctgacctttatcggaatgacgctggtaatggtctggctggccggcgagctgtggtttgcccgccccaccaacaccgcgctgtccggtttcgccggcgcagccctgctgctgctgagcaatgccgtgtggctggtgagccactatcgtcgccgcttccgcgccgataacgccatcgccgccgcgttctactttgccggccacttcctgatcgtgcgcgcgctgtacctgtaatttagtccttgactctggagtcgactccagagtgtatcctacggctaatgagaaaattatcatttcccggagggtgccatgtcgactccagacacgcaggataaaaaagtcccacaattctcgtctttcaccatgcggccagcgaccgccccggcggagagctgctgtacagatcacgcctgcgccacagagtccgcccctgccgccgaagcgcttagcgacgcccgctatagctggcaagttgatggcatggactgcgccgcctgcgcccgcaaggtggaaaccgcggtccgtcaggtgcccggggtcagtcaggtccaggtgctgttcgccacagaaaagctgctggttaacgccgagggcgatgtccgcgctcaggttgagaacgcggtccgccaggcggggtatacgctgcgcgatgccgatgctcccgcagctaagcaaacccgagggtcgctgctgcgcgacaatctgccgttactgacgctggttatcatgatggccttgagctgggggctggagcaggccaaccaccctgccggtcagttggcctttattgccaccaccctggttggcctgtggccggttgctcgccaggcgctgcgcctgatcaagagcgggagctggttcgccattgaaacgctgatgagcgtcgccgccatcggggcgctgtttatcggcgccactgcggaagcggcgatggtcctgctgctgttcctgatcggcgagcgtctcgaaggctgggccgccagccgcgcacggcagggggtgagcgcgctgatggcgctgaagcccgacaccgccatccgtctgcgcaacggcgtgcgggaaaccgtcgcccagcgcgacctgcgtcccggagatgtgattgaagtggctgccggcgggcgtctgccggcggatggccagctgctgtcgccgtttgccagctttgatgaaagcgctctgaccggcgagtcggtgccggtggagcgtcaggccggggaacgggtagcggcgggcgccaccagcgtcgaccgcctggtgcagcttaccgtgatatccgaaccgggcgacagcgccatcgaccgcatcctgaagctgattgaagaggctgaggagcgtcgggcgccgatcgagcgcttcatcgaccgcttcagccggatctacaccccggccattatggtggtggccttgttggtcgccattgtcccgccgctgttcttcgccagcgcctggctgccgtggatttataaaggactgacgctgctgctgatcggctgtccatgcgcgctggtcatctccacgccggcggccatcacctccggcctggcggtcgccgcccgccgcggggcgctaatcaaaggcggcgcggcgctggaacagctgggccaggtgcgccaggtggcgttcgataaaaccggcaccctgaccgtcggccagccgcaggtgacttcggttattgccacggccgaagttgacgacaacgcgctgctggcgctggcggcggcggtggagcaaggctccagccacccgctggcgcaggctatcgtccgtgaagcgcagcggcgtcagctgagcattccgcttgccagcggccagcgggcgctggcgggctctggtatcgaagccgaagtcaacggcagccgcatcctgatctgcgcagccagcaaagccgccccggcagagcatgaggcgcagatccagcagctggaaagcgccgggcaaacggtagtgctggtgatgcgcggcgagacgctgctcggcattctggcgctgcgcgataccctgcgcgacgacgcgcgtcaggcggtggatgctttgcatcagttgggcgttcagggggtgatccttaccggggataacccgcgcgccgcggcggccatcgccagcgaactggggctggaattccgcgccggtctgctaccggcagacaaggtcaacgcggtgatagcgctgaatgccgacgcgccgctggcgatggtcggggacggtatcaacgacgcgccggcgatgaaagcggccaccatcggcatcgccatgggcagcggaaccgacgtggcgctggagacggccgacgccgcgctgacccataaccgtctgaccggcctggcgcagatgatttccctggcgcgcgccacccacgccaatatccgccagaacatcgcgattgccttagggctgaaggggattttcctcgtcaccaccctgctcggcctgaccggtctgtggctggcggtgctggcggataccggcgccaccgtgctggtaacggctaacgcgctgcggttattgcgtaagaagttgtagcatcgataccggcttccctgctcgcgctacgcttagcagggctacggttccagaccgtcgggtagcccggataaggcgctacgcgccgccatccgggagaggctcagggacgtaggccaggtcaggcgcagccgccaccggggaaaatatcggacactgtgcctgaaatagcgcccggcggcgctgcgcttgcgcgggcctacgggtggagcggtttgttgctgctgtaagccgggtcaggcgtagccgccacccggcaaaagacaacataacggcataaaggggtagcccggataaggcgctacgcgccgccatccgggagaggctcagtggcttttgcggatcaggtagcggtacggcagggcttcggtttcctgggccaccagctcatgctccataaagcggcagaatcccgggatatcgcgggtggtggccggatcgtcagcaataatcagcagcgtctcgcccaccggcatcgtccgcacggttttacgcaccatcatgaccggctccgggcagcggagtcccagggcatccagggtgtggtcaggagtggagaaaagttcgctcattttagtctcacgtcaacaaaacggccctagtttaccccctgctcgccagtacgcaagacaggttaacgtttgcgcgaaaaacaaccattgcattacgccggcaacgcagtatcatgcagccgtttttaattgggttccctcaccccaacgttccgctgccgattgctcattcacctgaagcatgacgggcataaaaaggtcacaatatgaatccgtttactaccgtacagcgcaaaaaagcgctcgtctggctttcgctatttcatttgctggtcatcacctccagcaactatctggttcagctgccgatctccatctttggtttccataccacctggggcgcgtttagttttccgtttattttcctcgccaccgacctgacggtgcgaatttttggcgccccgctggcgcgacgcatcattttcgcggtgatggtcccggcgctggccatctcttacggcatctccgcgctgttctacatgggcgaatggcagggctttgccgcgctgggcacctttaatctcttcgtcgcgcgcatcgccgtcgccagctttatggcctatgcgctggggcagatcctcgacgttcacgtctttaaccgcctgcggcagagccgccgctggtggttggcccctaccgcctcgacgctgttcggcaacatcagcgataccgtggcgtttttctttatcgctttctggcgcagcccggacccgtttatggccgcccactggggggaaatcgccctcgtcgactacagctttaaagtgcttatcagcatcattttcttcctgccgatgtacggcgtgctgttaaatatgctgttgaaaagactggcggataaatctgatttgtcggcattacagccgagttaaaggtactcgcgggctgatgtgttaagatagccggatgagccattagtggccgtttatcgaaaggaagatgtcaatgcgcaatttggttaaatatgtcggtattggcctgctggtgatggggcttgccgcctgcgataacagcgattcaaaagcgccaaccgttggcgcagcagcggagagcaatgccagcggccaggcaatcagcctgctggatggcaagctgagcttcaccctgcctgcgggcatggccgaccagagcggcaaactgggtacccaggcgaacaatatgcacgtctactctgacgctaccggccagaaagcggtcatcgtcatcgtcggcgacagcaccaatgaagatctggcggtgctggcgaaacgcctggaagatcagcagcgcagccgcgacccgcagctgcaggtggtgagcaataaaccgctggagattaaaggccataccctgcagcagctggacagcatcatctccgccaaggggcagaccgcctggtcttccgtgatcctcggcaaagtggatgacaagctgctgaccctgcaggtcaccctgccggcggataaccagcagcaggcgcagaccgaagcggaaagcatcatcaacaccctcaccatccagtaattactggcctggtgcgctggcctccggttcgctaaccgggggccgtttttttagccgccagcccaacagcagcgccgccatcaccagccccgccgcggcgagataaatcatcgagatcccggtccacgccatcagcaatccggccagcggcccgctgacgcccaacgacaaatccataaacacggtataggtcgccagcgccgacccctgattgtgctgcggcaccgctttcaccgccaccacgcccagcgccggaaagaccagcgaaaagccagccccggtaaggaaagtaccgattttcgccatcatcggcgtatcggcaaagccgaccagcagcaggccgatcgcctccacgctaaagcagagcatcgccacgttcagcccgccgagtcggttaatggcgttgggaaacagcagccgcgcgccaacgaatgcgcagctgaataatgtcagcgcgaaagccgcgccgtcccaacctttggcgtcataaaatagcgtgataaaggtggcgatcaccccaaagccggcggaggccaacgccagcgccatgccgtagggccagacccggccgagcaccgcgcgaaacgacatcgctttgcctttggcagccttcaccgccgcgcggggcagcgcgcagaggatagccaccagcgctaccgccataatgaccccggccagaccgctgagtccaatgtgcgaatagcacagcacgccgagcggcgcgcccatcgccatcgccccataggtcacaatcccgttccacgagatcacccgcccgatatgcagcgaaccgaccacgccgacgccccacagcgtcgagcctgtgccggcgaagctctggccgataccaaggatcacccgtccgaggcatagcagcagcaggctaatcagtggccagccgctgccccaggcggccagcagatagctcaaaccgctcaaaaagcagccgccgaggccgaagacgacaatctttttgggccccagcaggtcggcatagcgcccggcatgcgggcggctgagcagcgtggcgaaatattgcaggctaatcaccagcccggcccagaaagcgctaaagcccatgacatcatgaacatagccgggcagcaccgccagcggcaggccgatggtgaggtagctggcaaagttaaagataacgacagagacaatccgcagattgaggcgcagtccattaagcgccggttcggcgacgggttcgggcatcaggttccaccagatttcgacaaccagctttcactattaccacgctgtcggcggaaaagcagccctcctttcggaatattggcagtcggcgaaccgctacacttatctggcgcgactcataaaaggaatacctatgtcccctccgcaggctgataaagccgggcttcatattttacttaagctggcggcgctggtgattatcctcgccgggatccacgccgccgccgatatcctggtgcagctgctgctggcgctgtttttcgctattgttctcaacccgctggtcacctggttcattcgccgcggggtgcggcgtccgttcgccattaccctggtggtgacggcgatgctggtgatgctcaccgcgctgctcggcgtgctggcggcgtcgctcaatgactttgtcgccatgctgcccgatttcaaccgcgccctgacgcgcaagatcctccagctccaggagtatctccccttccttaatctgcatatcaatccggagcggatgctgcggcgcatggattcagaacggctgatgacctgggccacgacgctgatgacccagctttccggggcgatggccagcatcgtgctgctggtgatgacggtgatctttatgctgtttgaggttcgccacctgccctacaaactgcgttttgccctcaataacccgcgcctgcatatcgccggattgcaccgggcgctgaaaggcgtcacccattatctggcgctgaagacgctgattagcctgtggaccgggctgattgtctggctggggctgctggcgatgggggtacagttcgccctgatgtggggggtgctggcgtttttgctgaactatgtgccgaacattggctccgccatctccgctatcccccccatgctgcaggcgctgctgttcagcggcatctatgagtgcctgttggtaggggcgctgtttctggtggtgcatatggtgctgggcaacatggtggagccgcgcatgatgggccaccggctggggatgtcgaccctggtggtgttcctgtcgttgttggtctggggctggctgctggggccggtgggaatgctgctctcggtgccgttaaccagcgtctgtaaaatctggatggaaaccaccgtcgggggcagcaagctggcgatcctgctcggcccgggccgtcccaaaagccggctccccggctagcggcgtttcaccggccagaagatggtcaatacgccggcgacgatgatcgccacgcccagcagcgattgccagtagaacggctcatgccagccgggcagccagatggcggcggcccacacgaggatatagctcaggctcagtagcgcatacgctttcgacagcggcaggcgatggagggcaaagtaccagcagaccatcgacagcaggtagcccagcaggccgaaaaacaggccgaaagtcccgggctggaaatgcagcagatgctggagaaatgccacaatatcggtcagcggcggcaaggccaccatggcgctgcgcagcagcaactgcgcggcgctgacgaggccgacgctgagtaatgcccagaaaaagcccatcagacgctggtccccagaatgacaatgcccacgacgatcaacccgacgccaagccagtggcgacgggcgaccggctcatgccagatgccccagcccgcgagggtaacccagacgaaattcagactcagcatcggataggcgatgctgaccggaatagactgcaggacgctcagccacagcagcatgccgcagcccagacataacagcgccatccccaaccagaagagtatatggcgactccgccgtccgcgacgggacgggcgggtcgcctgtttctggcagagctgtccggcgcagctcagcaggctggcgcacaccagacagatccagacgctcattgcggcaggtactgaaggaaaacgacccggcccagctcgtaggcgttatccggtttcggtaacggtaagtcgagcatactctctcctttatccatcaacagcaccagcgagaccggcccctgctgacgatgcgcggccagccagtcggcaaaaccggcctggctgacaaagcttccctgagcatccggccagtcgagaccgtacttcagctcaccctgtttgtcgaacataataatatcgcttcgcttcagctcccaggccaggccgccggcgatcccaacgttgttggtcaggacgtaacggctgggctgcagggattcgctgacgatctccacaaggaactgcggctgtttgctgtcgataacccggtccgggatggcgaagcccaccagcagcgccaggccgagcggacagagcgcggcgaggctccagcggcggccagagtctttcatcgccagccagcccatcagcgcccagacggcaaaagcgatcgccgccagcagacatttatacagctcaatcttggtccacaccggcttatgcatgaagccccacggcgagaccaccagcacggcgataagccccagcaaaccaacgcccaggttgatcatcccgttgatgcgcaacgctttcgcgccggtctttgcggcctccagcgcgtagcgggccatcaggatcgacagcggcgcaaagcacggcagaatataggtcggcagtttgcctttggcgatactgaagaacaggaacggcatcgccacccaacctaacagatacagcgcgccgcgggcctcatcgcgctcaagccagccgcgctttagcgcccccggcagcagggccagccacggcagactgccgacgatcaggaacgggatgtagtaccagaacggcgctttgtgctgggcgtctttttcagcaaaacgctgaatatgctcgacccagaagaagtagcgccagaagtccggctcgcgctgggcgatagccagcccccagggcagcaccaccagcgtacagacaatcaccgccagccagccgtaggtcagcacttcacgccagcgtttacgggcgatcacccacggcagaacgcccaccaccggcaccgccagcgccaggaagcctttggtcatcacccccatcccgcaggcgacgcccagcagcacgtagcccagtattttgccgctgcggctctgcgcctgcgccgcgtcccagaagctgcacatcgccagcgccagccacagggtgatcatcgggtccagcaccgcataggtgccaatcgcatacaccagcatcgcggtgaggaagataaccggcgacaggatagctacccgcttatcacgaaagatccgccacgccagccaggccaccagcagggcggtcatggtgatggcgaagaccgacccgaagcgtacgccgaagttattatggccaaacagccactgaccgatactgttgatccagtaaccggcaatcggtttttcgaagtagcgcaggccgagaaaatgcggtaccacccagtcgccggtggccagcatttcacggctgatctccgcgtagcgggtttcgtcgggttgccagagcaaacggaaattgagcggcagcagataatacagcgcaaacagcgcaatcagagagacgccatagcgaatgcttttcatcaaatacccgaagtcagtaattgttcacgtccgagccagccttcccggccagccagttcaccacgaaccactttgcctgagggcagctcgctaaagtcagcgggcagcagctggctcagtgggcaaaactgaatttcttcttccgccgccatggtcagtagttcattgaactgatcggcgtaggcaatgccttccacttcagcgtgaatggtatagaccggaacgcccgcatcgcgatggatgcaatccagcaggtagcggttaaagccggcgatatccaccgccgtgcccaccgcctcgtcccaggtcggcaacgtgaccgggatctgcacggtaccagagacgccgctgccgagctggggcagaaacggccgcgtgccgcgacagtcgctgttgtagagaaaatcgaaggattctttggctttaaccacccgctgatcggcgcgccagccggcgacggccgagcaggtcaccggccggccgatgatgcgctcgagctccagcaggccgcgctcaacctccagcgccagcctttcctgcggccagacgccgctccacgcctgccagctgtagtggtcccaggcgtgcaggccgacttcatgagattcggcggcggcgcggatcaccgcttcgttccctgcgccgatgcggcgccccggccaggcggtgccggccagcagaatatcccagccgtacagcgaggcggctctggaacgcagcatcttccacagaaacttcggttttaccaggcgccacaggtggcgccccatattgtccggcccgacgctgaagaagaagcttgcctggatcccatgccggcccagcagctccagcagccgcggaacgccgtcccgcgtgccgcgaaaggtatcgacatctatgcgtaagccgacctgtttcatggatttttatcgtccaccagttcaaccgtgcgcagaaagaagtccagcgtgtgttcgaccgtttcttccatctccaccttcggctcccagttcaggcagcgtttggcgttgcggatgctcggcttacgttgctcaacgtcctggtagccctttccgtagtaatcgctgctttccacttcacggaagccggcgaacggcgggaagcgatcgcgcagcggatgacgttcgaagcaggcgagcagcatttcggccagctctttgatactcgcttcgttatccgggttaccgatgttaatgatctgcccgtcgcagcggccgtctttgttctcgatgatgcggaacagcgcttcgataccgtcgctgatgtcggtgaagcagcgcttctgcttgccgccttcgataagcttgatcggcgacccttccaccaggttgaggatcagctgagtgatggcgcgggagctgccgatacgcgcggcgttgaggttatccagccgcggccccatccagttgaacggacggaacagggtgaacttcaggccattcttatcgccataggcccagatcacacgatccagcagctgcttggagaccgagtagatccagcgctgtttgttgatcggccccaccaccaggttggagctatcttcgtcgaaatttttgtcggtgcacatgccgtacacttccgaggtcgacgggaagataatgcgcttattgtatttcacgcagtcgcggatgattttcaggttctcttcgaaatccagctcgaacacgcgcagcgggttgcgggtgtattcgataggcgtggcgatggccaccagcggcagcaccacgtcgcatttcttaatgtgatactcgatccactcagagtgaatgctgatatcgccttccacaaagtggaaacgcggacagtcgagaaaacggctgatggcgtcggagccgatatccagaccgtaaatctcatagttgtcgtcctgcagcaggcgctcggtcaggtggttaccgataaagccgttgacgccgaggatcagcacccgggtgcgacgcttaatcgccaccaccggtttgctgctgatcaccgccccggacaccaggcccagcgcctgcgccagctgagcgccctgcatgtacacgccgcgttcggtctggccggtgacaatctccagcgccccgtcctggcacgcgaggatcagcggcgcaatggagagcacggtgcccggtttagctgctggcaaatcgtggcgaacgcgggatttccagacgataaacttgttcgctccggcgtagccgaaggcgcccggccacggatccgagaccgcacgcaccagattgtgcagggtctgcgccggcagctcccagtccagccggccatcttccggggtacgacgccccacataggttgcctggctgtgatcctgcggacgctcatcggtggtgccggcgaggatcgccggcagcgcccggctcagcagctcagtggcggcggcgcacagcttacgatgcagcgtcagggcggcgtcatccgcgccaatcgccacggcctgctgggcgacgatatcgccagcgtctgcgcggttcaccatccggtgcagggtgacgccggtttcgctttcgccattgaccaacacccagttcagcggcgcgcggccgcgatattttggcagcagcgaaccgtgcaggttgaacgcccctttcggcgccagattgaggatctcatcgcccagcaggttgcgatagtagaaggagaacagcacgtccggcttcatctcgcggatacgctcaatccacagcggatggttcacgtcttccggcgcccacaccggaatgccctgctcggcggcaaggcgcgccacggagccaaagaaatggttttcgccagggttatccgggtgggtgaaaatagcagcgatatcatacccggcgtccagcagagcctggataccggtgcagcccatatcgtgataagcgaagactacggctttcatgaacgatcttcctctttagatgccgtttccggctggcgaacaacacgttgaataaagtagcgggggcgggcgcgcacgtcgttatagatgcggccgatatactccccgagcaggcccataccgacaaactgggcgccgatgaacatgaacagcacggcgaagagcataaacaccccttccgccgcccactgcgggccaaaggccagacgcagcaccaccagcagcaggccgaaggcgaagcccagcagggcaatcacgctgccgaaaatgctgagcagacgcagcggcgtggtggtcagacaggtcaccaggtcgtacatcaggttgatcaggcgcatgaagctgtatttggagtcgccgaattcgcgctcggcgtgcatcaccgggatctccaccgcgcgccgggcgaaggtattcgccaggatcgggataaaggtgctgcgctcatggcagttgagcatggcgtcgatgatatggcggcggtaagcgcgcagcatgcagccgtagtcgcccatcgctttgccggtggtgcgctggatcaggcggttgatcatcttcgacgcggttttacggaagatgctgtcctgacggttctggcggacggtgcccaccacgtcgtaaccttcatcagccttcgccaccagccgcgggatctcctccggcgggttttgcaggtcggcgtcgagggtaataatcagatcgccggttacatggctgaagccggccatgatcgccgagtgctggccgtagttacggtttaacagcacggcgacgacgtggctgccttccgcctcggcggcttcggtgagcatgcgcgcggaatcgtcgctgctgccatcgtcgatcaacagaatttcatattgccgccccagggtggcgcaggcggcatccgtacgacgaagcagttccggcaggctatcctgttcgttataaaccgggataaccaccgagaccttcttcacgggagggtaagtaagcatatcaacgtcctgacaactggcgcagtgcggagataacgcgagtgacatcgtcatcggtcatatccgggaacaacgggagagagcagatgcgggcgctgttccattcggtattcgacagggaaacctcagggaagcgctcgcggtaatatttttgcgtatgggccgcacggaagtgcaggccggtgccgatgcccatcgccttcagcttttccatcagcgcgtcgcggctaatgccgcacgcggcctcatcgacgcggatgataaacagatgccaggcgtgctggtgatcccaggtcgggacgctcagcggtttaaacggcgtgtccgccagctcgcgcaggtagcgctgggcaatctcggtccggcgctgattggcgtggctcagtttttccagctggaccagcgccagagcggcgttgatatcggcaaggttgtacttgaagcccggggtgatcacctccgcctgcggcgcgcggccgtgggtctggcgatcataagcgtccacgcccagaccatggaatttcaggctacggatgcgggaggccagctcgtcgtcatcggtgacaatcagcccgccttcggcacaggtcatgtttttgatcgcgtggaacgagaaaatggcggtcccctgccagcccacgtgacggcctttataatgggtaccggccgcatgggcggcgtcttcgatcaccgaaatgccatggcgctcgcccaccgcgcgaatggcgtcgatgtcggctggcgccccggcgtagtgcacgggaattatcgctttggtacgcgaggtgatcgccgcttccaccgctgcaggggtaatcatcagattgtcgttatcgacatcgatcatcaccggcgtggcgcccagcaggcagatcatattgagagtggagacccaggtctgggacggcgtaatgacttcatcgccggggccaatacccagcgccatcagggtcacatgcatcccgccggtcgctgaactgacggcaatcgcgtggcggttgccggtcagctggcagaatgccgcttcaagtgcctgattcttcggtccggtggtgatccagcccgacgctaaaacttcacgcagggctgccagctctgcgtcgcccatcgacgggcgcgaaaaaggcaaaaaatcgctcatcatcatcctgttctgtagatgacccacgcacgaatctgggtcgttagaataaaatatcctgcgcctgcggacttaaacgaaattaaaatgaagtgagttcagcacggcattccatttcagggtatctcgaccactattaatgtagtcgaccttgcttaggataatattaagaaattaatatttcttcggaataagaaataaattcttaataaacagtatgataggatttttttatggcagaaatttgacggagatgcgttcctgtcacgaaaaagagaacaggaacgcaatagttgaaattaaacgagaactaaaccagttcacaatttattattctgtcattgtcacgcttaatgacaaaaagttagcgcagatcacaaagttatttctgctgaattacaaatttgcaggaaaatccgcaggcaattcgctcgccgggcaattaatgacctcgtcattatccgcgccacagtcgcgaatgaaggtgatagtggcgaactcgtcaatcacttccgtcgggtaggccgggccggcatcgcgatacgaattcatcagcggaatatggtcgttctggaagcagatagttttttccgggttattcatgatccagcgcgggaagaaaatagtgccgtggaacagtttgtcgcccaggttgacgatcaggctgacgtcggtgccggtcggttcggtccaggagattttgtagatactttcccccacccgcacaatgtacgcttcctgatctttcacccagcgattgccgacgatgccgctgtgaatacggtagtcgagggtgtggccatttttgacgtaaatctcgtagttccagccgttgtcgtaggtatagaccagatgtttaccgataaagccgctgaggtcatgtttgtcgaaagtgctcatcatttattctcctctgttttgttgaggacagcatacgtctttaaaaaatgaatgaataacgctatgtttggattaaatacattcaaattttagattgattatgcacaagacaaccctggagcagtgggcgttactcgaaaaggtagtggaattggggagctttgccagagcggcggaggagaccaatcgcagtcagtcatcggtaagctataacctcgcgctgctgcaggagcgcttaggcgtggcgctgctggcgccgtccggccggcgggcggtgctgacgccggctggcgaactactgctgaatcaggtcaagccgctgctgcaggccttcgcctacgtcgagacgcacgccgccactctgcgcaacggggcgcggacccgcctggatctggtggtcgacagtattttcccgcgccagcggctgttcgcgattttacgccagtttcagcagcgctatccgcagacccaggtcaggctcacagaagtgctggaaaacctggatgacgagagcgcggcgcggacggaagccgatgtgatggtgctgacccgccgccaggatattaccggccgcggggagtggctgatgaatattgatttcattgccgtcgcccaccgcgaccaccctctcgccgcgctggacggacctctggaggatagcgcgctggcgccgtggccgctggtgcgcattgccgatcagggcggcgatggccaggcgccgcgagacgcctggaccttctccaccattgatgccgccattgatgcggtgatgtatcaggtcggcttcggctggctgccggaggagcgcattcgcccccatctcgaccagggcgtgctgaagcggttgcccctcagccatggcgcgcgccgcgcgacgccgctgcatctgatcgtcaagcgggacctggcgccgatcgacgaacaggtggccacgctgctggcgttgttccggacgccctgaggggtaaggcggcgctggtcgcctgggcgtaatgatacgattttcttatactttccggcgcaatattgatccaggttactcccaaagtatgatgaatcactaaaatcgtcatactttcctgtcgttgagattgccgtcttgtctattatccgcctcaccctgctggcgctggtcgcttgcgtccctctgctggctcaggccgcgccgtaccagctcaccaccgcctggccggttaacgtcggcccgctgaatccccatctctatacgcccaaccagatgtttgcccaaagcatggtctatgaaccgctggtgaagtatcaggctgacggcagcgtacagccatggctggcaacccgctggcgtcactccgccgacggaaaaacctggtggttcaccctgcgcgacgatgtggccttctccaacggcgaaccgtttaacgcccaggccgcggcggccaattttcaggcggtgctggccaaccgccaacgccacgcctggcttgagctcgccaaccaaataaccgacgtgcgggccctcagcgccaccgagctgcagatcaccctgaaaagcgcctacgcccccttactgcaagagctggccctgccccgcccgttccgcttcatcgccccctcgcagtttatcgatggcggcaccgccaggggcattaaagccccgatcggcaccggcccgtggcggctggcaagctcgcagctcaatcagcgcgatgtgctggtgcgcaatgagcgctactggggtcgcaaacccgcgctacagcaaatcaccatcaaggtgatccctgacgccaccagccgggcggtggcgttcgaaaccggggaaatcgatatgctctacggcgatgaagggctgctgccgctggacaccttcgaacgctttcgccatcaccccggctacgtggcgcgcctgtccgccccggcggagacggtaatgctggcgctaaacgccagccagggcccgacccgcgagctgacggttcgcgaagcgctcaactacgccgtcgataaacagacccttgtcgatagcgtgttgtatggcacccagcaggttgccgacaccctgtttgccccctccgtcccttacgccccgcaggatctgacgccgcgccgttacgacccgacaaaagcccgcgccctgctggaacaggccggctggcagcagctggagggccagccctggcgacaaaaagccgggcaaccgctggcgattgagctggcgtttatcggcaccgacgcgctggctaaatcgatggccgaaattattcaggccaatctgcggcaggtcggcgtgcaggtcaccctggtgggcgaggaggaaagcagcatttacgcgcgccagcgcgaaggccgcttcggcatgatcttcaatcgcacctggggcgcgccctacgatccgcatgcctttttaagctcgatgcgcgtcccttcgcatgcggattaccaggcccagcgcggcctgccagacaaggcactgattgataaagagattagtgaagtgctgaccaccggggacgaggcgcagcggagaaaactgtaccatgatgtgctgacccgtctgcatcaggacgcggtgtatctgcccatcagctatgtctcgctgatgtcggtcgcgcgccaggaggtcggggagatcccgttcgccccggtgaccagcgagatccctttcgaccagattaccccggtaacgccataatgctacgctatattttacgccgcctgctgctgctgatcccgctgctgctcgccgcctcagccatcatctttctgctgctgcggctcggcgccggcgacccggcgctggattatttacgcctgtcgaacctgccgcccactgaagagatggttgcctcgacccgcgagctgctggggctcaaccagccgctggcaatgcagtatctgcactggctatggcgggcgctgcacctggatttcggtctctcctatgccacccagcgcccggtgctggacgacctgctgcacttcctgccggccaccctgctgctcaccggcgcggcgctggcgctgatcctcgtcacctccctgccgttgggcatctgggcggcgcgccatcgcgatcgcctgccggactatatcgtacggctgattgccttcctcggcgtctcaatgcccaacttctggctggcctttctgctggtgatgctcttttccgtgcatctgcagtggctcccggcgatggggtatggcgactggcagcacctgattttgcccgccgtctccatcgcctttatgccgctggcgatcaacgcccgcctgctgcgcgccagcatgctggacgccgccagccagcgtcacgtgatatgggcgcggctacgcggattgagcgcgcgccaggtggagcgccgacatatcctgcgcaatgccaccctgccggtggtgaccgccatgggcatgcacattggcgagctgatcggcggcaccatgattatcgaaaatatctttgcctggcccggggtcggccgctacgcagtttccgccattttcaatcgcgattacccggtgatccagtgctttaccctgatgatggtgacggtgttcgtgctggctaatctggcggtagatgtgcttaacgcggcgctcgacccgcgcctgcgccgccacgaggaggtgagcgcatgagagggctacaaagctttcgctggccggtaaaactggccatgctggttatcgcgctgctggcggtcatcgccatcggcagcggctggtggctgccctgggatccagcggcgattgaccttcagcagcggctgctaccgccgggcgcagcgcactggctcggcaccgatcatctcggccgggatattttctcacgcctgctggccgccacccgcgtttcgctgggggcggtgatggcttgtctgctgctggtgctgctgatcggcctggcggtcggcggctgcgccggactgctgggcggccgcgccgaccgcggcctgatgcgcatcgccgaactgtttatgacttttccgacctcgatcctatcgttctttatggtgggagtgctgggtaccgggctgaccaatgtgatcctcgccattgcgctgtcgcactgggcctggtacgccagaatggtgcgtaacctggtggtttccctgcgccagcgcgaatttatcctcgccgcccgtctgagcggcgccagccagtggcggctgttcagcgaccatctggccggcgcggtgatcccctcgctgctggtgctcgcctcgctggatatcggccatatgatgcttcacgtagccggcatgtcgttcctcggtctcggcgtcagcgcgccgacggcggaatggggggtgatgatcaacgacgcccggcagtatatctggacccagccgctgcaaatggtctggccggggctggcgctgttcatcagcgtgatggcttttaacctgctgggcgacgcgctgcgcgatcgtctcgatccccacctgatcgcggagcatagccactgatgccgcagaagatccaactggaacagatctcgcttgccgctgaccgaccgctggtcagcgacgtctccttcaccctgcgccgcggccaggtgctggcgctgctcggcagcagtggttgcggaaaatcgctgacctgcgccgccgcgctgggcctgctgccgcccggcgtcaggcaaaccgccggccgggtgcttctcgacggcattccggtgcacggcgaacagctgcgcggggcgaccatcgccaccatcatgcagaacccgcgtagcgcctttaacccgctgcagaccatggccgcgcatgcccgggaaacctgccgggcagcgggtcgtgaaacgaatgacgccgtgctgctggcagcgatggaggaggtcggtctggacaatccgcgggcgctactgaagcgctacccttttgaaatgagcgggggcatgctgcaacggatgatggtcgctctcgccctgctcagccgcgcgccctttatcatcgccgacgagccgacgaccgatctcgatgccatcgcccaggcgcgcatcctcgacctgctggcggatattgtcgccaggcgcggtctgggactgctgctggtgacgcatgacatgggcgtcgtggcgcggctggcgcatcacgtaacggtgatggagaacggtcgcctcgttgaacactgcgatgtgaatacgctatttagcgccccgcggcacccgctcagccagcgcctgctggccgcgcatctggcgttatacggtctggagaaaacaccatgaatttactcagcgctaccggggtgagtcacgattatcctcaccacggcagggtcctgcatgcgatccatctcgccatcgcccccggcgaaacggtggccctgctcggacgcagcggctgtgggaaaagcaccctggcgcggatgctggtgggtctggaaacgccgcagcacggtgatattgcctggcgcggcgcgccgctgactgccctgaagggcgaggccatcggcgccttccgccgtgatattcagctggtatttcaggatgccttcagcgcggtgaatccgcgcaaaacggtgcgcgagatcgtcagcgagccgctgcgccgtctgttgtgcttgtcgcgtgaggcgcgtgcgcggcgggtggaagagatgctgctggccgtcgacctcgcgtcgtcgctgctcgataagcgcccggcgcagctcagcggcggacagctgcagcgcgtctgcctggcacgcgccctggcggtacggccgcagctgttgatccttgatgaagcggtttcaaatctcgatctgctgctgcaggcggagattatcgccctgctgaagcgtctgcaggcgcagtttgacaccgcctgcctgttcatcacccatgacctgcggctggtggagcgcttttgccagcgagtgctggtgatggagcacgggcgcatcgtcgaaaccgcaacggttagtctaccgctacgcctgcgctcccctgccggacaggcgctccagcaggcggtgctccccccttttcctgccactctgcttaacgaggccatgccatgcagcgcgtaaccctgacccttgatgatgacctgctggccgccctcgatgcgctcagcgcccgccgcggctaccacaaccgttcggaggcggtacgcgatattctgcgcgacgccctcaaccaggatcctccgtcgccggaatcacggcgcgggtatgccgttctgtcgtacgtgtatgaacatgagaaacgcgaactggcgagccggctggtggccacccagcatcatcatcacgatctctccgtcgccacgctgcatgtgcatatcagtcatgacgactgcctggagattgcggtgctgaaaggtgatatggccgaggtacagcattttgccgacgacgtgattgcccagcgcggcgtgcgccatgggcatttgcagtgtttagcggatgattaattatttgaaaattcttgggtggtttatcaacagttgataaaccacataaactatacgctttgtgaattatccctcttcgccaataatggcgcctcatttaacgatctcgttatggcgaggctcctgcataaatacaagttaccgccctgttggtatcgagagagaccactcagggaaatacaggcttccatcgaatcaaggtgttgccaaggtaacttctggcggtcatgaccgttcagatacgttatgcagtgctaaaaccaggacgtagggatctgcctgcgctaaccctgtcttgttcgcccctatgagtgattttttatagggatttttaaacatgtcttccattcaactctgcgccgcccatcaggcgacctctggcttcgacggcgatgcgatcgtccagtacatgcgtaccgattttattacgctgcaggaacatctcagcgttcatgaggcgcgcgaacactttatctcccagctggccagcgatgatattcccgggcaggtgtttgtcgtcgccggcaagaagctgcgtggcagcctgtcggtcaaaaagctactccaggaaacggatatcaaccagtctatccgccacctgatggacagctgcctgtttcgcgtcaaacctgacgatgagcgccagcaggtgattgccgagctcagcgagcgcggcctcgacctggtccccgtcgtcgataaaggcgagctggtcggctgcctgatggagaaggagatcgcccatctgctggaggatgacgtcaccgaagatgctcagctgcagggggcaacgctgccgctggaaaaaccgtacctcgagatcagcccctggacgctgtggaaaaaacgctcggtgtggctgctgctgctgttcgtggccgaagcctacaccagcagcgtactgcagcatttcgaagaagccctggaatcggccatcgcgctggccttctttattccgctgctcatcggcaccggcggcaacagcggaacgcagatcacctcgacgctggtgcgctcgatggcgctgggggaagtgcgactgcgcgatatggggcgggtgatccgcaaagaggtatcgacctcgtttctgattgccctgaccctgggcctggcgggctgcctgcgcgcctggatgatggggattggcatggaaatcacgctcatcgtcagcctgacgctggtgtgcattaccctgtggagcgcgattgtctcctcggtcattccgatggtgcttaagcggatcggcattgacccggcggtagtttccgcgccgtttatcgccacgctgattgatggcaccgggctgattatctatttcaaaatcgcccagtattttcttgggttgaactgatcatatacgtccgggcaccagggcgcccggacgcgtagattacccttccaccagcgcctgcgcgcaggcccaggcgcttgaccacgcccactggaagttataccccccgagccagccggtaacgtccatcacttcgccgataaagtagagacccggcgccttacgcgcctccatagtacgcgacgagagttcgttggtgtccacgccgccgagggtcacctccgccgtccggtagccttcggtgccgttcggctgcacgcgccaggcggttaacgtctccaccagcgtctgctgatcgcgaacgttcagttgcttgagcgtcacatcaggtatctgccccagctgctgcagacactccaccagccgcttcggcagctgcatcgccagggtgttcttcaggctctggttgggatgcgcgctgcgctgctcgttaaggaagtcatcaagatcgcagtccggtagcagattaacggtgacgaactcgccgggctgccagtagctggaaatttgcagcaccgccggtccggaaaggccgcggtgggtgaacagcagattttcgcgaaacagagtgccgttctcggcggtaatggtcgacggcaccgacacgccggagaggacctgcagctgctcaagcaatggcttgtggagggtaaacggcaccagccccgcgcgggtcggcagcaccttcaggccgaactgctcggcgactttatagccaaacggcgaggcgccgagccccggcatcgacagaccgcctgaggcgatcaccagctttttggtcaccagcgtttcgccgttcacctgtagccggtagccttgttcatcgcgctccacgctgaggatttcgctgcgcagacggatctgcacgccgcccttttcacattccgcgagcagcagattgacgatctgctccgccgaatcatcgcaaaacagctggccgagggtcttctcatgccaggcgatgccgtatttaccgaccagctcgataaagtcccactgggtgtagcgcgccagggcagatttgcaaaaatgcgggttttggctcaaataggccgccggttcaacatacatgttggtaaagttgcagcggccgccgccggacatcagaatttttcgccccggctttttgccgttatccagcagcaggacgcggcagccaagctggcccgcctgcgctgcgcaaaacattcccgccgctccggcgccaacgacaatggcatcaaacctttccacaccgcgttcctcgttccccaattgtcgggttttgtaaatatttcactctggtcacaccagcgggaaaaatcccgcattagatacatcattgaaagatataggattactcccaacagggtaaaacctaaacaggaagaaaatcaaaaaaagtctatatttcactttgcccgcgccgctaaagtcactgataatgcgccgcgttcatgtcctcaaaatggcgtaacgtcctatgctacatttatttgccggtctggatttacataccggactattattattgcttgctttagcttttgtactgttttacgaagcgattaacggtttccatgataccgcaaacgcggtggctacggttatctacactcgcgcaatgcgctcacagctcgctgtggcgatggcggcgctcttcaacttcttcggcgttctgctgggcggtctcagcgtagcctatgccatcgtgcatatgctgccgaccgatctgctgcttaacatgggttccgcacatggcctcgccatggtgttctctatgctgctggcggcgatcatctggaacctcggcacctggtacttcggtcttccagcttccagttctcataccctgattggcgccatcatcggcattggtttaaccaatgcgctgatgaccggtacttccgtggttgatgcgctgaatatcccgaaagtcatcggtatttttgcttcgcttatcatctcgccgatcgtcggtctggtgatcgcgggcggcctgattttcctgctgcgtcgctactggagcggaaccaaaaaacgcgcgcgtatccacctgacgcccgcagagcgtgaaaagaaagacggtaagaaaaagccgccgttctggacccgtatcgcgctgatcctgtctgctattggcgtgtcgttctctcacggtgctaacgatgggcagaaaggcattggcctggtgatgctggtgctgatcggcgtcgcgccggcgggtttcgtggtgaatatgaatgcctctggttacgaaatcacccgtacccgcgatgcggtcaacaacgtggaaaccttcttccagcagcgtcctgaactgctgaaaaaagccaccggcgtcgatcagctggtgccttctccggataccaataccgcggccaatggcgagttccactgccatccggcgaacaccatcaacgcccttgaccgcgtcaaaaccatgctgaccggcgttgagaactacgagtcgctaaaaccggaacagcgcggccagctgcgtcgcatcatgctctgcatctccgacaccaccgacaaggtggcgaagctgccggatgtgagcgctgacgaccagcgtctgctgaagaaactgaaaaccgatatgctgagcaccatcgagtacgcgccaatctggattatcatggctgtcgcgctggcgctgggtatcggcaccatgatcggctggcgccgcgtggcgaccaccatcggtgagaagattggtaagaaaggcatgacctacgctcaggggatgtcggctcagatgaccgcagcggtttctatcggtctggcgagctacaccgggatgccggtttccaccacccacgtactctcctcctcggtagcggggacgatgctggtggatggcggtggtctgcagaaaaagacggtgaccagcattctgatggcctgggtgctgaccctgccggcagcgattatcctttcaggcgtcctttactggctctccctgaaactgatttaagcgttattcgttcaaaacgggccagcttgctggcccgtttttttattctgaaacgttagtgccagatcatcagcgcaatcaggctcaccaccaccaggccgcacagggcgctggtcaggataaactggcgacgaacacgttcgcagcgacgaataaattcatcatcgtgatggtcacggtagcgctgggcatagatataccacaccagccgcatctgtttgctgggctgcccgtgcgaggtaaaaaagccgccgccatcaacatactgatagagcaagggatcgcaaccacgtagcaccaccaataatgcacgcaacgatgagaagtagcgtgccatattcaccacacaaacgacacacagggcccaaaacagcgcaatagtgctgatcatacctcctccccggcgacccgcctacggagaaaacctccgcggctaccgctccccaaataacccacgacgataccgtaaagagtgcgattccgatcacatttatttttccgaccggctcattaaatagtgtaggagatccattaatttttttaccacaaggttattcgttatcaatacgtaagacggataaatttgtttaacttttaggtgaacccagtgcattgacggagtgcggggggcgctataaggtaggaaatatcttctacaatgaagtccttaaaggctaccctcccgcgaatgtagcacgcaggacgcgggcgaaacggcagcgccagctgtcaggtccaatggtcatcgacaaacttatggaaggagtaacactatggcttacaaacatattctgattgcagtagacctgtccccggagagtaaagtactggttgaaaaagccgtttctatggcccgcccgtataacgcgaaagtctccctgatccatgtggatgtgaattactccgacctctacaccgggctgattgacgttaacctcggcgacatgcaaaaacgcatctccgaagagacccatcacgcgctgaccgagctctcgaccaacgcaggctatcccatcaccgagaccctgagcggcagcggcgaccttggccaggtgctggtcgatgcgattaaaaaatacgatatggacctggtggtctgcggccatcatcaggacttctggagcaagctgatgtcctctgcccgccagctgattaacaccgttcatgtcgacatgctgatcgtcccgctgcgcgacgaagaagacgaataaccgtctcgttttatccgcgcaatacgcccgccgatgcgggcgttttttattttcgctttccctcgccatgcggcagaacttcaatccataaaatcgccattcaattagtgtgatcaaccagttattcggcgaaatatctatataataatctattccataagccaataaccgcagcatggcgagttatcagacattttcggcgcgttctggcatacgcgttcatactttttgggaaagtaatacaaggcgaaggaatatgaatacaactgcacctacgggcttgctgcagcaacctcgtccgttctttatgatcttctttgtggagctctgggaacgttttggctattacggcgttcaggggatcctggcggtcttctttgttaaacagctgggcttctctcaggaacaggcctttatcaccttcggcgccttcgcggcgctggtttacgggctgatctccatcggcggctacgtgggcgaccatttgctggggaccaaacgcactctggtgctcggcgccattgtgctggctatcggctactttatgaccgggatgtcgctgctgaaaccgcagctgatctttatcgctctcggcaccatcgccgtcggcaacggtttgtttaaagccaacccggcgagcctgctctccaaatgctatccgccgaaggatgcccgtctcgacggggcatttaccctgttctatatgtcgataaacatcggttcgctgctgtcgctgtcgctggcgccggtgatcgccgaaaaatttggctacgcggtaacctataacctgtgcggcgcggggctgattatcgcgctgctggtctacttcgcctgccgcgggatggtgaaagatattggctccgagccggatcatcgccccctcagcctacgcaatctggcgctggtgctggccggtacggtggtaatgatttttctctgcgcctggctgatgcataacgtgatgatcgccaacctggtgctgattgttctgtcggtcgtggttattgcgttctttttccgtgaggcgtttcgcctcgataaaactggacgcaacaaaatgttcgtcgcctttattctgatgatcgaggcggtgctgttttacattctgtatgcccagatgccgacctcgctgaacttcttcgccatcaacaacgtccatcatgagatccttggctttaccatcaacccggtcagcttccaggctctgaatcccttctgggtagtggtcgccagcccggtgctggcggcgatctacacccatctcggtcataagggtaaagacctgaccatgccggtgaaatttaccctcgggatgttcctctgcgcgctgggcttcctgaccgccgcggcggccgggatgtggttcgccgacgcccaggggttaacctcgccgtggtttattgtgctggtctatctgttccagagtctgggggaactgttaatcagcgctctggggctggcgatggttgccgcgctggtgccgcagcatctgatgggctttattctggggatgtggtttctgacccaggccgccgctttcctgctgggcggctatgtggcgacctttaccgcggtgccggaaaacatcaccgacccgctgcagaccctgccggtctacaccaatgtgttcagtaaaattggcctggtgacgctgggcgtcacggtggtaatggcgctgatggtgccgtggctgaaccggatgattaatacaccggccagcgccgagtaaccgtttaagatggccgatccgcactggcgccgtttgttcagatattgtggttcccggcttgcgctacgctgagccgggcgacaattcggtagcccggataaggcgcgttgcgccgctatccgggagttaccaccacggcgtaatattactccggcgtaccggcgtaaatatcaaaccgatgccctttggtcaccaccgcattcggcgtggcgacttccgccagcggcggcgcgtaatccgggcgcttcaccaccacccgcttggtcgccagctggcgcgccggggccagcaggccatcggcgtctaaatccggccccaccagcgactgaaagacgcgcatctctttcttcaccagcgcgcttttctgcttatgcgggaacatcggatcgaggtacaccacctgcgggcgcggggtgatatcggttaacgccgtcaggctggaggcgtggatcagctgcagccgctcctgcagccagccgccgatttccgcgtcagcatagccgcgcgccaggccatcatcgagcagcgcggcgaccaccggattacgctccagcatccgcacgcgacagccgaccgacgccagcacaaaggcatcgcgtcccagcccggccgtcgcatcgacgacatccggcaggtaatcgcctttaatacccaccgctttagccaccgcttcgccgcggccgccgccaaacttgcgccggtgggccatcgccccgctgacgaaatcgacgaagatgccgccaagcttgggctcatcgcgcttgcgtagctccagatgctccgtcgtcagcgccagcgccatcgggttatcgtcatcctgctccagcccccagcgggcggctaaaacagataaggcgccgtcaccggcgcctgtttcatcaattaagcagatcttcacgtagcaatcagcctttgatcccgtaatgctccagcatcgcgtccagctgcggctcgcgcccgcggaagcgtttgaacagctccatcggctcttcggaaccgccgcggctcaggatattgtcgaggaacgactgaccggtttcacggttgaaaatcccctcttcttcgaagcgtgagaaggcgtctgccgccagcacgtcggcccacaggtagctgtagtaacctgccgcatagccgccagcgaagatgtggctgaaggcgtgcgggaagcggccccaggtcggccccggccccccggcgacctgctttttaatctcggccagggtctcaaggattttcgctccctgctccggtttgtactccgcatgcaggcggaaatcgaacaggccgaactccagctggcgcagaataaacatcgccgcctggtagtttttcgccgccagcattttctccagcagctcctgcggcagcggttcaccggtttcataatggccggagataaacgtcagcgcttccggctcccagcaccagttctccataaactggctcggcagctcgaccgcatcccacggcaccccgctgatgccggaaaccccggcggtgtcgatgcgggtcagcatatggtgcagaccgtggccgaactcgtggaacagggtgatcacttcgtcatgggtgaacagcgccggcttgccgttgaccgggcggttgaagttacaggtcaggtaggcgaccggcttctgcagggaaccatccagtttacgcatctggccgacgcagtcgtccatccacgcccccccgcgcttatgttcgcgggcatacaggtcgagatagaagctgccgcgcagctcgttgtgttcgtcatacagctcgaagaagcgcacttccggatgccacacatcgacatcggtacgctctttagcggtaataccgtaaatgcgcttaaccacttcaaacaggccgctaacggctttgttttccgggaaataggggcgcagctgctcatcgctgatgctgtagaggtgctgcttctgtttttcgctgtagtaggcaatgtcccacggctgcagctcatcgacgccaaactcggctttggcgaaggcgcgcagctgggccagctctttttcgccctgcggacgggcgcgttttgccaggtcggtgagaaagtcgagcacctgctgcggatccttcgccattttggtggcgagggatttatacgcatagctgtcaaagcccaacagctgcgccagctcgtgacgcagggcgaggatctccgccatcaccgggctgttatcccatttcccggcgttcgggccctgatcggaggcgcgggtggaataggcgcgatacatctcttcgcgcagcgcctggttatcgcagtaggtcatcaccggcagatagctcggaatatccagggtcagcagatacccttcctgctctttggcctgcgcctgagcctgagcggcggccagcgcgctttccggcatgccggccagatcggcgacatcggtcaccagcttgttccagcccatggtggcgtcgaggacgttgttgctgtactggttgcccagctcagagaggcgcgcggcgatttcaccgtagcgtttctgcgcctccggcggcaggccaatcccggataattcaaaatcgcgcagcgcgttatcaaccgcttttttctgcgcggtattcagcgtggcgtagttatcaccatcgcgcaggtcgcggtaggctttatacaggccttcatgctggccgacccaggtgctgtactcggagagcagcggcagcgtctgttcgtaggcctcacgcagttcagggctgtttttaaccgaattcagatggctgacaggcgagaagatgcgtcccagcacatcgtccacttccgccagcggctggcaaagattttcccagctatacggcgcgccatgcgccaccgcgctttccaccgcggcccggcaatcctccagcgctttggtgaccgcagggaccacgtgctctggtttgatcgcagaaaaaggcggcagggagaaaggcgtcaataatggattggtcatatgcgctgtcctgttgaaaagggtgaatgaagcgcgcgtccggcgcttatgcatgagatctagaatgggggatagttgggggaatttcaatgacgggcggtgcgtcagcctgggtattgctgcgataagtccgcccgttgccggaaaagcgcgacacgcagtgcagcgtgccggaaaccacattaatgccttttttgcgccatctcccaggccgccgacagattcagccgctgccagaattgctgttcgggggtggtgccggatagcgggtaacccgccggcagcgcggtgttgaccatcagcgcccgacgctgggccgctgacagatgcggcagggcatcttccagcagcacttccgccccctccggcacctgtaaacgcggctgcggacccttctgctgcggcagatcgtaggtcatggtgaagcgagagaaatcacgcatcgccggatcgcgccagggatcgtctttcacgctgctcttcgcgcactcggcaagcgatgtgccgcaggccttcgccagcgcggcgcgcagctgatcgcgggcttcgttaaataatacccggtagtgcggatcgttaagatagtgggccacgttgcgctcggccactatccgcgagccgatcacgtccagcgggtagtggacgcccagcacgatgcgcgagtagccatagcgggcgccgcgcgccaccagcgcgtcgtagcgctccgggatcatcgccgccagcagcagcgcatcggtatagccggtgttggtgtggccgctgggaaacgagccgccgtcggcggtgtagggctggttatctttcaccaccacatcgtcaggcaccaggtgaatggtgttgccctgcaccagaaacggccgcggattattgaagtgctttttcgcctcgccggtgctgacctccgaggctttgatcaacgctgccgctttccccagcgcgccctggtcataggcggtcagaaacgctttgccaaggcgtggccccagcgcatcgctgaggaagtagaggtagctaatgccttccgcatcggccagcgcctgacggcgcgtggtctgcacggcgtcgcgattgatggcggtcaccgtcgccagattctgcttcacgacggtctccggcagggtgctgaacgccgacagcagcgcaatgcccgcctgctggttggcccgggtctggaagtcatagccgctggccttcagccaggcggtatcggcctgagtttggttttgtttggtgtgcgccagccgatcgcgggtcagcgtagcggcattcccctgcagagcgtggcgtagctgcgccagcgcctgttgctcaagatcgtcatacgcctggctggaggcagccggcgtcacgctattggcgagggccgccgccctgttcagcgggatgtctttagccagaaccggttgcgccagcagcagcgcgacggccagcagcgagagttgccttttcattatttttccttttattcaaataattaccttgcctgtacccgacgctagcgcggccgtttgacgtttttatgacagcgttatgttttgcaacgcttttggcagaaatgaaacagcgcggcggcgcagcggtaatctcggccgatctgcggtaaactatcggttaacttgtttacttcccggaatctctgcatccatgctcagttatcgccacagctttcacgcaggcaaccacgccgacgtcctcaaacacaccgttcagagcctgatcattgaatcactgaaagagaaagaaaaaccgtttctctacctggacactcacgccggcgcgggccgctatcagctgagcggcgagcacgccgaacgtaccggcgagtatcttgaaggcatcgcccgcatctggcagcaggacgacctgccggcagagctggagccgtatatttcggtcgtcgaacacttcaaccgtaacggccagctgcgctactacccgggctcgccgctgattgcccgccagctgctgcgcgagcaggacagcctgcagatgaccgagctgcacccgagcgacttcccgctgctgcgcgctgaattccagaaagacagccgcgcgcgcgtcgataaagccgatggctaccagcagctgaaagccaagctgccgccggtatcgcgccgcggtttgattctgatcgacccgccgtacgaaattaaaaccgactatcaggcggtggtcaccgggattaacgaaggctacaaacgcttcgccaccggcacctacgccctgtggtacccggtggtgctgcgcgcgcaaatcaaacgcatgatcaaagagttagaagccaccggcattcgcaaaatcctgcagattgagctggcggtgcgtccggacagcgaccagcgcggcatgaccgcctccgggatgatcgtcatcaacccgccgtggaagctggagcagcagatgaataacgtgctgccgtggctgcacagcaaactggttccgaccggcaccggccacgccaccgtcagctggatcgtaccggagtaatcgcaaccatcggtggaaccttttaagcctcgcgctacaatcgcggcaatcaacgattaaggacatatgggcatgagcaaacattatgattacctcgccatcggcggcggtagcggcggtatcgcctcaattaaccgcgcggccatgtacggccagaagtgcgcgctgattgaagccaaagagctgggcggcacctgcgtcaacgtcggctgcgtgccgaaaaaggtgatgtggcatgcggcgcagatccgcgaagcgattcatctttacggcccggactacggtttcgataccaccatcaaccattttgactgggagaagctggtcgccagccgtagcgcctatatcgaccgtattcatacctcttacgacaacgtactgggtaagaataaagtcgacgtgatcaaaggcttcgcgcgctttgtcgatgcccacaccgtggaagtcaacggcgagatcatcaccgctgaccatatcctgatcgccaccggcggccggccgagtcacccggatattccgggcgtcgaatacggtattgattccgacggtttcttcgaactgccggcgctgccgaagcgcgtggcggtggtcggcgcaggctatatcgccgttgagctggcgggggtgattaacggcctcggcgccgaaacccacctgttcgtgcgcaaacacgcgccgctgcgcagtttcgatccgctgatcgttgagaccctggtggaagtgatgaacgccgaaggcccgcagctgcataccaatgcgatcccgaaagcggtggtgaagaatgccgacggcagcctgacgctggagctggaagatggccgcagccagaccgttgactgcctgatctgggcgattggccgcgaaccggcgaccgacaacttcaatctggcggcaacgggcgttaaaaccaacgataaagggtacatcatcgttgataaattccagaacaccaacgtgccgggcatctacgcggtgggcgataataccggcgccgttgagctgacgccggtcgccgtggccgcaggccgtcgtctctccgaacgcctgtttaacaacaaaccggaagagcatctggactacagcaacatcccgaccgtggtcttcagccatccgccaatcggcaccgtcggcttaaccgagccgcaggcgcgcgagcagtacggcgacgacgccgtgaaggtctacaaatcttccttcaccgcgatgtataccgccgtgacctctcaccgtcagccgtgccgcatgaagctggtgtgcgtcggcccggaagagaagattgtcggcatccacggcatcggcttcgggatggatgagatgctgcagggctttgcggtggccctgaagatgggcgccaccaaaaaagacttcgacaacaccgtcgccattcacccgacggcggcagaagagttcgtcaccatgcgctaagacgcgatcgccggatgataaaaagaagcccctgggggcttctttttttatgctcaggccacgccgttattgccatggcgcataaacgccgggcgctgattgagcgccatataccagcgctccacggctggcatctccggatgggcgaaaggggtcattttccagcgatgcaccgacagccccagcacgatatcggccagggtgaagcgctcgccggctatccacgccccggtacgctgcagctgcgcttcaacaatgcgcacgcagtgggtccaggcggcaatactctctttaatcgccaccggatcctgaaagcgcggatctttacgcaccagccccataaaagcatggcgccaggcagtattgaactcggtcgcctgccagtccatccagtgctccacctcggcggcgggctgcggttcggcgggcagcagatcccagcgctccgctttgcgcgccagatagcggcagatactgttcgactcccagagcacgaagtcatcgtccagtagcaccggcaccaggctgttaggattcagacgctgaaactcaggcgtatccaggggcttaaatccgctgccgtaatcttcctgctggtacgccagcccggcttcctcgcaggtccacagcactttccgtacattaattgaagagcgtttacccagaatttttagcatcgtcagcgattcctcagccataaaagacagttcattcactctactctattgccagccagcaacaaggcagagcgctggataatgtgtatagttgattccagcctgtttgccgaaaaggaacccgacatgttgaccccttttaccgttttgatgcctgcaaatattcgttttggccgtggtcaggccgagagcgccgccccctggctggcgcaacagggcggcccaatcctgctggtgcatggcgccagcccgcagcgggctgcgtttctccgccagcagctggaggcgctgcagcttgcggtcacgacgctggcgataagtcgcgaaccctggcttagcgatatcgagcagggcgtccagctggcgcgcgagaaagggatcagagcggtggtcagcctcggcggcggcgcggtgattgacgccggtaaggcgattgcggcgctggtccccgccgccggcccggtgatcgactatctggaggtggtgggaacgggccgtcagctggaagtcagtcccctgccgttcgtggcgatccccaccaccgctggcacgggcgcggaggtcaccaaaaatgcggtgatcaacgttccggaacagcagcggaaagtgagcctgcgcgacgaccgaatgctgcctgacctggcgattgtcgacccggcgctaaccgacaacgcgccgcggagcatcaccctgagctccggcctcgacgccctgacccaggtgatcgagccctggctctgcagccgggccactcccttcaccgatgctctctgccagcaggcgatcccgcggggaattcgcgcgctaaaaatcctgatggaacaagagtgtccggccagccgcgacgagatggcctgggtcagcctgtgcggcggactggcgctggcgaacgccgggctgggggtgatccacggcctcgccggcccgctgggcggcctgagccgcgcctcgcacggcgccctatgcggcagtttgttgccgtttggcctggcgctcaatgagtcgcagatcaacgaccctggcctgcgccagcgcgttaacgatgtccgccgctggctggccgacgggctggacgtccctgtggatcaggtctgggacagtctgcgggaatggagccatcgcgctggccttggcaccctgcgcgacctcggcgtagcgcgcgatgcgctggaaccggcggcgctggccgccagcacctcctcatcgatgaaggccaacccggtcagcctgagcggcgaacagctgctggagatgctggaggcggcgtgggagtgagcgtcccgggataaaattttgttgcataatgaatgctccgaatttcatctgcgccaggatctacaatttttaattacttatcaacagcatactttgaaatggcagcttttcttctcggcggaaaagcgtgatctcacgcacagtttgcttcacactcaccgaagcgactgtctacgcttaatagacaaggccgggtatgcccggccccgaactcacgctatccggaggtccgtatcgctatgttcagccagaaattacgccacgttgaagacgacgagttaaggatcgacatcgatccctgctacgaagccgatccgtacgaattaaagctggatgagatgatagacgctgaaccggagcctgaggtgatcgaggggcttccggcgtccgatgccctcaccccggcggatcgctatcttgagctgtttaccaacgtgcagaaatcacgcattttcgcggacagcaaaaccttccccgactgcgcgccgaaacacgatccgctggacatcctgcggaactaccgcaaggtcaaacgccagcccgacttcgatctgcggcagttcgttgaggacaacttctggctgccggagagccagagcgacatctatatctccgaccccagcctgaccctgaaagaacacatcgacaagctgtggccggtgctgacccgcgagcctcaggatcatatcccgtggtcatcgctactggcgctgccgcaggcctacatcgtgcccggcggtcgctttagcgaaacctattactgggactcttatttcaccatgctggggctggcggagagcggccgggaagatttgctgaaatgcatggccgataactttgcctggctgattgaaacctacggccacattccgaacggcaaccgcacctactacctcagccgctcgcagccgccggtgttcgccctgatggtcgaactctttgaagaggatggcgtgcgcggcgcgaagcgctatctggaccatctgaagatggagcacgccttctggatggacggcgccgagtcgttgatcccgcaccaggcgtatcgccacgtggtgcgtatgccggatggctccctgctcaatcgctactgggacgaccgtgacacgccgcgggatgagtcgtggcgcgaagacgtggagaccgcccgacactccgggcggcccgccaatgaagtataccgcgacctgcgggcgggcgccgcgtccggctgggactactccagccgctggctgcgggatatcacgcggctggccagcatccgcacgacgcagtttatccccatcgacctgaacgccttcctgttcaagctggagacgaccattgccaacctctccggcctgaagggcgatcgcgagacggagacggccttccgccagaaggcccaggatcggcgggcggcggtcaaccgctatctgtgggatgatgagaacggctgtttccgcgattatgactggcgccgtgaacagctggcgctgttttccgcagccagtatcgtcaccctttacgtcggcctggcgacccacgaacaggcagaacgccttgccgatgcggtgcgggcccgcctgctcacccccggggggatcatggccaccgaatacgaaagcggtgagcagtgggataaacccaacggctgggcgccgctgcagtggatggcgatccagggatttaaacgttacggccaggatccgctgggagatgagattgcctggagctggctgcagacggtcaaccacttttacaagcagcatcacaagctgattgaaaaataccatattgccaccggcgtcccccatgagggcggcggcggggagtatcccctgcaggatggctttggctggaccaacggcgtggtgcgccgactgattggcctgtacggtgagccaacctagtcgggctgttcccggcggctttctcctgctatgttcagaggattcgccctgcccggaacgacgcttatgcctgaacttctgacgccgcgcctgcgctgctcaccgctgcagctggacgactggtcgttttttctttccctgcagcaggatccgcaggtcatgctctacgtcgccgatccccgaccgcaggcggccatccgcgaggcgttcgattcgcggctgccgccgtggacgcccggggatgaacactggctgtgcctggtggtgcgcgacaggctgacccataccccgctcggcctgaccggttaccagcatcatcagcgcgacattgccgaggttggctttctcttcgccccggcggcgcagggtcggggctacggctacgaatcgctgcgcgcgctgtgcgactacgcctttaccaccggcggcgtccgccgcctgaccgccagcgtcaccgccggcaacgagacgtctaagcagttactgctcaaagccggcttccggctggagggggagctgcgggaaaactactggctcaacggacgctggcacaacgactggctgttcggtcggctgcgtggggagggcgatgcgccgtagcgcaccgccggtcacaggctgggggcagtcaggatcagaggaccatcccgcccgagacttccacacgctgcgcgttcatccacgccagctcatcgctgagcagggcggcgatggcgtcgccgatatcatccggcagcccaacgcgccccagcgcagtctgggcggcgatatgccgattcacctcggcgttatcgcgcacctccccgccgccaaagtcggtctcaatggcccccggcgcgatgatgttcaccgatatcccccgtccgcccagctctttcgcctgatagcgggtcagaacctccatcgcccccttcatcgcggcgtaggccgcatagcccggcagggcaaagcgcgccaggccgctggagacattgaggatacgccccccatcctgcaggagaggcagcagacgctgggtcaggaaaaacggccctttgaactggatattcatcagctcgtcaaactgcgcttcgctggtctcggcgaagggcgcgttgagtccgatcccggcattgttcagtaaataatcaaaggtagtgcgtccccacttctgcgccagcacctgcgccacctcgctggcgaatgcgtcgaatgttgtggaatcgccgacgttcagcgctaatgctgccgctttgaccccttttttctctatttccgccaccacgtcgagggccgcctggcggttgctgtgataggtcaaaagaatatcggttccctttgccgccagcttcaacgcggcgtttttacccagaccgcggctgccgccggtcactaaagcgatacgttgtgtcatcagaagacccctttcaggttgcgttgtgattgtgttgtagcttattaactgctcatgcaacaataaatacgctacattgcgttttactgtttcattaacaacaacaataggcgatcggcatggataaaattcatgcaatgcagttattcattcgcgtagcggatctggagagcttctcccgcgccgccgagaccctggcgctacctaagggtagcgtctcgcgacagattcaggccctggaaagccatcttggcgtgcggctcctgcaccgcaccacccgccgggtccagctcacccaggatgggatggtctactacgagcgggcgaaagatctgctgagcaacctcgacgaactggacggcatgttccagcacgatccggcgagcatcagcggccggctgcgggtggatatgccggtcggttttgctaaaaaaatggtgatcccgcatctgccgacttttttacagcagtatccgggcatcgaactggagctgagcagcagcgatcggctggtggacgtgatccgcgaggggtttgactgcgtggtgcgcgtcggcgcgctcaaagactcagggctgattgcccgcccgctgggcaagctgacgcaaattaactgcgccagcccggactacctggcgcgttttggctatccgcaatccctggaggatctggcggatcatgccctgatccactacgccagcaccctcggggtccgtccccccggctttgaggtaatgatcgacggcgcggtgcgctgggtaaaaaccggcggcatattgacggtcaacagtacggaaacctatcaggcagcctgtatcgccgggctggggattattcaggtgccacgcaccggcgtgcgcgaggcgttacgcgccggcgacctgattgagatcctgccccagtaccgcgccgagccgctaccggtctcgctgatctatccgcaccggcgcaatctctcccgccgggtaaatctgtttatggagtggctgggcggactgatgaaagcgtatgtcgattgagcggcgcggctgaaaaacgggcggtggagagaggcattcctgcaggatacggcatttaaggtatactttttgctgaatctcgctgtaaaaaaggaagaaattacgtatgacgccggaaaacgacgatcgacgcccgccacaggaaccggatacgcagccggagaaaagcaaaagcacgctcgaggccctcaatgacaccgcagtcgggcaaaaagccagccaggcgctgaagaccgtcaccggaacggcggccaaagtgcagcgcaacccggtgatcgcccatctgttgcgcgccgcagagcgcttcaatgaccggctcggcaatcagtttggggcggctatcacctatttctcgttcctgtcgatgatcccaatcctgatggtctcctttgccgccgccggcttcgtgctggcctggcacccaaccctgctgcaggacattttcgacaaaattctgcaaaacgtcagcgacccaacgctggcggcaacgttgaaaaacaccatcaacaccgcggtgcaacagcgcaccgccgtcggtctggtcggcctgctggtcgccctctattccggtattaactggatgggcaacctgcgcgaagcgatccgcgctcaatcgcgcgacgtctgggagcgccggccgcaggacgaggagaaaatctgggtaaagtacttccgcgatcttatctcgctgatcggtctgctggtggcgctgattattacgctgtccatcacctccgtcgccggctccgcccagcagatgattatctccgcgctgtatctcgacaacattgaatggctgaaacccgcctggcggctaatcggcctcgccatctcgatttttgccaactatctgctctttttctggattttctggcgcctgccgcgccatcgtccgcggcgcaaggccctgtttcgcggcacgcttatcgcggcgattggctttgaaatcataaaaatcgtcatgacctggacgctgccggcgctggtgaaatccccctccggggcggcgttcggatcggtgctggggctgatggcctttttctatttcttcgcccgcctgacgctattctgcgccgcatggatcgccaccgcggagtataaagacgaccggcggatgccgggcaaaaccccccgctgaggtattgcgaggatgaataaaagatgcaaaattcatcctcgcgcttgatttcagcagataaatccagcatgtaacttttatttaactcaaaactggttttattctctatctttttaattgcgtgaagcatttcatagaactatttttactggtgtaaaaattatccgctttttgcctcttttttgcccattttccgcgtttgttacagattgaaatgtccctgtggctgtggctatatggcttttcgttcgcgcaaaaataagaaagatctatgcaagccacagccaccactctcgaaaacacgcaggaaaccgccccggtcaactcacgcaacaaggttgttgtcgcctcgctcattggcaccgccattgagtttttcgacttctacatctatgccaccgccgcggtcatcgtcttcccgcatatctttttcccgcagggcgatgccgctgcggccaccctgcagtcgctggccaccttcgccatcgccttcgtcgcccggccgatcggctccgcgctgtttggccacttcggcgatcgcgtcggccggaaggtcaccctcgtggcctcgctgttaaccatggggatctccaccgtggtgatcggcctgctgcccggctatgaaagcattggcattgtcgcgccgatgctgctggcgctggcgcgtttcggtcagggccttggcctcggcggggaatggggcggcgcagcgctgctggctacggaaaacgccccggcgcgcaagcgcgccctgtacggctccttcccacagctgggcgcgccgatcggcttcttcttcgccaacggcaccttcctgctgctctcctggctgctgaccgaccagcagtttatggagtggggctggcgcgtgccgtttatcttctccgcggtgctggtgatcatcggtctgtatgttcgcgtctcgctgcatgagaccccggtcttcgccaaagtagcggcggcgaaaaaacaggtcaaaatcccgctgggtaccctgttgaccaaacacgtccgggtaacggtgctgggcaccttcatcatgctggccacctataccctgttctacatcatgaccgtctactcgatgaccttcagcaccggcgcggcgccgaatggcctgggtctgccgcgtaacgaagtgctgtggatgctgatgatggcggtgattggctttggcgtaatggtgcctgtcgccggcctgctggcggacgcttttggtcgtcgcaagagcatgattatcatcaccacgatgattattttgttcgccctgttcgcctttaaaccgctgctgggctccggcaatccgctgctggtcttcgccttcctgctgctgggcttaagcctgatgggactgacctttggcccgatgggcgcgctgctcccggagctgttcccgacggaagtgcgctacaccggcgcgtcgttctcctataacgtgtcgtcgatcctcggcgcttcggtcgcgccgtacattgccgcctggctgcagggtaactacggtctcgcggcggtcggcacctatctggcggcgatggcggcgctgacgctgatcgccctgctgctgacccacgagacccgccaccagtcgttgtgatccttcgccctgacgcccccggcgtcagggctctcctctactttttcatctgcgacaaaatggtccgacactggttgctatcgccctccgccggggagatcagcgccagcagcgcggcggccggcgtcaccagggttgccagcgccgccgctaccgcgccgcggacaatcagcggcccggccttcacccccgcctgcggcgatttaaaggtgccccggacatacagcggggaacgcagggtgatcacccgaaagcctttgctttccggatcgatggtcaggtccagctgctcggaggcgaagctggcggtcccggtcacattgatcagcgcgttttctgtatcgaaggcaaaaatctgcggccgggcgacgccattggttacgtcgatattggccgcggcgcagtttacccgaacctcctcatcgccaaaaatctggccgatcaggtagttaccgacgttaagaccgaggatttccatcaggttgcgactgatcagtccgtcgttcatcagcagcttcaggttaccgttgctgttgccgagcagggccgccaccgagttgccgctgccgcgcagctggacgtcgccattcatctcgccgagggttttctgcatcatctcgacgtttggcatcagcgccttcagcttcaggcgtcgcgcctgcagattggcctcaccctgcagcggctttttatcgccctgcaggtgtacgctgccggcaatcgacccgttggccaggccaaagcgcaccggctgcaggcgcaggtcaccatcctccagaatcacatgggtcgacagatcgctgatcggcagggtgccgccgtgctcaattctccggcccttaaagcgcacatcggcatccatcacctgccacttgtcggtttcaaagcggtccgccggcagcactttacccgccggctgcggccggtcccccgcctggcgcgaagcgcttttcttcgtccctttgccggaatcgacgccgattaatggcccgaggtccgccagacgcagctgcttcgactccatatcgccgctgagtttcggccgcggcttgccggtggtgtaggtcagggagccatgaatgtcgctatcgccgattcggccgttaaaattctgatagttaaagcgcatgcggtttttttgcgtaaagtcggcgcgcaggcggccgtcggtggagaatgacggcgtctccggcagcagcacgccggtcaggtcatagagatcgcgcagcgagtcgccggcgaattttagccgcaggtcaatgccgccgacgttgagcgggtcgctgaccgtgccgctgaacgctacccgggtgttaccggagtggaagtcgccctgcaatgggaagggggcgcttgcgctgcgcagggccagcatgccgccgattttcccgttgccggtgaccggctggcccttgtagcggcccttcagcgacagaccaaagacatagtcgcctggtttcgccgcgctatggctatcttttgtgccggtcacttcgctgaacggcagcggtttgccgaggggatcgacgaggatggtgatatcgctgcgggtgatcttgtcgtcaatggcgatagtcccgcgatcaaagagaatattatcgaggcgaaaggaccagctggagggcgcgctgtcgcccgaagtacgcttatcgcccgccagctgaaaggtccagttattgttgtcttccgccaggcggatcaaccgtacgtcgggctgctccagcttgatccacggcaggtacaccgttttgctcagcagcgccagcggggcaagggtcgcctccacccgcggcaaatggatcatggtcacctggggaatggccggcgggttgcccagcacgatatcctccgcgtgtacgtggggccacgggatccagctgcgccagccgcgctcgtccggctgccgctcccagaccacgccgagatcgccgcggatggcgaacgggcggttaagttcggcggacactttctgattgatcgtcggcttcagccggttccagtcaaaggtggccagcacgataaagaaaagaacgatcagcaatagtatcgttcctgtgatgataaccaacgttttacgggttctgctcatccctactccgctccttttgcatcacgtcagtcctgaatatagtcaaaaagcggcgtttatcctggaaatgcgcttttcgtcacattacgcgcgtcaggtcaaaaaaataatggaacgatgttttaatatgattgaccagcaaaacagcgcagcgcacactagcgcttatatcaattccattgcaggttctggctatgtctaaaaaaattgccgttattggcgaatgcatgattgagctgtcagagaaaaacggggccgttaaccgcggctttggcggcgataccttaaacacctcggtctatatcgcgcggcagacggatgccagcgcattgagcgtccactacgtcaccgccctgggaaccgatgcgttcagccagcagatgctcgacagctggcaacaggaaaacgtcaacaccgatcttatccagcggatggccgaccgcctgccggggttgtattacattgaaaccgatgacaccggcgagcgcaccttctactactggcgcaacgaggcggcggcaaagttctggctggagagcgatcgcgcggcggcgatttgcgaagagctggccactttcgactatctctatctgagcggcatcagtctcgccattctcagcccggccagccgcgacaagctgttcacgctgctgcgtgagtgccgcgccaacggtggcaaggtgatcttcgacaacaactatcgtccgcgcctgtgggccagccaggcggaaacgcagcaggtctatcaggagatgctcgcctgcaccgatatcgcgtttctgaccctcgatgatgaagacgcgctgtggggagaaaaaccggttgctgaggtgatcgcccgcacccacgccgccggcgtggaagaggtggtggtgaagcgcggcgcggatgcctgcctggtctcggttagcgggcaaccgctgcgggaagtgccggccgtcaggctggccaaagagaaggtggtggataccaccgccgccggagactccttcagcgccggctacctggcagttcgcctgaccggcggcgatgccgaatccgccgccagacgcggacacctgaccgccagcacggtgatccagtatcgcggggcgatcatcccgcgggaagcgatgccgcagtaattctccgcacaaagcgctctccggccgccgctggcgcgccggagaggcgttaggttactgccccggcgggatgtcgctggcctcgctgtgggcgtcaaccgtatcggcgctgccgctagccgccgtggccgccggattcggcgccatcagtttttcccaggtggcctgcagttccttcatattgtattccggttcgcccttcggctgttgcagcaccagcgccatgtcctgcgagagctgctggcgcagatactggttcagcatgtccaccgtcagggagttgaggaactcctgacgcagcttctggtactgctccggcgcgatgtccaccacctgattctgcagggagcgcatgcgctggctcatcagaatgtcggtgtcagtgcgcgcataggtggcaaacagcttctgcagctcgaggcttttctgagcgataagcgcgtcaaactcctcctgaggcagcccgttgtcccgcactttcgccagctcgcgcgaaaccacgctcaggttgttgttcaggcgctcgcccggggaatcgatgttgatggcgcactgcgcgcgctgatatagcacccggcagtcaaagccaaggccaatatccttcacgttatttttgctcagactctgctgcacgtgccagaacagcgcttcacgggcgagatcgtcacgccagtagcgctgcagcgccgcggagtcgcggatcggctgccatggcgcatcccacatgatggacagtttgtcctgacgcaccgcgttggtcatgatgctgaccggcacggtaggcagcggcgataaggtcggcaccgctgcgggggtttcccgcttgcccttcagatcgccaaaggtcttattgatttgctcggcaacgctgcggctgtcgacattccccaccacgatcagcgtcatggcgtcgggggtgtaccatttttgataaaagtctttcagctgcgccacgtcgatcggctgcttcagcggcgcggcggggtcatggcccagcatggtggaccctttcaggcgatagcgccaccaaccctctttggtatccagtggccaggtcgccaccatgtcgctgccctgcagcgcatgattgatcgattcaggcgtaatggccagtttaccgctggcgtccgccagccagctcagcgcctctttcaatagatcgttgcggttattgggcaggctgagattaaacatcgtgtaatcgtaggagacgatggccggcggcagaggacgcttcgggtcaatactctgctgccataaagagcgcgcctgcatcgtcggcaggctgccgctttgcgtcaacgccaggcggggaataaagcggctgaaaccgctctgctgagtgctttcgctcagcgagccattattgacggacaaacggacttcgatacggtcgctgggacgttgcggcgtggccaatacctgccacgacaaaccattcgctaaggtcccttgttgccaggccggatcaggctggagcgcttctgcctgcacataaccggccgccgctaccatcagcaaaccgcccgttaagagtttaattgttgtgccctgcatgtgaacccctgatgaacattcctggttacaacagcaccccactgacgggctgccgaaaaaagtgagagtgaaatacgtcggttagaccacacggagacgaaaatgtcgcatgacaacgtaaaataatcatttcgtgtcattcccgccgggcgggaatgacctctaattatgcgcaggaggccgtactccagcaagggagtacgggcctaagaggaggatttaagaggataattcgtgcgttttgttcgccggaacacggttattcagaacgtcatccatctgtttggcatccagttctttcacccatttcgccaccaccaccgtggcaacgccgttacccaccaggttagtcagcgcgcgggcttcggacataaagcggtcgataccgaggatcagcgccaggccagccaccggtaaatgcccgacggccgagatggtcgccgccagcacgatgaagccgctgccggtcacccctgccgcccctttcgaggagagcaacagcaccaccagcagggtgatctgatggaaaatatccatatggctgttggtcgcctgggcgataaagactgcggccatcgtcagatagatagaggtgccatcgaggttgaacgaatagccggtcgggatcaccaggcccaccaccgatttacggcagcccagcttctccatcttgtcgagcattctcggcagcgccgattctgatgaggaggtccccagcacaatcagcagctcttcccggatatagcggataaatttgaagatgctgaagccggtggcccgggcgatgctccccagcaccaccaccacgaacaggatacaagtgatatagaagcagataatcagctgccccagctgcaccagggtgccgacgccatatttaccgatggtaaaggccatggctccgaaggcgccgatcggcgccaggcgcatgatcatattgataatgccgaagataacctgggagaagctttcaatgacgttgaaaatcagctggcccttgctgcccagacggtgcagggcaaaaccaaacaggacggcgaacagcagaacctgcagaatgttgccgctggcgaaggcgccaatgacgctgcccgggatcacatccagtaaaaaggccactaccccttgatctttagcctgctcagcgtacaccgccaccgctttcgcatcgagcgtcgacgggtcgacgttcatcccggcgcccggctgcaccacgttgacgataatcagaccgataatcagcgcgatggtgctgaccacttcgaaatagagcaacgccaccgccccggtacggccaacggctttcatgctttccatcccggcgatccccgtcacgacggtacagaagatcaccggagcaatcaccattttaatcagcttaacgaaggcgtcgccgaagggtttcatttgcgcgcccagttccgggtaaaaatggcccagcagaataccgatcgctatggccgtcagaacctggacatagaggcttttaaagatagaggttttcatagggtgtcctttgggaataaccacagagcaagaagggatatttgacgtctgtggcttaaaaataacaccctggaaacatttcagaaataactaacgccgaaagtgcaacgcaattgttaaaatctttgagctgactcgcacaagtcaacaaaacatttacaaatttgcatcctcccgggccggggagagatagcgcgcgctgaatgcctcctgcggtaaagcgcaaccgaacagatggccctggagcacctcgacgccagcggcttgcaaccagcggcgctgggcgtcgttctccaccccttccgccacgatacgcagcgacaggccgcgcgcgagctggatcatcgccggcaccatgctgacatcctccggcagcatatcgatgaataccttatcaattttcagaatatccaccggcagggccttcatctgctgtagctggtgcaacccggcataacccatgccaaaatcatccagcgcaatctgcaccccggcctcgcgcagcgggcgcaaccgggccatcacatcctgcggatcgtccatccggcagctctccgtcacctcgaggatgagggtacccggggcgatgcggtagcgggcgatcagcttcagcatctcctcgccgcggtcatgctccagcagctggagcagcgaaacattgaccgacagcggcagcataatcccctggctttgccaggccgccagctggcggcaggcctcttccattacccagtagccgaccgggataatcagcccgcaggactcaatgcgctcaatcagcgacggcggtagcgaccagctgccatccgcctgccgctggcgcagcagtacctcggcgccgcagatctcgccgctggcgcaggccacctgcggctgcagccagatcgcgaactgctggttatcgagcgcggtcataatgtcgtgctcttccatcaggcggcgctgagccttttccatctgctcgggatcgaagaactcgatctggtttttgcctttacgtcgtgcggtgacggcggccgacaccgcgcgccggtaaaactgctcggcgctgagcccggcgtggaacatggctatcccgacgctggcgtaggggcgcagctgcagcccatgcagcggtaaacgctcattaataatagtgagcacttgcttacttaacgttaccgcctgccacggttcagcgaggccatcggcgagaatcgcgaagtcatacccgctcacctgagccagcaccatctgcggcgggatcgcggcccgcagcttctccaccagcgtcaggagcagcatttcgcgctgactctccttgaggactccggcggcgtcctgcagggtttcacaggcgacgacgatcagcgcggcgctctgcgggcgggccaccgtctgctccagcatcgccagcaaaaaggctttattcggcagctcggagaccgggaagcgggtcgactggatggacagctcatcatgctggcggaccaggctctgctggttgcggttatagctacgcaccagcataccgatctcgtcgtcatggtgcaggcgcggcagggtcagctgatggccaagacgctcctgctgggagagagcgttcagctcgcgggcgatacgccgcagagggcgaaccatcagccggttgatgcaccaggtgagcgccaccgtcagcatcagcaccagaagtaagtaagcagtcactaacgtagcaagggcgctcatgacgaatttatacatgcgataggagtcggcctgcagcaccagataggccagcggctgcgggttggccggccgctccagcgaataaatgggcagcgaaatctgcaccggcagctcaaacagccgggtgacggttaccggcaccggccgctcggggataaatcgcatccgcagcgcctggaactggttcggcaataccacatccgcccggctgacgatgccagcaggctggatacggcttaaaatggcttccgcttccggaatatcggctttcagaatagccgcagacagcggttcgcgaacggatcgcgcgatactttctaactgcgtggccgtggtaaagcgactctgttgcacaaagtgaaacagcaaaatagtgcaaaaaaccaatacaaaggccatggacacgctcgcgaccatcgccatctgtttgattgtaagtgaacggctgacgcgcaacggtgttctccactgatactgaatacatacccggtatcaatccttcaatcccggtcgtttcaggctgattatatacttaaatccttcgcccacgcccgcgagggatgaagtgacgggatatttccgcgcggtggcgcggacgccgggatacatccccgacggccaacggtgggcaacgcctcacgagtatacgcgaagcgcgtcgcggagtggcgctctgtaacgtaattcagcctattctgctaccagtcggcgtagggcaccagcggctggggcggcatatccagatccccctgccagccggccgccgagtagcggacgtaaagcagcgcatggctcggggtgtaatccttcgcctgctgaatatcgaccgcggcgccgacgaaccagttgctggtcacccgccgctccaccagcgctctggcggtgtaaccgaatccatggctgctgctcccctcctccgtcagctcgctggcgcgctgccggtagtcggacgggatcaggttcagcagcggatagcgggcttgcgtctgggtgcgcgaatgggaccatgacaccgacccgccgagctcccaggaccagttctcggtgcgctgacgccaggtcaccggcacggcgaacgagagatactcctgtgggctgtaatagccgccctggccgagggtgtagccgctgagatctttgtcgtagtgccagatcatattgttgaggccgacggtgacgcgacgattattctcgttgatgaccttgtagtagtacccggtcatccagcgcacgcgccagttatccgccacgtttttaccggtcagcgagtcggcgcccagcgaggaccagatgccgtgagcctccccgcgatcgtagctcaggctcaggccgccgccgtcggcgcggacgccgccccaggtggcgccggtatggctgctgctgtccttctgcccgccaaaggagagcagcgagctggagataggccgccggtggacgttgaccgtgtaccccaccggcccgacgtcgctgctgtagctcagcccccccaccacatcgacgacattgaagcccatcggcgtggtgccgatatccccgctccaggtgtcattcttccagccgaccgccacgctggccccgctgtcggtctgatttttactgccgctggtacaggcgatctccccgcaggtgccccagctgggcgagtagctcccgtcgctgtgggtggaaaaactgccggcatccatattgaccagatcggttcgaaagaacatccggccatccgccagcggagcatccacctgcagcatggtggtatgcgccttcaggtcggaatagccgccggtgccgctggaaccccagaagtcatgttccagggtgacgttcagatcctgctgacgataaaggtcggcggcatcgctgcggatcccgcgcttcagccagtcatcatggctgtcgttgcgcgtcagccgcgtaaaagtatcgttatcctgcggctgcgcgggggtaatgccggaggccaccatcgcttcccggtagtgcgtcagcgcctgctgcggcgccccgctctgggtggcaaagcgcgcggcatcgcgcagcaccagcgcgctctccatcgagggcggctgcgccttcgcctgcggcacaatctgattaaaaatccgttgcgcgtcagcggtatcgccaaggccagctcgcgccagcgccacccgccgctgcatgttcatggattcggtctctgcgcctttcagctgcatgacctgcgcccgggcggccggtttatcgccctcggccaggtagacttccgcaaggccgaggcgcgcatcgccgttgtcggcctcctgacgcagcacccgctgatagtcggcaatcgccgtctggctgtctccgcgctgctgcgcccagtcggccagcgtcagatcatagcgcaccgaggcgggctgccgtttgatgagggcgatcgcctgggcttcgttaccgctgtcgcgcagctggttggcctggcgcagcacccggtcgctttgcaggcgcgcttcgagttcacgaatgttatccgtccacgcgctgcgcggcagagcggcgatttgcgccagagccagatcgtcctggtcgttccccgacaggtagagtcccgaggcgtagacccgttcggcgtcctgcggctggcggttgaccatcgtccgcatcagcgcgtcggcctcctggcgttcgccggcgctgaccagatcccgcgccagacggtaggttatccagacgctgtccggatccagcgccaggcgccgacgctgaacttccgccgcctgcgcccagttgccctggctctccagagcctgcgcctgtttctccagccggtcgttagtcaggctgcgctcaatatcatcgatactccgccgctgagcgggagggaggccggcgatccaggcgctggcttcctccggcgattcggcgcgatagaggttggccaggccgcgcaccgccaggttattgccgcgatccaggcgcaacgcctgctggtaatagcgctccgccgccgccgcctctttgcgcgccgccgcgacgtcccccagccccagcacggcatagctgtcggtgcgatcgacccgctgcgcctgggcataatagttctgcgcctgcgaaagctggccggctttcagggcgttatccccctgctttatcagcagccagtagcggttagtttgcagcaggctgtcccacttgccgcggttcgggctgtcagggtccatggcaatcgctttactgagctgcgccactgcccgcgcgcggtcgccgcgctgggaataggcctggccgagagcgcccaccgcgtcgctgtcgcggctgtcggcctgaacggctttctgcagatccgcgaccgcctgcgtggtattcccggacctgaccgccgccagcccttccgagcgggcgcggaaagtcggatcctgcagctgcgcctgctgttggtcgagcagaacgcgggcgttcgccgccaccgagccggtgggaaactgcagaagaaattgctgcaacgcctgcacgctggccttgctcaccggcatgcttttcacctcactgaaccacatatcggcggcgataccgcgtcccgaggccgatcgggccatctccgccagataggcgaacccctcctgcggtttgttatcggcgaacatctgcttcgccagcgaagtcagcaggctgacgttgcccggcgcgctggcgttcagttttttcaactggctgacgccttcgctatggcgggacggcaggcgcgccaccagcgtccagtattcaatggcgacgtcaacgtcatccggcaccccgccgtacagtttttcataggcggcgatggcttcatcgaccttcccggccacgcccagcagtcgcgcctgctgcagcgcctggcggccctcgccggtgttgcttttcatctcattgcgcgacgccttcagctccggggagtccggcgccagcttcgtcagtcgttccagctctttttgcgccccggcggcatccccctgacgcagcagatagcgcatccgcgcggcaatcagctccgggttgttgggatcaatcagctccagacggtacagcgactggcgcaccaggtcttcacgattgctggcctcgccgaggcggacctgctccagcagatgctcctgggcaggcgtcgtcgccgcctgcgctaacggcagcagcgcaacgccgagggacagcgtgagtaaacttagtgagagcttgcgcattcctggttccagtcaggttgtaattcaccactcgccgtgaaacgaaaacggtgttgatcccaaccctggccgaacagcgtcagaactgcgctgtagtaggcatccgcgccgggatagttatcggcgacgcgctggcgttgcaccgaccgggcctcgtcgtcctgtaaaaacggcagcattgccgcggagaagcccactggcccctgaccgctggttttgccggtggcgatattcactttctccgggggtaccccctgcttcgtggtctgcgccgccatcggcgtgaagcgttgcagcagacgcgctttctgcttatcgccatcatggagcatgcccacccacaggtagacgcgaatcgcgtcatagctgccgatcggcggcttttcggttttcagctgccagcctttccctttctcatagcgcacccagtccggggtaaagcctttcggcgcggtctccagcagcaggcgcaggttactatcgcgcagagcgggccacggcgcgccaaaacgcacaaagtaggtggccagctgcggcggaagatagctggggttaaaccgccagccgctgtcatcggcaaaaccgacttttcccggcagcagcatcgtgccgaggcccggcaccgccaccgtctcttcagcgacaatccgcgccagcagggcttttccggtctcggtgtactgcggctgttgccacaggcgccccgcctccagcagcgcccaggctatccacagatccgagtcggacgccgagttgctgtccagcagggtccactgctcatcgtcctttttgccccacagccagcccggcaaatgttgtttcagatcgccttccgccaggttgttctgcgtccaggtcagcagtttgtcgaaccccgcgcgatcgttggccgccagggcgaaaaacaggccatagctctgcccttcggaggtggagattttgcgcgcatcgctggggtcaatcacccgtccctcggggctgacgtacgcttgtttaaactgctcccaggcgggccactggcaggcggcgcccacctggcccgccgccagcagcagcgccgagagcaccgcgccacaaagtactttcatcatggtttactcatcatccaggctaagacggcggcggctgatgatgcgcagcatgcgccacagcacccatgccagcagcacaatgctgatggcggcgaagatcgccagcagtatcgggtggttagagagcgcgaaccagatgcgctcgaaccagggcagatgacccacgtagtaaatatcccccacccgcagactgttgacgccggattcgcggatcaccgccaccgagccaaacatcgctgcccgcttaccgctgtcgttgagggcgttggtcagcagttcattaccgcgcgggctgtcggccagcagggccaccacgctgcgctgatcgttatacggcgactggaagccaatcaccgtcgccatcggcccggaagaggtaatgtcggtgcgggtattgggcgtgcgggcctcatcgtcgggataaatgctcgccaggtcatagtggcgcatcggcattttcacccagcttttggtcgcctcgaccagcaggttgattttggtgtcgtccttgagcgacgacgggatcgcgccgatcagcagcagatccgcgtctttattcttgatctggttgccatcgtcggtcatctgcagattaatcgccgccagaccggtctgcgagccgatgccccccagcgcctgcagcagcgtcgccacctggccctgggtcggcgccttcggcaccaccaccagcgtgtcggaaaggtccgccatacggctgtaagggaagcccgcattggcgaagacgcgcaggtccggcaaggcgataaagtgataatacttcgagaagtcgatggtcgaatcgtcgccaatcaccacatggttctgcaccggctggaaggtaatacagttgtcgatggagccgccgggcatcgggttcatatactggaagtcaaagcgcagctggttgaccgccccaagacgcagcgcggggatggtgacctccgatttgccgtccagcagcccctgcagcaccggcaggcgcaggatcagtttgttcacgtcctgggagctgttaaggctgaacgactgcaggaactggtcgttgaggctgatatccatccgcgagctgtccttcaccggcggcatggtgtagcggtatttcagatccatatcgatgccgttggcccgcagcagatagagatccggcggcaggttaagcgccacggtgatggcatccggcaccaggccgctggactgcagctgttgctcataggttttcagctcagcgaaggtgaccgagcggtcggtgcgcacccagttcggcgcgtcgtaaggctgacgcggctgcagggttttgatgccgtccacggtgacgctgctgccgcggaacagaatattgccctgagcaatccccttcgccgccagcagcaggtcgttatcatcgcggccgaaaatcaccagcagcttgacgtagggatcgttcgggttgtcgatcatttcgatggtcggcgccttgaccggcggatgatcgcgcaggaagtccggacgcttgtcgttggtggcgaagacaatggcgttacgatccggcagttcattgaaatagaccgggaactgctggccgcgccagccggccttgctgccgaaccaggaggcgactatcgccgccgcctgctgctgggtgaccgctggcgagcccgggaaaatcatcggcagcttcagcggacggttatcgcgcggatcgtagaacggcaccgggaagtgtgacagatcgttatttaccttcagcgactggtaggtgagatccagatagctttcgcgtccgacgtccagccacagcgtactgctggccgggttttcgcagacgtcgcggtagtggccgacaaactccagccgtacgcggttgaagtcggtgatgtacagcgggtcaatcggcagctgcgcgcggatctttttccccagctgctctttagtgacgggcaggacgcccatcagctcatcgttaagatagaccttcaactgcgactgcacgggcagcagcgagggcgatggggtgtattccagattgagcagcgcgttggcgaccagctcatcgctgcgcatgccgaattcgaccgacgcgtcaggccgtgagccgcgcagcacgatgctgccgggcggcggcgcgatggtggcaaagctcagcttcacctcccgctgcggcacgttctcggccaccgccgccggagcggtcggttcggcgagggtcgccgtcggctcgcccaccacgatcggcgcagccggggtcgcggcctgcggctgaacgccaggggcagcattcgccaccgcggccggcgccgcataagaggccagtggataccagctgcacatgcccaccgctactgcacacatccaggaaagttttcttttcatcgcattatcatcattgttgagccattgccgggtctgcggagagcgtcggcgcggcgcgttcagggcgtcggggtacaaacgacgctatccaggccaccagcgaagtgagcgcgcggaaaaccaccttcaccgacggcggcgaaaactccgccaggtgacgatagccacgaaagcccagcttgaggatatccagcaggctttccatcggcttatcttccgggaagctatcctgccaaagcgcccacgtatcagcgcgggcaaacgtacactgcacaaaatcgatatgctgctggttggttaacggcagcagctggagccccacttcgctgccgttgacccgcgcgaccctgaccgggaaggcatactcctgctgtccccgtttgagcagcagcctggcgttctggccttccagcacctgcgcgtcgccgttaattttgatccccagtccgccgtcggaatagtcgtggacggtgcaggagaacaggtgaccatcttcgcgggcgatagccgccggcatgctcatttcgacacggtgcgaacggcgaacctgcttgctttcaaccgagaccgccaccgcgccgccaagaataatcaggttgtagaatacccagacaatactcacccagacggtgaggatttcattttccgggccgtacatgaagcgccagatccccaccgcgacgccgaccagattgagcagcaccaggtagatatagggccgggagatcacccagtcgacatactcctcttccaccagcccgcccttcgcggtgacgttgaacttgcctttatgcgggttgatcagcgccacaaaagtgggcggcgcgatataccaggccagcaccgtctcgtaaatttcactccagaacgaatggcgatatttgccctgaatcttcgagttggtcaggctggcgtggatcatgtgcggcaacacgaatagcgcgatcatcagcgctggcgcataaatgatataggcatggagcagcaaaaaggccagcggcgccgtgagaaagatgaggcgcggaataccggagagaaagtgaagcatggcgttggcgtagcagacgcgctgcaccagcttcaggcctttgccaaacagcggattatcgaggcggaatatctgcaccatcccgcgcgcccagcggatgcgctggccgatatgcgcggataaactctccgtcgccagccccgccgcctgcggaatacgcatataggcggaggtatatccccgccggtgcagacgcagcgaggtgtgggcatcttcggtcaccgtttcgacggctatcccgccaatttcgtccagcgggccgcggcggataacggcgcaggagccgcagaagaaggtggcgtcccacatgtcgttcccgtcctgcaccaggccgtagaatagcgtcccttcgttcggcgttttgcgaaaacgaccaaggttgcgctcaaagggatcgggcgagaagaagtggtgcggggtctgcatcatcgccagctctttctctttcaggaaccagcccatggtcatctgcagaaacgagcgcgtcggcacatggtcgcagtcaaagatcgagacgaactcacctttggcatatttcagcgcattattgatgttgccggccttggcgtgttcgtggctggtgcgggcgatatagtgcaccccaacatctttggcaaactggcgaaacgcttcccgtccgccgtcgtcgaggatccagatgttcagcttgtccttcggccagtcgatgccctgcgaggcgtaaatggtgtttttcaccacgttgagatcttcgttataggtggggacgaagatgtccacggttggccacaaatccatgtcctccggcagcgacaccggctggcgattcagcggccagaccacctggaagtagcccagcaccagcaccacccaggcgtaggtctctgcgaacagcagaatgatcccgcacaccaggcttaccgggtcgttccagttcagcgtcgaggtatagcgccaccagatatagcggcacgacaccgtcagcgacagcacgatcagcatcagcgccgagaaacggcccgggatgcgtcgcaccagcagcgccacgccccacagcagcatcaggaagataaactgcgacagcgggttaaagggctgcgtaatacacatcagcgccagcaccagcgagcagaaggtcacccccccaaggatcgcccggcgcagtttaggattgaggtgcgccagctctttctgtttatccagatggccggtgcgggcgttcatctgctcaggcaatttttccagccactgcgtatagcgaccgtgcaccccttccagcgccgccagcgaacgccagttgacctttttctccggctccggcacgcgcgtcgtcagtaaccacagggattgcagcaggtagcgcagcggatccagcggacgcgggcgatgcggatttatgtggggaaaataggtttcatggcgggccagaatcgcctgccagcgcggcgtctccagcggcatcagcgcccagaccagcgatgcccacagacagccaagcgacgccgacagccacgaagcgccgtgctgccgatagtcatcatagcgcgcacgcagccgctcccccaccggcggggccagcagcagcgtactgaggcggatcatgccgctctcccggcggaatagtggatcaggcaccagttcgccagggtcagcacctcttccgccgccagcgaatcctgacgatactccccaagaggttgtttcgccgccaggcactcggccatcgcctcgtcgcggtgaatcgtcaccggcaggatgcgcggctggctctccagccacagctggtagagatcttcctgcagctggctgccgacccgcagatcgttaatcagaatatcgccgttggccgggaggggctgctggtgtagacggatatggctattggcgtcgggatgaaccaccaccagcgagcgatcgcaaagcgtcagcagctcgcgggtcaacggcgaataacccgccggcagatccagcagcagccagcggtactggccctgtagctgctgtactgcctccgctatcgcccccagggtgggctgcagctggtcgacattttctctttcgccggcgctgagctggccaaacggcagtagatcgatatgctgcgtatagcgcaagcccgcgtcacgccagtcccggccgtcgagcagcgcccgcgcccagccgtcctgatgatggatatcggtattaaagaaaaagcgcagcatattatccgggctggcgtcgatcgccagcacgctttcaccgagcaattgcagggcccaggcgagtgcagccgtaatggacgtgacgccagttcccccgcgcacgccctgtaatcccagaatagccatctccggcttccttattttttctctgcaaactctgccagcagcggccagcgcttcagcgccgcgttcagctgttcgcgcctggaaatatcatgataatcaatatccggcagggaaaatgcccggctaagcgccagaaaatcattttgaaaggtgtaccccagcgtggcgtccgtgggtaccgcaggatcttttgctggcatatctctgtccgttcgaaatttattattaaaccagaggacgtatacagctcatccttaaaagcaggtgtacatgctaaaactgatgacctttaatttcaatgttaggtttactctgtcggtttcgctagtaaacttattcagtgtcaatcagggcgcacgagggatgccgtggataatgtatttactttgggtatttcatcattatgggatgaagtgtgccatatgccggtcggcggagtatggtggctcaacgtcgaccgttatgccgatgccgtcagcctgtttaatcagacgctggccgcgcaggcgaaaaacagccacgttgccgcgctggttatgggaaacaaacccaaggatatcatttcattagatcatattcacggtccggataatatcgcgctgttcaccctgccgaatcgcccccaggcgctggaggaaatacaccgcgatttagtctgctccctcgaacctggcaattatttgtttattctgctatgcgctgaaaatgcctggcaaaatataaataatgaaaagttatgcgcctgggtagaaaagaccagccgctgggcgcaatatcaccgttgcgcgttcttagcgatcaattccgcgcaggatatcgatcggcagctgactcccttattacgtgagtaccgctccctttccggactggcaagtattcgttaccagggcgaccggcatatctttgatattgcctggtggggaagcgataagggtatcagcgcccaacagcagctgatggtgcaacatgatgacgccggctggcgattagcgcaggacgctgaaaccagcgtgcagccgcgcagcgacgaaaaagcgatcctcagccatgtgcgcgtgctggaaggcgccccgccgctgtcggaatactggacgctgtttgacaccaacgacgaggtcttcaacgccgggcgcaccgcgcaagcggcgacgatcctcttctccattacccaaaatacgcaaattgaacagctgggccgctatattcataccctgcgtcgccagcgcggtacggcgctgaaaatcatcgtccgtgaacaaaccccgagcctgcgcgcgaccgatgagcggctactgctcagcagcggcgccagcctggtgatccccagcagcgcatcgctctcccgctgcctgacgctaatcgaaagcgtacagaaccaaaagttctcccgccatatcccggaagattttgccaccctgctgacctggagccagccgttaaagctgcgcggctaccagaagtgggatgccttctgcgaagcggtgcacaacgtgatgaccaataccctgcttccacccgacagcaaaggcgtgatggtggccctgcgcccggcgccggggctgcgcgttgagcaggcgctgacgttatgcaaacctaaccggatgggcgacatcatgaccatcggcaataaccggctggtgctgtttttgtcgttttgccggatcaatgacctcgataccgcgctaaaccacattttcccgctgccgaccggcgatattttttctaaccgtatggtgtggtttgaagacaagcaaatcctctcggaaatcgtaatcatgcgcggcgtcgagccggcgcgctggaacacgccgctgcctctctcggtcggtaaaaacgagaccattaacgccacccacgatggacgccactggcgacgctaccccgaaccacaccggttaaccacccgcgaggagcaagcctgatgatgtctctcgccgatattctgcaactggtggtgctctgcgccctgctgttttttccgctgggctacctgacgcgccactatcagcgccggatccgcacgacgttaagactgatgttctttaaaccccgttacgtgaaaccggcaggggtattacgccggggaacaacggttaagcaaggcaaagcgaacaaatgacaaataaaaaaacgaccgcggcaccgcttccgctctggcagtactggcgcggccttggcggctggaacttctactttctggtcaagtttgccctgctgtgggccgggtatctcaatttccatccgatgctgaacctggtatttctcgcctttctgctggtgccgatcccgcgcgaaaagctacaccgtatccgccactggatcgctattccgctgggattcgcgctgttctggcacgatacctggctgcccgggccagagtcgatttttagccaggggtcgcaaatcgccggcttcagcgccagctatatctgggatctgattgtccgctttatcaactggagcatggttggcgccttctttgttttactggtgctatggttgtttatcagccagtggctgcgcgtcaccgtgtttgtctcggcaatgatcgtctggctggcggtcagcccgctgctgccggcctttaccctatggcccgccggtcagcccaccacggccgccgccacgaccgcacaggccaataccggggccaacgccgccgctggcgccgcgtccagccccgccaacagcgatattccgccgcagaccgagccgccgacctcagccaacctgaccaactggctgaacgctttctatgccgccgagcagaagcgcaagacgccgttcccggaccagctgccggcggatgcgcagccgtttgacctgctggtgatcaacatctgctccctctcctggtcggatattgaagccgccggtctgatggatcatccgctatggaagcactttgatattgtcttcaaaaactttaactccgcgacctcctacagcggcccggcggcggtgcgcctgctgcgcgccagctgcggccagctgtcgcatactaacctgtatcagccgtccggcgccgactgctacctgtttgaaaacctggcgaagctcggcttcaaccagcagctgatgctcggccataacggtctgttcggcgacttcctgaaagagctgcgttcgctgggcggcatgcagagcccgctgatggaccagaccggtctgccggtcagcctgcaggcgtttgacggctccccggtgtatgaggatctggcggtcctcaaccgctggctgaagaccgaagaggccagcagcaatccgcggaacgccaccttctataacaccctgccgctgcatgacggcaaccacttcccgggacaaagcaaaaccgcagactacaaagtgcgggcgcagaagctgtttgatgacctggataacttcttcaccgagctggagaaatcggggcggaaagtgatggtggtggtggtgccggaacacggcggcgcgctgaagggcgataagatgcaggtatctggcctgcgcgatattccaagcccgtcgatcactaacgtcccgacggcggtgaaattcttcggcatgaaggcgccgcatgaaggggcgccgattatcatcgatcagcccagcagttatctggcggtgtcggagctggtggtgcgcgccctcgacggcaaaatgttcagcgaggacagcgtcaactggcagcagtatgtcgccaacctgccgcagagcgcggcggtgtccgagaacgccaacgccatcgtcatccagtatcagggcaagccttatgtccagctgaatggcggtagctgggtgccttatccgcaataagcgacaaggccgcctatgttggcggccttacatcgtgagacgttcccattccaccttctcagcccgcaggcatacgggcggggaaggcggcaaatcaatcaccgtatttagcgctgatcctgtttcgccagccagaccaacagcttgaggctggcagagtaataatcatccttgtcgtcaatctgcggcgcctcctgcggttcacccagcgtcagatcgcgcaccgccagcaggccgccggccatataccagggggccacctcgttggtgctgacgttgatccacgccggggtttgcaggcgcgggtaactctgcatccaggccttccagggcgcgagcaaggcgctgtgcggatcggcccacgagagatacagcgggatacggatcgcatcgaaactcatccgcggcggccactctttggctggcagcatcttgccatccgcccgcagcgccacccagtcgctgggtagatgtgatttcccccagcccatctgccccagcagcgcctgtccgtcgctctgcaatgtccgccaggcggtgagatgcgtccgctccgcgaaggcgcgccaggccgggaagatgaaataggaagggttaaggttcaggtgatcattgaggttgaaccctttcacgcccgggagcatcacctggcgaccggcgaaagtcaccaccgtagacttcagcagggcggcggtgatggcgtcagaggcaatcgcatagcgcttatcctgccactgcttttgcgcgcgcagcagcgcccaggcgatcagggtatcgccatcggaggcgttgtttttatcggcgatagggtccggcgccaccgggttatagcgccagtaaaacaacccgttagacttgttgcgcagggtgttgtccgtccactgccacagcttgtcgaacgccggacgatcgttattcgccaccgccaggagcatggcgaagccctgaccttccgtatgcgacacattgccattggcggtatcaatgatacgaccatccggcatcataaaacgggccttatagcgctcccaggccgtatccgcccacgccctgggcaccagcatcactaccgttgtcactatcaccgccactaaagcacgcaggggcataaattcactctttatggatggtagtagagaaactgaacgtcagagacggagaacacccgctcacgctgcagtatcacgtgggcactgcctccctgactctgcagccagcgagaatataacccctcgagtatggcacagaacgcgttgcaccagcgcacgcgccccgcttcgtcgcggctgaccggcaacgcctgatggcgcaggcgcaggccgtcctcaccgacatcgatggtcaccacgccccagtgaaaatgagtcagcagccggttgatattggcctccagatcccccaccgtctccgacgccggcagcggatgggtctccgccagcgaggcgcccatctgacgcaggaagggctggctttccagctcgccggcattatttagcataccttcgatcataataatcaacagatcgaaccatccggcaggcgtctgctgctgctgaaaccaggtcatcaccaccgggttattgttctccgtcatcatcaatgatctcctaacatatagcgaatatagagcccggcggtgctttcgttataatccccgaaggtgtcatagccaatctggccccccagggtcatttgtttgttgaccttgtaatccgccccggcgcgcagggtataccctatgccgctcttcgaggtcgcggagtagtaggcttccttggcaaacccattgctcaccgccgtctccagggtctgttgccactccgaattggtcgggaaataggcgctcttatcctgactgtaagactgatagcccaccgagccgccgagcttcatggtccagttatcatatttctccgtcagactgaccggcagcgatacgctgacgtagttttgcggactaaagtagcccccctgaccataggtgaagtagctgaggtttttggagtaatccatatagctcatgctcaacccggcctgcagctggcggtattcgtcatggtagggacgaagatagaccccggcattggcgttgatactggtgttgctggcgacgttctgccccagatagctgtatccaccgccgccgacatagaagcccgcgtcgccgtcgtcatagctcagctgcagggtgccgccgtttttcgtcacctgcccccaggttttcccggaataggcgtctttcagacccacgtaggaaagcaggctgtcggttagcgagcggcgttcgccggtgaggatcagcgacagatagttggtcagcttgggcgaccatttcaccccgccgactacggtattaagatcctggcccaacggcgtgctgccgatatcgacccggtaatcgtcaccgcttaacgccagcgccagttcgacgccgttggccttctgcgaatcggtcgagccgctggtctggtcaacgttcggcttgcggctggacgaagagagatagctggccacctgccccgcatcatagctcccgagcttcgccaggttttccatcccgctgctggtggtcggattgaaatctgccgcgttcagggtgccgaggccgcttaacgcctcggcccctggattgctggcgaaataggccgtccgctccgcctcggtcatcgaggcgatcgccgcctgctcgctggtggcggtactcaccatgttggagaccgcgttagccagcgggttggcgccgtagcgacgccaggcgtcgccgctggcggtcccggcgttcaacgacaccggggtgacggtaaagtcaaagcgcgagtcgccaaacggcgaggatgaccaggtcagcggcgtccggagctccgtcagcttgctggtgcccgattcgccgtcgcgtccacgcacgtccattcccccctgcagccagctgccggttttctcctgcagcgactccatcatggtgtccacctgacgcagcatccgcgtctgggcggtgtccaccggcagatcggtgcgctggatccccggcagcgtggaaccgggcgcggcggccgactgggcaacctgccacggcatgtactgcccgtaggcggaggccgtccgcgtcggcgccgacgtttgcgacacgccgataaaggggttatccgccgccagcaccccgccgacggtcggcgtttcgctactgttggtgctttgcatgcccagcagtttgccgcgggcgctgcgcagataggtcatcgcctgctgatgatgtccctgggcctccgccactctcgccagcagcagcaggcgatccggggagttatcctggcgcaaaccgccggccagctgttcagcgcgatcgttgttccccgccgacagcgccacgtcgatggccccggcgcgcgcatcctggttcggcgtatcgcgcgtcatcaggtagtcatagaccaccccggcctctttgttcattttgccgctctggtacagccgcgccatggcgaacatcagatcggtattttgcggatcgctttgcatagcgcggatcagcttgtcatacgccgcggcgtaattgccctgctcgcgcaggcggtcggcttcgttgatcacatagccattgcgaatgctcgccagctgcgtcggcgtactgctggcctgcagctgcggattgctgatcaggttctgcgcctcgccggtcagcccggcctgattcaggacggcgatctgatcggcgtaatccccggcattgccggatacgccgctgctgatattgttgcgcaccagcgagaccgcggtggtcaggtcgccgctctcggccagcagacgcgccagcttgccggcgtccgccggggcttttggcggcgtggaggccatcgcccgcagggtattgctggcggcgatggtattgccctgcgccaggtagttttcggccgtcaccaactgcaggttgtagttcacccgctggcgcaaatcgcgcatgtcgctggtctggctgccgccgggaatgcgcgccagcagcgtctgcgcctgctgccaggcgccgttttcgctggcaaacagggcggcggcatacagcgcactgttgctggcgccggggcgataggccgccgacatcagcgaagaggcctcgctgccgttacccgatttttgcagcagccgggccaggtcgaggcgcagccagggatcgtccggatagcgggcgacgccttcgcgcagggtggcaatggcgccggctgggttaccgctgctgacctgcgcctgggcctgacggcgcagggcatcgcccggcataccggccaccacccgcggctgcagtttttgccgcaggctctgcgggagcgtctgcagcatcgcctgcgcctcggcggatttattctgctcgcgcagcacgtaatagaggttttcccgcgccgccgcgttctgcggatcgtcatttaacagtgagcgcagcgtttgctccgcctggggcaaatctttgttgtgccgcagcacatcggcgcggaacagcttcgccgaggcgccctgcgccccgctctgctgcgccaacggcgcggagagcgccagcgcctggctgatattgccctgcttataggcctgctgggcctgcgccagctggccgtagaacagcgcatcggccgcctgctgacgacgggtcgccgaggcgtcgccgccgaggtccgcggcccggctcaaatactgcgacgcggcctggtagtcgccactgcgctgcgcgatatagcccatgcccgccagcgcatcggcatcctgggggttggtctgcaatacctcttcaaactgctgcttcgcggcggcggtattgccgctgttgagattggcgtagccctggccgcgcgcctgaccgctgcgccgttcgcgaaagtaattctgaacttcgctgtcctggggatgccgctgcatccaggtgtcgtaatactgctcatccccggcctgcgggcccagccagagcagcgcctggcgcaagccgctgtccgcctctttattgccgctggccatcggctcgagcagggcgatcccttcccggcgagtctcttcccgccaggttaatgctttgcccaacgccacccgcggggcgttctcctgcggatgctgcgccacgtactggcgcagctcgctgatagcctgcggatagagcgatttgtcgctggccatggtcaggtaatattctgccgccagcccggcaggcggcgtattgccattgaacatgctgcgccaggtcgccagcgccccggggatattgcctccgcgcgcctgctggcgggccaggctgagctggccctgcggcacctgcgacatctttttggcgttgtccagatcctgtagtcccgggctgtcaggggccgctttcgccagccgcgcgcgccactgcgccgccgcctgcatatcgccgccctgctgcgaccagagcgccatcagatacagcgcctgggtgttgttggcatccaccgagagcaccttctgcagggactccatcgccagctcgtcatgagatttctcatgccagtagttggcctgagcgaacaacgcctgtagcgccgcatcgttccccgccgccagcgcgccgcccgaggcagcgagagtcaacgcgccggtgaggcagaacgtggtgagccgacgggtgtttttcatcgttattattatttttcttttcattggttatcccccgaacccagacgcttacgggcgtgacgtttaaacatcgcggtcagcgccagtcccattatcgaggtggcaatcagccccagcaccgccaggaaacctgagtgctggctggcataccagaccgccatcatgtaccacggcatctgaccgctggggaacggcgtactcacctggaagctgcgcaccccgttatcgctggtgatcaccgcggtatcgccgcggatcccggcgttaatgcgcggcgattccagatcggtcttcagtcgcgccagctggtcatcattgctggccagcgccaccaccaccaggcgggtggaattccacggcgagcgatagctgatgaacccgcgccaggcgctgctcgacgaaaagtagcgatcggcgtcgaggctggcggaagtccagtcgccggtgagccggcgctggactttttgccacaagtctggctcgcggacgctcagcacattatctaccgggcggtagggtgagtcggccagcaggctctggttaaaggcctgctgatcgagagcggtgaccgccagcacgtcacgttcacgcagcgactgcaaatcccccccgccggtgggcatcccgggcacgacgcggttattcgccagcgcggtgccggtcgcgttcccggagcgtgccgccagattcagcagggtcgccacctgggtttcagacgggtccgccggcagcagaagggtcgtctgcgaatagtccgccagccgcgagaaggggaacgaggcgccgacaaagtaggagagattgggcaacagcgagaagtgacgcgtcttgctcaaatcgatccaggagtcgtcagtgatccggctcttgatattgttattcagcagcaccgaacacggaacatcgtcctttggcaccacattgaagtacatcgacagctggttatcgccgtaaatcaggtagggcgccagcgggatggtaaagcgctcctggcgcgcatcgcctccgaggtagcgccagactttctccagcggcccctgcttgttcatcggcaggttgttgaggaaggtgccgttgagcgtgacgctcagcaaggacttgtcctcattaatccagctttccgacgggaagcggtagccaacctgtagcggaatggtttccccatcccacagatagagatcgggcgcggcgcggaaggcgatacgtaaaggttcgtgccagacgccgctgacggtcgggctttgatccttacgcagcagctcgctgagcttgaccggacgatcggtggggatccagcgcggggcatcatatgctttgccaaccgggatggtctgcggttcgacatccagcgtcgcggtttgcggcgcaaagttgccgcgggttaaccgccaggcggccatgcgcagcgccgtatcgtttttaccgacaatcagcagcagtttataggccggattggcggggttggcgatgatgcgcagcagcggcttatcggtttccggcagcatcatgccgcccacctgctcccccggatggccaatcacgatgccgtggcgttccggcagacggtcgcgcagagcgctgaaggcaatgccgcgatagtccgcctggatacccagccaggaggagatcagcgccgcggcgctgaagacgtccgccgacggcttgtccccataggcgaccgcaatgtccgccggggtcatctgcatgctgtcaaagaagggccgcgggaagtggctcaggtcgtcgctgatgttcagctgctggctttcccagctgaaatgcgacgtgggcagcaccgtcacccgcgacgtatcatgaatgtcacgctggcactgcagggtatcgccatcgttgatcttcacgctcaggttattgctggagaccatcagcgcgggcggaatatccagctgataatgggagacatcctcgccatcggcgcccagcggcagcgtgccgagcggttgaccgttgagcatcagctgcagggtggcgttgcggctcgccatctccggcgatacgcgaacggcaaggctgagctgagaatggatcaccacctgatcggcaggcagggtaaagctgaccccaccctgtcgctggccgccgctgaggataatcccgtccggcatccccatctgcgccagattcagatcgcctccccagaccggagcgacaggaatgacctccggcgcggccgtgccgctcaccggcgggggtaagtccggcataaccggcgcaggggccgtcgccgccgcatcgccggcggtggcgggggctgccggagaggcgccctcctccagcgaggcagccggaggttcgtcgcctggctcgctgtccgccgcgtcgttgagctgcgggaagctcagcggggcagcggagccggagcccggttcttcactgtgtagcgcaggcgcagagagcatccctgccagcagcgccagcgtggttaatcgcttcataacgtcccatcctcctgcgccgttttcgccactgttgcccgattgcgctggctgcgacgggttttccacgtcagccagaacagttcgaacacgcagcgtaaaatggtgaagaaggagcggaacgggttatcctgcgggcgcggcggattaatccacgcatccgcgcgggccagcaccacgcgcaccagttcacggcggcgcgaaagcggaatatcttcatcaaacttgaggcgcaggaagcgctcgtcagaggtgaccagctgggccggaatcgagatagccccggactgcaggatcagctcaatctcttcgatgtcatcctccagatggcgattatcaggcgcgaccacgcggcagccgcccatcgacaggtccgcggtatggctgcgcgagacgatgccgctggcgtaatggatcaccaccggaatatcgacatcgatacgaatggtttttcgcacctgccgcgtttcgcgcgccacggcaatcgccgccagcaggaagatcagactgtagatcccccacccgacgttgagggcgataacgttgggatccgagccaaagtagtcatggccaatcgcccggacgatgccgaccaccacccccagggccagcaggcaggccaccaccaggtgcgggcgcaccacggtgaaatcgaagtagccgacgtcaagcagcccccccttatcggtaacgttgaacttgccgcgtttggggaaaatcatcgtcaccagagtcggcagcaccaggtggaaggccagcacaatatcgtagatctccccccagaagctgtagcgatagcggccgttcattcgcgaaccgacgtaaatagcgaggaacaggtgcggcagggcataggagacgatcaggctcgccgacgagtaaataatattgaggttaaacagcaggtaagccagcggggcagtgacaaacaccaccctgggcagcgcgaactggtagtagagcatggcgctgagatagcacaagcgctgctgaaaagtcagcccgcggccaaacagcggattatcgacgcggaaaatctgcgtcatcccgcgcgcccagcgggtacgctggatgacgtgcaccaccaggcgttcagtagcgagacctgcggccagtgggatatcgagaaaggccgacttccaccccagacgctgaaacttcagtgccgtatgagcatcttcggtcaccgtttcgacggcgaaaccgccgatctgcgccagcgcctcgcgacggatcaccgcgcaggagccgcagaaaaaggtggcgttccagttgtcgttcccctgctgaatcgggccatagaacaacatcccttcgttgggaatgttgcgtccgacggagaggttacgttcaaacgggtccggggaatagaagtagtgcggcgtctgcaccagagccagcatcgggtctttcaggaaaccgccgacggtggcctgcaggaagacgcgcgtggcgacgtggtcgcagtcgaaaacgcagataagctccccctgagtcagggtcagcgcatggttaaggttccccgctttggcgtgcttgttgtcattgcgggtgatatagcccacgccgacgtcggcggcgaagacggcaaactcgctgcgcttaccgtcatccagaagatagattttcattttatcttttggataatcaatgcattgtgccgccaggacggtatcgcgcaccacctccagcggttcgttatagctcggaatatagatatcgaccgtcggccacttactcatatcatccggcagcggaacaatgccgcgcttcagcggccagaccgtctgcagatagttaagcagtagcatcacccagatatagacttccgccagaaagagtcccatgccgagaatagcttcaatggacgagttgaagtgcagggtctgcgtgaggcgaaaatacatgtaacgggtggacatcagcagcgacgtgacgaccataatgaccgatacgctgcggcgcttgctgaagcccatcagaaagagaataccgatacttaacagaccaaaaatatactgcttttggctgtccatcggcgtgatcaccaccagcacggcgacgggtgacagcaccagcgccagcaaccaaaaaagagattttttcattcagcagccctgcaaaaagttaacgccctgacatgcgtggctggctgtgcaccgtgccatcgccaatatgaatacccaacagcgaagatatttttttagccatgatttcaatatcgaaggccgctgccgaggaagcgttaaagtccaggatcgacttctgcgaggcattggcctccaccacgctttcatcacgatggatcacgccaagcagtcgctcgcccagtttctcttccatcaggctggtgacgtcccggctgacctggcgacggctatcgctttggttaatgacgaaatagtgcccgtgcttatgattcagcgccgcgccggtcaggcgctgcttttctacgtgcgccagggtcgacatcgaggcggtatccgccagcagcgggataagatgcaggtccgccagccccgtcagcgcctttagcgcgggcgaaggtccagggggcatatcggcgatggtgataagcccgggataattaagcagcgcggacagaccgcgctggaggaaatggtcattatgggtcagttgctcatcaaacgcctgacgctgcgcctcgctcacttcgccatatggcaggacgaaaatattactgccggcgctcaacacgcactggctccagtcgtgcagctccagcgccttcgccacatagccccgctcatcgttcagcggtacgccaaaatgcaaacgcagcgcgttctggacatcaaaatccagcgccagaactttgctgcccgtccgcgccagcgaataggctaaattggccgccagggtcgttttccctacgccgcctttcggtgaacagacgcaaatcaacggcatgtcgcgatcctttccagaagtgatttcaaaggctggtctttatttttcgccaccggctccgcgcttttcgcggcgaacaggtgggcatagttctcggcggcgggcgcgggtcggggggccattctcggcggcggcgccatggccggttccgacgccggaattgaaggcgcaggggtcggcgcaggctcctgcctgaccggctccggtgcggctgcggcggtctccactaccggctgggaagtagcaggcgcggccgaagcggcagacacaacaggatcagaggttggcgccgctgctacggccgcctctacctggcggaacagatccgcgggcaccgactgcggcaacggcgcggagaccgagcctcccagcgccagagaagagggtttctcggcgccgggatttagctgattgaggatcgcccagtcgccgtgttcccgcgtggcggcttgcgaagaaagatcctgaaagttgaggttttgcgtccgcgttttttcttgaaagcgctgcagatcatcataatggttcattgataacctcatgattttaaaaatttcatattaagtttgttgttattttctgggtatattaaaaatatcgtgacgcttctgggatggcagataacgcgccgatggtgacgtaccaatacacacgattgacagggttataatagtttagaatttgattttcgggatgattccacggcagaagtatcgctacactaacatttcccttgcagaagggtagccccattttttaggtatgcgtacatccttaacttcccgcaatcaccacgcttcccagtcgtttttatataaaagtattaggtcatgatgaaatcatagcgtcagatcagcgaaagaataaacctgaaccattttaatttctctttaattctataaaaatggactgaaaggcttattttttcggataatctacgaagaatgctctgagagcgtgacataaactgcggcaatatgcgtaagcgccaggttttatccacggcgggagagaagctcccggccatgggaccgggagcgcgccatcaggcgtgggacttttgcggattctcatcctggtcgacggcaaagcaggccaccagctggccgccgtaatccttcagctgcggctggagctgagtgcaggggccaaagcgacggcgacagcgcgcgttaaaggcgcagcccggtggcggatttagcgggctcggcagttcgccggtcagcttgatccgctcgcgccggtcgtctgggttcagacgcggcgtcgccgacagcagcgcctgggtgtacggatgacgcggattgttgaagatctggtctttggtgcccttctccacgcagcggccgagatacatcaccatcacttcatcggcgatgtgctcgacgaccgacaggtcgtgggagataaacacgtaggacagccctaaatcctgctgcagatccatcatcaggttcagcacctgggcgcgtaccgaaacgtccagcgcggagaccggctcatcggcaatcaccacatctggatccagcattagcccgcgagcaatagcgatacgctgacgctgaccgccggagaacatatgcgggtagcgatcgtaatgctcggttttccggcccactttcgccatcatcgccagcgctttttcacgccgctgctctttgctcaggctgctgttaatcagcagcggctcctccagaatctgccccacttttttacgcgggttcagcgaaccataagggttctggaacacaatctggattttttgccgccgcagcttctgcgcctgcgggtcgtgcttaagcagatcctgcccctgataatagagctcgccgccggtggggatctcaatcatcgtcagcagacgaccgagggtcgatttgccgcagcccgactccccccctaccgccagcgttttaccgcgctcaagggtaaaggagacgccgtccagcgccttcaccagccgttccggggcgaataaccccttcttcaccggatagtgttttttcagatcaatggcctgcaacagcggttgtggcgtggcggccttttgcgtactcataatccaggcctcccggcatcatcgagtgggtagtgacatttagactggcggccgccggtcagatccgcgagcgccggctcttcgctacggcatttatccgtggcataggggcagcgcggattaagcaggcagccgttgggacggtcatatttccccggcaccacgcccggcagcgaggccagacgcgctttatcctgggcgaattccggcagcgcgcgcagcagcgcctgggtataaggatggcgcggcgcgcggaagatatctttcgcgtcaccggtctccaccacctgacccgcgtacataacgataattttatgcgcggcttccgccaccagcgccaggtcgtgggtgatcagcaccagcgccatattctcctgctgctgcagatccagcaggagctcaatgatttgcgcctgaatggtcacgtccagcgcggtggtcggttcatcggcaatcagtagttttggccgacaggcaatcgccatcgcgatcatcacgcgctggctcatgccgccggaaagctgatgcggatagacgtccagccgcgaggccggatcgggaatgcccaccaggttcagcaggtcgatggcccgctggcggcgggtttgcttattaccgccctgatggaccttaatcgcttccataatctggtagccgacggtgaagcacgggttgaggctggtcattggatcctggaagatcatcgccacttccgcccccaccagctggcgccgctctttttcagagatgcgctgcagatcgcggccgttaaattccagtttgtccgccatcacccggccgggatagtcaatcagccccataatcgccagcgagctgacggatttaccggagccggactccccgacgataccgaccacttcaccctgcttcacgctatagctgatgcggtctacggcgcggaacggcgcgttttcatcgccgaaatgcaccgataatttatctacattcaataacgccatctcgaacctcttactgcttcagtttgggatcgagcgcgtcacgcagaccgtcacccatcaggttaaatgccagcaccgtcagcaggatcgccacgcccgggaaggtgactacccaccaggcgctctgcgcgaactgcaacacgtcggaaagcatggtgccccactccggcgtcggcggctgcgcgcccatgccgaggaaccccagcgctgccatgtcgagaatggcgttggaaaagcccagcgacgcctgaacgatcagcggcgcgagacagttaggcagaatattaacgaacatctggcgcatcgcgccggcgcccgctacgcgggaggcggtcacgtagtcacggttgacctccaccagcaccgcggcgcgcgtgagacgcacatagtgcgggagcgccacgaaggttagcgccagcgaggcgttgacgatggagggcccgaagattgccaccagcaccagcgccagcagcagactcggcagcgccagcataatatcgacgacgcgcatgatgattgagtccaccactccgccgaaatagcccgccaccaggccgagcaccacgccgaggatcagcgacagaaccaccaccaggcagcccaccagcagcgacagtcgggcgccgtacatcaggcgcgacagaatatcgcggcccacgtcgtcggtgccgagcagatgcgccatgctgccgccgtcctgccagaacggcggcgccagcagcgaatcacggaactgatccgccgggttatagggggcgaggaagttggcgaataccgcgatgacgatcatcaccaccacgtataccagcccgacgactgcccctttgttgcgtttgaaatagtgccagaactcctgcagcggagtcatgggtaccggcgcagcgataactttattttcagtaacttgtgacatgatggccccttacttcttatgccggatacgcgggttcaccacgccgtacagcaggtcgaccagcaggttgacgaggataatcatcgtcgccaccagcagcaccccgccctgtaccaccggataatcgcgacgctgcagcgcgtcgatcagccagcgacctaaaccaggccatgagaaaatggtttccgtcaggatggcgcccgccagcagggtgcccacctgcagaccaatcaccgtgaccaccggcagcatcgcgttacgcagcgcgtggatcacgatcacccgcatccgggtcaggcctttggcgcgcgcggtacggatatagtcttcgccaagcacttccagcatcgacgaacgggtcatacgcacgatcaccgccagcgggatggtgccaagcacgatagcgggcaggatcatatgcattaaggcgtcaataaagtcgccctgctcgccccagatggcggtgtcgatcagcataaagccggtcagcggcagggtatcgtcaaggaacaccgtatcgctgatacgcccggagaccggcgtcaggtttagctgcaccgaaaccagcataatcagcatcatgccccaccagaagataggcattgagtagccggtcagcgccaggcccaccgcggtgtggtcaaagatggagccgcgttttaccgcagccagcacgcccaccggaatgccgacggcgacggcgaagatcatcgcgcagacgcccagctcaagggtggctttaaagcgtgggacaaactcctgccacacgggaatgcggcttttcagcgagatgcctaaatcgccgtgcagcacgccccagatatagtgggcatattgctgccacagcggcttatcaaggcccatttcggccagcagctgcgcgtgacgttcgggggaaataccacgttcgcccgccataatcatcaccggatcgccggggatcatatggacgaaggcaaaggtgagaagggtgataccgataaatgtcgggatgactagtcccagacgtcggagaataaactgcaacataacccggattctctctagtgacgccccgcctggcgacagggcgtctgtattgctcacaaaagcattccccggaatagcgggaatacgccccccgcctctcccacgcggggagagggggtcaggcatcgtgcttattattcgacagagacgttatcgaagtggtgtttgcccagcgggtccaccacatagcctttgacttctttacgcaccggctcatagacggtggagtgagcaatgatcagcgccggagcctggtcatgcatcactacctgagcctgtttgtacagttcaatacgcttgttgtggtcgtcggtagcgcgggccggctgaataagatcttcaaacggcttatagcaccagcgcgagtagttggagccgtctttcgccgcggcgcagctgaacagggtcgcgaagaagttatccggatccccgttgtcgccggtccagcccatcatcacgctctggtgctcgcccgctttcgcccgcttcagatactcgccccactcgtaggtgacgatcttggcctggacgccaatcttggcccagtcagcctgaatcatctccgccatgcggcgggcgttcgggttgtacggacgctgtaccggcatcgcccacagatcgatggtgaagcctttttccaggcccgcttctttcagcagctgcttcgccttctccggatcgtaggtgtagtccttaacgtcgtcgttatagccccacatggtcggcgggatcaggttcttcgccgcctggcctgcgccctggtaaaccgctttgatgatcgcttctttgttgaccgcgtaggtcagcgcctgacgtactttcacgtcgtccagcggtttcttctcggtgttaaaggagagataaccaacgttcagacccggctgttccagcagggtaatgttcttatcttccttcatgcgcgcgatgtccgccgggttcgggtacggcatcacctggcactcgtttttctgcagcttggcatagcgcacggaagcgtccggggtgatggagaagaccagacgatcgatcttcggcttggtaccccagtagcccgggaaggctttatacagaatgcgggaatctttctggtattgcagcagctggaatgggccggtaccgataggattgagatccactttttccggcgtgccggctttcagcatgttgtcagcatactctttcgaaagaatggaggcgaagtccatggccagatcagcgaggaacggcgcttccggacgggtcaggacgaactggacggtattatcgtccactttcttcacttcgctaatcaggtccggtaagcccatcccttcaaagtattcatagctgccgccagaaactttatggtacgggttattagtattcttctggcgatcgaaggagaacaccacgtcatcggcgttcaggtcacgggttggtttaaagtctttattatcctgccacttcacaccctgacggaggtggaaagtataggttttgccatccgcactgacttcccatttctcagcaagtcctggaataacttccgtcgtaccggttttaaattcgaccaggcggttatagatcggtacggagctggcatcataggtggtgccagaggtgaagagctgtgggttaaatccttccggcgagccttcagaacaataaaccagggttttcgcttgcacgctggcggcgacggtcatggcgaccaggctcagaccaagcttcagcatccctgatttcttcaaggaaatactcattattctgctccaaaattgtgatgttgtttgcatatatccgccggacctttatttattttttacccggtccggtcggtggtgcccgaaggcgtagagagagatggggattcctttcgcaaaaacgactgagttgcagtacggattctccatgaaatgcccctcatgccctacaatctgtcaacagaatggggaaacgtcaatacagccagccgggttttacatccagcgtgagaaacggcaggcaaagattaaaaaaacttcaggacgctattttcagcagagaaatttatgctactggcaattcagcagaataaagaccttattaatttgcaacacccagtgggaaacaatgccagcaaatgagaaaaatttcttgctgtgtgaccaatatgtgagcgattaatagcgtgaacgttaaaacgcacagcggaaaatgctgcattcagccataagcttcgcgaaaaaagatctgttcatcgataaaaaaatgcaatggaagatgtcacaaaatagcgaatagccggctgaaaacctgagtaaagacgtttattgtgattttggtggtatttttggccagtcgtgcactgatgatgcccggcggcgctgcgcttgcgcgggcctacgaaacgcgagtcgaacctcctgccaccggaggttctcatcctcgcaggctccagatgcaaaaaagcctgctcattgagcaggcttttcgaatttggtcggtgatagaggattcgaacctccgaccccttcgtcccgaacgaagtgcgctaccaggctgcgccaatcaccgaatgcggggcgcatcttactgctgggatgcctacccgtcaatgccttattttcaaaaaatcgctcaaccggcgagaaactcagcagcctgagcagcgaatcgccggttgctcaacgtttttagcggcagttgacctcaaacgttttgcgatactcggataccttacatgtcaccggctcgccgagataggttgcgcccgccggggtgaatgtaaactctcccagtagcatcgtcagctcccccagctccgggcaggattgctgatgacgcataatatccgggcgggtatcgttattcaccgcccgggcgatgtcgctgtatgccagcttgtcggcaaaggcattagcacaaaactgcagttcgctttgcgccatatgcgcggcctgccccttcagctcggcatgctgtgccagcagcagctggcgaacctcgccggcccggctgtagccaatcgccgtatagccggccttattgctgaggttgacgctggcgccagccgcaagcagcgcctcgacattggctttattattcattttgaccgccagcatcagcgggctgagatcgttggcggaaagctggtccacctttgcgccgcgctgcgccagcgccgcgatcaccgcaggcgccccctgccccgccgccacctgcagcgccgtgagtcctccacggttcggcttatccacttccaccccggaggccgacagcgccagcaccagatcgggatcatcccccgccgccgccagcatcagcggtgtggtgccggatttatccgccaggctggtgtccgccccggcgttggccaacgtcgtgatggtttccgccgatcgcgcgtgatcgacagcgaggaaaaaggccgattccccggacgcgttgacggccttcacgtccgcgccgtgcttgaggagcagcgccacgatctcgtcgacgttcttcttaaacgcgccgggcgccagttgtaacgccatgtcttcggtcatcagcgcgcgattgcccgtcgccagcgatttcgccgccgttgcgccaactatcttgtccagcgtactctcctcttcgacaggcgcatcgggctttttcatcgccagaatatgctgatagtcgtttctgacgtccccgccgtcggagatggcggacatcaatgccgtactcttgtcgatggaggtctgattccccgacgctcccgcctggagaagatcgccgataatcgcggtatcgctgccacgcgccgccgccagcatcagcgccgtgacgccctggcgcgtctggaggttcggcttcgcccgacgcttaagcagcaattccaccacatcgcgacgattttccgcagcagcgaccatcaggccgcttaagccggttttatcctgaccatccacatcaatgccgttatccagcatggctgcgatcgtcgctggcgcatcgtatttacaggccagcaggaactggctggtctcttcctcagactggcagcccgcgagcatcatcaggcacagtaggaccaacccctttatcaccttcatcctttctctccatgaaaagttcatgcacaggggaagcgaggaaacaggggtaatcaaagaagaagaggtcacctgccagacacgtccactgtgcgaaaaaaatccctcgcgcggcgtcagccggcgagggattagcttatcctgggctcaggaaaggaaaacagacccgagaatctgaaaactatcgggccttactttttccaccggcaccagttgttgttctcattgatcccgccatccggcgaggtatagccgaggcagcccataatggtgtcgtacagctcgacgtgacggcgcggcaccttcatcgcagcctgctgctgcagatgggcaaacgcggcggcgtgatcgggattttccaggtacttatccgacatccacaccatcatcggcacgcggaactgctccggcggcgccatcttgcgcggcgtaccgtgcaggtgttcacgctcgttaatcgactccccgtggtcggcggcatagaacacaatcgctttcttatcccgcagctggtcgaggacgctgacgataaagtgatcgacataggtcacgctattgtcgtaggaattgatcagttccgctttcgagcacttgttgtcgacgccgacgcactccggtttccactgggcgaagctgcgcgggtagcgttgggtgtagttaaagtgggagcctttggtgtggagaatgatcagatgcttaccggaggcgttgccctgcgccataccgcgcttcatctcatccaccagcagcatatcgtcaacgctcttaccgcggttgcgcggctcggcgccaatctgctcgcggtaggcgatattgttggccatcgtgttgctgtagaaccacatctcgctctgcatggcgtacagattgccgctgaagcccagctgatgcagcacggcaaagacattctgctctttgagcgtccgctgtgggttatcttccgccccgccctcgcgcacaaacatgcagcgtaacgacagtttggtagcggtatcgcacgagtaaccgcggaaggcgacgagattcttctctttctccagctctggcgtggtattgcggctatagccgaggatgcccatatggtcccagcgggtcgtttcgccaatgataaacaccacgtaggtatcatccagaccttccggcgcgacgtaggtgaacttcttcgccgggttaatcagcgatttgttgtctgaggattcatccacctgcgcccaggcgtacagtcccagcgccgacaaccagttcgacggcaggtaagagttggcgatcaccccgccatagctcggcatatccacttccgaatggcgctccacatcatgctggcgcagctctagcaggcggatgggtccccagacaattagtccggccagcaccacgatcagcacgtttttaacccgctggcccggggtacgcagctggcgcagcagcgtatggcggcagcggttgctccagatgaacagcaacggcggcgcgctcaccgccaccagccagaggatcaggtgccagccgatgacctctttcgacaggtcgatatcggtggtcatcaccgaagcgataatcccgtagccaatcaccacattgaggaacgtcatgtagtaactcgccgcggcggaaaacaggacaatcagcgtcgccagaatgcgccagatacggcggccgaacagcgacagaagacgtaacaggaagaaggtgacaaataccgtggcaaccagttcaacaacaccggaaagccctttccagaaagtgaactcttgagcataaccatcgaaacgccggaaaaaaacggcgacgttcataaaccagccgatgtacagcgccagccaaaaactaagcttctgctgcgtcatcgttctaatatatttcatgcaagcaaacctggaaaaagaagaataaaacaccgcctgacgctgtggcacgagtcagtaggctaatagggtgcgttagggttggttatcagaaacctctacaaaccgcgataagtagaccacagggaacgagaaaagtatcaggagggaatgtgatccagccaaacatttacaaaacatttggctggattggcactatttgcttagggaaataaccaggggcacgtttcacgctgcaggtttcaggcgtgcgcctcgttatataccgtgcttttcggctgacgaatggtggtggataacgccagcgagaggatcagcagggcgaagatcacgcagaaggtcacgtagaaaccgccgaacagcgaagcgatgagagagccgcagatgcagccgataccgaagcccagataaatcacgccatagtttttcgccagattgttcagaccaaagaactcactcaccagcgacgggaagacggtaatggtgccgccgaagttaaaggcgacgcaggcgatggcggcgaagaaggtcaaggcattcagcggggcgaacagcagcgcggccatccccaccagcgacacgacctgaccgatggtaatcacgcgaatgcgggagattttatcagacaggatacctaacaccaggcgaccgctgaggttcgcaatcgagataaccgttaccgcgttggccgccgtggcgacatccaggtggaccattccctgggcaatatccttcgctacgccaattacgtacagaccgctcatgcaggccgtcaggaacatcaccgccagcatccagtactgcggtttacgcatcgattcggcgagggtgaagtcgttttccacgacgccgttggccgcggtggctgccgagtgatttggcgcatctttcatcagggtcgcgccaaagacgatcatcaccagcacgatagcgccccagataacgaaggttttttccaggccaacggtggccagcaggtgggaatcaatgaatttgaaccccaggctgccgagaccataggagccaatggagaaggcggagatcagccctttacgttccgggaaccatttcacgcagttcgacagggtcagcaggtaaccggcgccgtccgccagccccaccagcacacccgcgctcagccacagcatcatcaggctgctggagtgcgcggtcaggaagaagcccaggccgagcaggatcccggaggccatggtgacgcgcttcacgccaaagcgctcctgcagcttgccggcgaccgacgaagagagcgccagcccgaggctcagcagaccaaaggaaaaagccacctgactgaccggctcgcccagtttgtcagacagcgaactgttaaacaggctccaggtataaaccgaaccgagagcgaattgggtgatgatggtgccgatcagtgtcagccagcgggtcgattgacggtttgcagcgttcatagcagttgtcctgataaattaactgccgccacaatagcgaaggcccctcatccagtgggggaaaaaggcatgaactgccatcagcggggaatgaaatgcattaatgttggaatgaatggcattgcataacattcattccgtaaattacaggcaaaaagttagtgtgcgctatctcacagaaatgcgccattgctgagatttaacaataaccacatcgtttcaaatgcgtaacaattcccgattaaaaattggcgctgacccccatcaaatagagcgtattttcccctgacggcaggttatccgcctgcgacagcgttgcccatgccgccacgtgggatcccaaccgcatatcagcgcccagggtgacatcgctccagcctccctccctggcacgggtcatcggcgcccagacatcgctggcgagcgactggttatagctcacctgcgcccagggatgcacgccccacagcgcctgataatccatgcgccagccgagcgtgttaacgtagcccgcctcgcctgcgcttctcaccgtcggcgcggtgacgtcgctgcgcaggctggccaccggcccggaggttacgccgtttgccagcggataattccagccaacgctcaggccgcggccgctttccggcggcgccagcccctggtttaacgccagcccgccgggcgtctcagaggacttcatccgctcggcgagaatatcttcataacgtggttggtgatcgctatcccatgtatagcgttccgacgtattactttttgtatcgatagcgatatattcctgttgccaggcattcgctccagagacacatgacacccagacggatacgctcgccgggatcaagaacccccggaggccattgcatttctttattatcattaatgcgactccagaaaagagccgaatcggcaatattgctgtgtttttagtggggatacgatttccctgtattaactattatctttatctttcagccgtcaaggcgggcgtccacttttttagcgcagagggagaaacagctatgcagcgttgcggatgggtgagtcaggatccgttatacatcgagtatcacgataccgaatggggtgtggcgcaaaaagagggtcgccagctgtttgaaatgatctgccttgagggccagcaggccggtttatcgtggatcacggtgttaaaaaaacggcagaactaccgccaggcttttcaccagttcgatccggtgcgcgtggcggcgatgggtgatgacgatatcgagcgactcctgcaggataccggcatcattcgccatcggggaaaaatccaggccattatcggcaacgcccgcgcctatctggcgatggaagaaaatggcgagtcgttcactgattttgtctggtccttcgtcgacaatgcgccacaggtgacccgcgctgcgacgctggcggaaattcccgccacgacgccggcctccgatgcgctgtcgaaggcattgaaaaaacgcggctttaagtttgtcggctcgacaatctgttattcctttatgcaggcctgtgggctggtcaacgaccatgtcaccggctgcttctgtcaccctggaggtcaggatgatccgcaagtgggacactaaagataccgcgccgctgctggcgctgtggctggacagcacgattcatgcccatccttttatcagcgaaagctactggcgcgacagcgtcgcggtagtacgggatgtctatcttcccgccgccagcacttgggtctgggagcaggatggcgagttaaaaggctttgtcagcgtgctggactcccgtttcgtcggcgcgctgtttgtcgcgccgggcgccacccgccagggcattggccgggcgctgctggatgaagtcaaacagcactacgcctggctgagccttgaggtttatcagaagaacgaatcggcggtcagtttctaccatgcgcagggcttccggattgaagactgcgcatggcaggacgatactcagcacccgacgtggattatgcgttggccggcggatcaaatgccgtaagcggcagcgccgggccggtatatttctccagccacgccagggcggtgttcccggcacagccgttgcccagccgggatgtcggaatatctttggttaagacgttcaccgccccgtttttgcagatgccgacctgcggatccaggtcgggccacgctccttcatgcaggcaaatcacccccgggcggatcccctccgtcaccacggcgccggccagcacctgaccgcgggcgttccatacccgcaccagatcgccatcgacaatcccgcgcgcctgcgcatcctgcggatgaatagtcaccggttcgcgcccggcgacggcatagcgctcgcgcagcgcggtgtggttcagttgactgtgcagacggtgggccggatgggccgacagcagctgcagctgccccgcctctgcgttgccatgccactcgtcgggctccagccacatcggatgcggcggacagtcggcgtaaccaaaagcggcgatggtcggcgagtggatctctattttaccgctcgccgttttcagcgggttggcctggggatcggcgcggaaggcggcgaaacgcgcaaaacgggcattctccggctcctccggcatctcaatcagctggttagcctgccagaattcggcaaatggcggcagcgtcacctgctgctgggcgccgcgccgggcggccatctgatagaaagtctccagccactgcaaatcactcttcccttcggtgaagcgttcgcggccacccgccccccagcgttcgctgaggtcggcaaagaccgcgaaatcgtcacgcgcttcatctcgcggggcaaccacctgcttcatcggcaccagatgctggttactgtagtccccggtcatggtcagatcgttgcgctcaaacgaggtggtcgccggcaggacgatatcggcatggcgcgcggcggcggtccagaagcattcggaaataacgataagctccggtttctgccacgcctgaatcagtcggttggtgtcctgatgatgagtaaagttggcgccgccggcccaccagataaagcgaatatcgggaaagcgccgcgccatgccgttgtgctgatactccgcccccggattctccagcgcctcgacaattcgtgcgaccgggatcttctccaccgcgtccacgcctccggccacgctcccctgcatcgagcccagcaccgccgcgcggcgggtcgggttgccgccgttggcaaaatggtaggaaagaccaaatccgccaccgggggtgccgatctgtcccagcatggcggccagagtgaccagcatccagtgtttctgctcgccatactgctgacgctgcatgccccagccggccatcagcatagtggtattttcgtggaaaagttgcgccagttcgcggattttatctgctttaacgccgcagatcgctgctgcccactcagcggttttcgctacgccgtcgctttcgccggtcagatagcgggcaaaaatatcgtagccgctggtgcagcgggtaagaaacgcatcatcctgccagtcattttccaccagcgtatgggcgatccccagcatcagcgcgacgtcggtgcccatatgcggcgcgatccactccatcgaatcgccaaagaaatcgacggtttccgatcgcatcggatcgatgcagatcagccgcttaacgctctggcgcagccgatcaaaccaccggatcccttgctcgtcggaggcattccaggcaattttcagcgtgttcagcgggttggcgctccacagcaccaccacttcgctgtgctcgagcaccaacggccaactggtctgctgctgatacacctcattgccgccaacgacgtaaggcatgatcgcctgcgccgcgccggtggagtaatcgccaagatggccggtatagccgcccgccaggctcatatagcgctgcagcagcgtcgccgccttatgcaatacgccgttagagcgccagccgtaggagccggcaaaaatggaggccggaccgtagctgtcgcggatccgccgatgctgggcatcgatcagatccagcgcctgctcccagctcacccgcacgaattcatcctgaccgcggaccccctggggcttgtccggtgaagcaaggaagcctttacgcaccattggatagcgcacgcgggttttgctgtgcacctgatcgcgcactgccgtttgcagcgagttggcaaacggtgtcgccagcgcgccgcgggaagagaggacgttttccccgtccgtttccaccagcatcggtccccagtgggcggcggttaagatggttttggttgcagatgaggttggcaagggcggctcctggtcagcgaatgcaggtgtcatgacggcgtgatgggcaaccgttcaatgttatttacaaaaagagatggtatccggggaattttctccgtaatcgcgcgtcataatcaaccgtcacgttcgctgtgacaaagaataaaaaggattaaggacattaaatgaaaaaacgcgtacttatgattgcggcgctggtcagcggcactctggccatttctggctgcaccaccaacccctataccggtgaacgtgaagcaggcaaatccggtattggcgcaggtattggctccttagtgggcgctggcgtcggcgcgctctcctcttccaaacatgaccgcggcaaaggcgcgctgattggcgcagcggccggcgcggcgctcggcggcggcattggttactacatggacgtgcaggaagcgaagctgcgcgacaaaatgcagggaaccggggtcagcgtgacgcgaaatggcgacaatatcgtgctgaacatgccgaataacgtcaccttcgacagcaatagcgccaacctgaagccggccggcgccaacaccctgaccggcgtggccatggtgctgaaagagtatgagaaaaccgccgttaacgtggtcggctacaccgacagcaccggcagcaaggatctgaatatgcgtctgtcgcaacagcgtgcggacagcgtcgccagcgcgctcatcacccagggcgtggcggccaatcgcattcgcaccaccggcatgggcccggcaaacccgatcgccagcaacagcacggcggaaggcaaagcgcagaaccgtcgcgtggaaatcaccctcagcccgctgcagtaagcgcaacctcatgtcgcccggcagccgttctgccgggcaaaatgcttgatatcgctatttttcgcgctaaggtgttggcagattttcagcaaaggaagccaccatggcgaaagcggcgcgtgcaactatcagcgatgtggcgaaagccgcaaagaccggcaaaaccagcatttcacgttatcttaacggcgagaagcatctgctttccgacgacctgttatcacgtattgaaaaagccattgccgaactcgactaccgccccagcctgatggcccgcggcctcaagcacggccgaacccgcctcatcggcctgatcatcgccgatatcaccaatccctactcggtcaacgtcatgagcggcattgaagcagcctgccgggaaaagggcttcaccctgctggtgtgtaataccaataacgagctcgatcaggagctgcactacctggacctgctgcgcagctaccaggtggaaggcatcgtggtcaacgcagtcggtatgcgggaggatggcctgaaccgcctgcagcagtcggccctgccgatggtgctgattgaccgtaaaatccccgacttcgcctgcgatgtggtcgggcttgataacgcccaggccgccaccaccgccaccgaacatctggtggaaaaaggattcgaggccatcctgtttctcagcgaaccgctgggctcggtgaatacccgtcgcgagcgcctgagcgcctttcgcgccacgcttgcccgccaccacggcgtggtggccgaaaacgccgaggtgcagcttaacgacggcgcgatgctggacaacgtcctgcgtcagttccatgcccgccaccgcgggatgcgcaaagcggtcatctccgccaacggcgcgctgacgctgcaggtagcccgcgccctaaagcgcgtcggcctgatctgggggagcgatatcggcctgctgggcttcgacgaactggagtgggcggagctggccggcgtcggtattaccaccctcaaacagccgacgtggcagatcggctacgcggcggtcgaacaggttattcggcgcattgccggcactaacgaccccatccgcgaacgggtattttccggcgagcttatcgtccgcggatcaacctcccgttaacgatccttcgtgatgccgatcataaattaaacatctcgccctttcttatggaaccgataccatctagcgtattaaggagattaagcaacaaacgccgggagtaagagcgcgatggccagaaaaattattgtcgttaccgctgcgtatggtaatgaccatgttaaatccttaggcgggcaggccgccgtcctgccgtttatcgccaacgccggcgcggacggcgtcgaaatccgccgcgagctgtgcagcgcggaagaactcaacgctctgccctcgctggcggccaccattgagcgccacggcctgctggcctgctactccgcgccgcaggcgctgttcaccgacaacggcgagcttaacccggatctcccgacgctgctcgcggaagcgcaaaccctgaacgctctgtggctgaagctctcccttggccatttcctccacaatcagcagttggatgagctgcgcgatatcctcagcgacagcggcatggcgttggtggtagagaatgaccagaccgactgcggccagctggcgccgatgcagcgcttcaaagccgcctgccgggtccatcagctgccgatcaccttaacgtttgatatgggcaactggctgtgggttggcgattcgccggaagaggcggcacgtcatcttgcgccggcagtcagctatattcatgttaaagcggcggagcctcatcatgagaaattccgcgctgtaccgccggatcaggccgccgaacgctggctggccctgctcgataatcttcccgccgacgcgccgcgtggaatcgagtttccgctgactggccatgacctgacggccgtgacccgccgctacgtcaacctgttacgcgaggattaagtcgtggaaaatttagatgtcatcaccatcggcgaagctatggccatgtttgtcgccaccgaaaccggggatctggccgaggtggagcatttcatgaaacgtgtcgccggcgccgagctgaacgtcgccaccggcctggcgcgcctgggtctgaaagtcggctgggtgagccgcgtcggcaacgacagctttggccgcttcgtactgcaatcgctggcgaaagaggggatcgatagccacgctgtggccatcgacaaccgcttcgctaccggtttccagatgaaatcgaaagtcgaaaatggaaccgatcccattgtggagtatttccgcaaaggatccgcagccagccatctttcgccggacgattttcgcgccgactacttcaccagcgcccgccatctgcacctaagcggcgtcgcggcggccctttctgagagctcttacgcgttgctggagcatgcggcgaaggtaatgaaagccgaaggaaaaaccctctctttcgaccccaatctgcgcccggtactgtggaaaagcgaagccgagatggtggagaaactcaaccgtctcgccttccaggctgactgggttttgccaggcttgaaagagggcgtgattcttaccggccagcagaccccggaagggattgccgatttctatctctcccgcggcgtcaaggcggtagtcattaaaaccggctgcgacggcgcctggttcaagagcgccagcggcgaacagggaacggtcgatgccattaaagtcgataacgtcgtcgataccgtcggcgccggcgacggctttgccgtcggggtgattagcgccctgctggaaggcaaaaccctgcttcaggcggtgaaccgcggcaataaaatcggttcgctggcgattcaggtccagggcgacagcgaggggctgcccactcgcgacgcgctgggcgagtaacttttctacgcaacgataacagccgtcctgtaccctacctgcagcgcggcacagcagcgtccgtttcgacggacgtatgtctcctcattgacagaggcaagcctatgaatagctcaacaaatgcaacgaaacgctggtggtacatcatgcctatcgtgtttatcacgtatagcctggcgtacctcgaccgcgccaacttcagcttcgcttccgcggcaggcattaccgaagacttgggcatcaccaaggggatctcctccctgctgggggcgctgttcttcctcggctacttcttcttccagatccccggcgctatctatgcggagcgccgcagcgttcgcaaactgatctttatctgcctgatcctgtggggcggttgcgcctccctgaccggtattgtgcataatatcccggcgctggcggcgatccgctttatcctcggcgtcgtcgaagccgcggtgatgccggcgatgcttatctatatcagcaactggttcaccaaatcagagcgctctcgcgccaacaccttcctgatcctcggtaacccggtgacggtcctgtggatgtcggtagtctccggctacctgattcaggccttcggctggcgggaaatgttcatcatcgaaggggtgccggcggtgatctgggccttctgctggtgggtgctggtgaaagataagccgtcgcaggtgtcctggctggcgcagagtgaaaaagcggcgctgcaggaacaactggatcgtgaacagcaaggcatcaaagcggtgcgtaactatggcgaagccttccgctcccgcaacgtgatcctgctctgcgcgcagtattttgcctggagtatcggcgtatacggctttgtactgtggctgccgtcgattatccgcagcggcggtgaaaatatggggatggtggaagtgggctggctctcttctgtcccgtacctggcggccaccatcgccatgatcgtcgtctcctgggcctcggataaactgcaaaaccgtaagctgttcgtctggccgctgctgctgattggcggactggccttcatcggctcctgggcggtcggcgccaaccacttctgggtctcctacaccctgctggtggtggccggggcggcaatgtatgcgccttacggccccttcttcgccattattccggaaatgctgccgcgcaacgtcgccgggggcgccatggcgctgatcaacagcatgggcgccctgggctccttctgcggctcgtggtttgtcggctacctgaacggcgccaccggcagccccgcagcgtcctatatttttatgggggtagcgcttttcgcctcagtatggctgactttgattgttaagcctgctaataatcaaaaccttccacttggcgctcatcacgcctgaacgactcatactacggagattcgcatgaagccgtctgtcattctctataaaacgcttcccgacgacctgctacagcgtctggaggagcacttttccgtcacacaggtgaaaaacctgcggccggagaccgtttcgcagcacgctgaggccttcgcccaggctgaaggcctgctgggctccagcgaaaaggttgacgccgcgctgctggagaagatgccgaagctgcgtgcgacctccaccgtttccgttggctatgacaacttcgacgtcgaggcgctgaacgcccgccgggtgctgctgatgcataccccgaccgtgctgaccgagaccgtcgccgatacggtcatggcgctggtgctgagtaccgcgcgtcgggtagtggaagtggcggagcgcgtcaaagcgggtgaatggacgaagagcattggtccggactggttcggcacggatgttcaccataaaaccttaggcatcgtcggcatgggccgcatcggtatggcgctggcgcagcgcgcccacttcgggttcggcatgccgatcctgtataacgcgcgtcgccagcatccgcaggcggaagaacgcttcaatgcccgctattgcgatctcgataccctgctgcaggaggctgactttgtctgcctgatcctgcccctgagcgaagagactcaccatctgttcggtcaggcgcagtttgccaaaatgaaatcttccgccatcttcattaacgccgggcgtggcccggtagtggacgagcaggcgctgatcgccgccctgcagaacggtgagatccacgctgccggtctcgatgtgttcgaacacgaaccgctggccaaggactcaccgctgctgagcctgccgaacgtcgtcgcgctgccgcatatcggctccgccacccatgagacgcgctacaatatggcggcctgtgcggtggacaacctgatcgacgccctgaacggcaacgtagagaaaaactgcgtcaatccgcaggtaaaataagccataaaaaaacccgggtaacggcggcaaccgccctccccgggttctttttgcatcctgtccatcatcctgcccgttcgccgcagccaacgtcagccagatgaagcattaacgggtggcgttcaccgccgccgtccatgcctgattaaacgcctgatgctgcgccgccagcggcccaatcagcgcattgtactggctggcctgctgggaggttgggaactgaatgccgttggcgacaaagctcacctgcgtcccctgctgagcgacaaaatccccaacctgaaccagctgctgggtaaagatctgcgcggccgggatcagcggctgcagcgcgtcggctggcgccgtcaccaccttggcgtaaacctgatcgaagaccggcttgagatcgtcagcctgcttcagcgcgccatgcgcggcatcggcctgcattttcgcattctgcagctgctggcttagcacgcccagcgcgccgttcgcctgacgcagcggctcacgctgggtcatataatcctgcgggacgcggatcgcattgacgctgtccactaccgggcgcagaccagcgtccatcgcctggctcacctgctgcgagtaaccgtagatcaccgcgtagtcagagacaaaaggcccaaactgttttttctgatcggcggtcagcgtcggcagacgttcaccgctacgcatcgccgtattctgcaggaagtcgataaacgctttgcgctgatcgccctctttatcaaaacacccactcaggctaaccaccatcaataaggccgccatagccgcaaaccagcgagagcaggactttcctgtcgccatttttttactcctttcagccaaaaaaagcgcacaacggcacacacgtgccagacgctgacaaggatagtccagctcggcctcgcaggataccctttcctgctaatcttacgcgggaaaaacaccattttgcacgccatcgtcgcgctgtagaacgtctgttatgcgcatcacaaatatggtcttaagaacaggtgggccagaatctcataagccattgatattaatataaataaaaagccacaacccggcactgcgccttaaagcggacgataatcgcacgctttggcacgcgtctggattgcctgcctcgcatttcaatgatttgatgaatgagcgattaacggcgacatgttcgattatcgcacaaatcaaactcaacgacgcgaaggcgacgataataataaacctctgtccctcgctcagtctgccaggaaagccgtatgactaagacaaccatcgacattcaggcctttatcaacgagcaccccttcacccgctaccagtggatgattcttgcgctctgctttatcaccgtcgcgatggacgggttcgataccgcaattatcgggttcatcgcctccgacctggtgcaagagtggggcgtggaaaaatcggccctcggcccggtgatgagcgccgcgctggtgggcctggcggtcggcgccttaaccgcagggccgctggctgaccgcatcggccgcaaaaaagtgctgatcatgtcgatcgtggtgttcggcggattcagcctgctcaccgccttcgccaccagccttaatcagctgacgctgctgcgcttcctgaccggtctgggccttggcgcggcgatgccgaatgccgcgacgctaatgagtgaatatgcgccggagcgccgtcgggcgctgctggtgaacctgatgtttgtcggctttccgatgggatcttcgctgggcggctttttatccgcctggatgatcccgcactatggctggcagagcgtgctggtgctgggcggcgtgatgcccctcctgctggcggtggcattaatattcctgctgccagagtccgtccgctatctggtagtgaagcagcacccggcgcagcgcattgctgctattctgcgccatatcgcgccgctgccgaagacaggggaatttgtactacgcgaagcaggccaggtgaaagagaaatccgcgatcggcgtcattttctctcctcgctacgcggtgggtaccgtgatgctgtgcctgacctactttatgggtctgctgattttctatctgctgaccagctggctgccgctgctcatccgtgaaaccggcgcctcgatgagtcaggcctcaattatcaccgccctgttcccgctcggcggcgggattggcgtgctgatcctcggcgccctgatggacaagatcaaccccaataaagtggtggccgtcggctggctgctgaccggcgtttttgtctgcctggtggggttctccaccagcagcctggcgctaatgggagtgatggtctttatcgccggcagcattatgaacggcgcccagtcgtcgatgccggcgctggcggctggcttctatccgacgcaggggcgcgccaccggcgtcgcctggatgctgggtatcggccgcttcggcggcatcctcggcgcgttcagcggcgccttcctgatgcaggctcagctctcctttgagaccattttcaccctgctggccatcccggcgttcctgtcagccattgcgctgctgatcaagtaccgggtcagtaaatccgtgccggcgacgacagatgaggcgagaagcctgcagaaagcctaaccctataagccggcgccccgcgccggctttgccgcttttttcttatccgtttacaaaaattttcgaagccacctcatcgcgttaataatcattcttttaggctacgctgccgtttggctgtcggggcagattcgatagcctgttggcaaataatcaccgacgttaccatcccttgcgccattttctgactattcttaatgagctatagaaaaatcttttccgctgtgtgataaaaggagttctcaatggaatataaagatcccgtgtttgaactgctgagcagcctggaacacatcgtttttaaggatgataatcagaaacttacctcaaaccgtaagtccactgtatttagtgaatttgaacagctgcgtaaaggcactggacttaagattgacgactttgccaacgtcatgggcgtgagcgtcgccatggtaagagagtgggagtcgagacgggtcagaccgtctcccaccgagctgaaattgatgcgcctgattcaggccaatccacagctttcacgacaattactcgattaatctcgcgcgcagcggcaaaggccagtaagggagcttttgccgctgcaccgtaaaaaaaagtttgctatcaggtgctgaacgtgcgttaatgctcgcaggtttgatgtacagaccacagagcagtcgaatagagcagtccttctaaggttatccaaagatacccccgtagtgaactttccctttatcgctttaaatctgtagtccagacccctacgccgcaaggctcacttatttttttaaaggtaattcactatgtccggtaaaatgactggtatcgtaaaatggttcaacgctgacaaaggcttcggcttcatcactcctgacgatggctctaaagacgtgttcgtacacttctctgctatccagaacgatggctacaaatccctggacgaaggtcagaaagtatccttcaccatcgaaagcggcgctaaaggcccagcagctggcaacgtaacttctctgtaagttcaagccgctaagaatcgagaatccctgcctgatggcggggattttttttatctgtcgccagtagccgccagcataagatggcggctaccgggcattcaaagcagggaaaagtgccagctcgtctcccgccacgccagactatgggtcagcttcagaccttgtaaaaacgcctcatcatgcgacaccaccagcatcgcgccgggaaacgccgccagcgcgctttcaatagcctgcgtcgatgctaaatcgagatggttggtcggctcatccaacaaaagcagctgggcaggctcgcgtcgccagagcacgcacgccagcgccgctttcaggcgctcgccgccgctgagcgccgacagcggcagagtgaccttatccgcgcccagctggagctgcgccaggcgggtgcgcaggaggccctcatccagtggggtatcttccaggctcaggtgcgccattaccgacagggataaatccagctgcgtcagatgttgatcgaggtaagcggcgctcaccgaaagccggacatcgcctgacgcggcctgctccagccccaacagcgttttcagcaaagtggttttgccacagccgtttggcccctttagcgcgatgcgcatcgggccatcgatacgccagttcagcggcgcagccggcgcatggtcgagctgtaatgactccaccaccagcacctgcttgccggcggccacttcgctacccggcagggtaaacatcactggggtctcttcctcaacccgctcccgcgcctgctgcacggcggcattcagactgctgttctgttcacgatgctgacggcgcagcgttcccgggcgctcttttgccgcgcctttgtacttcacgcgttcgaaggaggcgatatttagcgtatcaacggtacgcagcgtctgagccgagcgccgctgggcggcgtcatgctccttatgcattcgcgcgcgggtgcgccgtcggtcggtcacggcatgctccagcgccgcgcgcgcggcctgctgctccgccatacgctggcgctgatattcatcatagttgccgccgtagctgcgcagcgccgtcggcgtcagctcaattatcctcggcatccgcgtcagcagctcgcggtcgtggctggcgatcagagccccgccctgccagctttccagttggtgatagagccactcccgcccctggcggtccagatggttggtaggctcatccagcagcagataatcggcgcccgagacgaaggcgccgcacagcagagccttcatccgctcgccgccgctgagtgaaaatgcggggcgatcggcagagaacggcgggagatcggcttcacggaacgctaaactcaggcgatcggtgagatcccagtgaccatctaacagatcgaaatcgtcggccagcccttggccctgttcaaggcgagacaaggcggcaaaaaccgacgcatagcccagcagcgtagcgagggtggtctccggcgtgagcgtcggctgctgcgctacccaggcaacggcggcggcgcgctcaatatggccgccggcaggagaatcaaggcccgccagcagacgcagcagacgcgtcttgccgacgccgttccggccgaccaggccgcaaagggacggttccagcgagacgctgagcggaccaaacagggtctgtcccgtcgcaaactgacaggtgacctgatgtaaaacaaaagcggggatgcgggcgcaatgagccataagcactcctgaatgaaatcaatactcccctacccgcaaggtatgcgaggtaaggcgtgaaattcatcagtcgtgtttgttcatttgtggggcgcgctccggtgagacgagggattcgtcgggacataggatagccacactccggtatgcgttgcaagcctgttttattcaacgatcttgtaaaaataaaaaggcctcctgatatcaggaggcaaatgatttatttggtgaacaatgaaagggtgcattgagaatgcctgacaccgcaagcatggtggggatagatccccaccagatgctcttactgtttaatatcacaggctaagaatgccaccagctcaatatttccctgcctgcgctgtaattcacatagcgaatcacgaaccatccaggtcaataataaaatagtgaagcaaatcactactaagccaaacaacagatacttttgcggcattcctcgcctccagtgttgattttcaacaagtaagaggctactcttatggtgttcatgcataggggagcctcactttgattactatcaggtggggcttttctctgtctgtctcccgctgaatacctgagacacacagtctcaagcacccgccgccattctagcgtaaatacctctcagaattatgtttatatattcctaaaacgtttcttctcgatgaatgaaaataatgaagatatcaatgacagaattattaatggttcatctatttatatttcacgtataaaaaaacctgccctgaggcaggtctttattattaccgatacgcttactgcagcagagaaatatccgccacttgcaggaacagttcacgcagtttggacagcagcgtcagacggttgatgcgaacatctttgtcttcagcgttaaccatcacgttctcgaagaactcatccaccggctcgcgcagcgcggccagctcgatcagcgcatcctgataacggcctgcggcgaaatacggctgcagcttgtcgcgcagcaccaccagattacccgccagcttaatttccgccgcttctttcagcaccgaagcgtgaacgatgtcgttcagcgtctcatcggatttcgcgaggatgttagagacacgtttgtttgccgccgccagcgcggaggactcttccagagtacggaagtgcgataccgccttcatacgcgcatcgaaatccgccgggcgggttggacgacgcgccagtaccgcctggatcgtgtcgacgccgtagccttcgtcctgataccaggcacggaagcggcccagcataaagtcgatcacatcatcaaccacgttggcgttggtcagcttctcaccgtacagacgaaccgcttcttcggtcagcgtctgcagatcgagatccaggttcttctcaacgatgatacgcagcacgcccagcgcggcgcgacgcagcgcaaacgggtctttatcgcctttcggatgctgaccgataccaaagatacccgccagggtgtccatcttatcggcaatcgctaccgcgcaggccaccggattagatggcagcgcgtcgccagcaaatcgcggctgatactgctcgttcagcgccacggccacgtcttccgcttcgccgtcatggcgcgcgtagtgcatccccatcacgccctgggtgtcggtgaactcgaagaccatgttggtcatcaggtcgcacttggacagcaggcccgcgcgggttgcgtggttcacgtcagcgccaatcttttcggcaatccaacccgccagcgcctggatgcgatcggtcttgtcgcgcagagtcccaagttgctgttggaacagcacggtttccagacgcggcaggttatcttccagacgttttttacggtcggtattgaagaagaactcggcatcggccagacgcggacggaccaccttctcgttaccggagatgatctgctgcggatctttggactcgatgttggccacgaagataaagttcggcagcagtttgccggcgttgtcgtagaccgggaagtacttctggtcgcccttcatggtgtaaaccagcgcttcagacggcaccgcgaggaatttttcttcgaacttcgccgtcagcaccaccggccattccaccagcgaggtgacctcttccagcaggctttcgctcagatcggcttgaccgccaatcttacgcgccgcctcttgcgcatcagctttgattttggctttacgctgttcgtaatcggcgatgactttaccgcgctccagcaggatctgcgggtactggtcggcatggtcgatggtgaactccggctcgcccataaagcgatggccgcgaatcacgcgatcggacggaataccgaggatagtggccgggatcactttgtcacccagcagcaaagtcaccgtgtgtaccggacgcacgaagtggacgtcagacgcgccccagcgcatcagtttcgggatcggtagcttcgccagcgagctggcaatcatgttcggcagcagcgcttcggtgctttcgcccttcacatgggcgcgatacagcaaccactcgcctttgtccgtggtcagacgttcggcctgatcgacggtgataccgcagccgcgcgcccagccttcggccgctttgcttggcttgccttcggcatcgaacgcctgggcaatagccgggccgcgtttttccacttcgcgatcggcttgcgccgccgccaggttggccaccttcagcgccagacgacgcggggcggcaaaccattccactttaccgtgcgcaaggccagcgttatccagctccgcggtcacattcgcagcaaaagattccgccaggctgcgcagcgcttttggtggcagctcttcagtgccgatttccaccagaaaagtattctcagacatggccgcctcttatttattcttgttgcacatcgggaagccgagcgcttcacgggaagcgtagtacgcttccgccactgctttagtcagggtgcgaatgcgcaggatatagcgctgacgctcggtgacggagatggctttacgcgcatccagcaggttgaagctgtgagccgctttcagaatacgctcgtaggccggcagcggcagcggggtctccagcgccagcagctgctgggcctctttctcatactgttcgaagcaggtgaacaagaagtcgacgtcggcatattcgaagttataggtggactgctccacttcgttctggtggaacacgtcgccgtaggtggttttccccagcgggccatcgctccagaccaggtcatagacgctgtccacaccctggatgtacatcgccagacgctccagaccgtaggtgatctcgccggtcaccggcttacactcgaggccgccgacctgctggaagtaggtgaactgcgtcacttccatgccgttgagccacacttcccagcccagaccccaggcgcccagcgtcgggttttcccagttgtcttcgacaaagcgaatgtcgtggatagtcgggtccatacccagctctttcagcgacccgaggtacagctcctggatgttgtccggagagggtttaatcaccacctggaactgatagtagtgctgtaaacggttcgggttttcgccatagcggccatcggttggacgacgggaaggctgcacgtaggcggtcgccatcggctccggtcctaacgcgcgcaggcaggtcatcgggtgagaggtgccggcgccgacttccatgtccagtggttgaacaatggtgcagccctgacgagcccagtaatcctgtaaggtcaggatcaggccctggaaggtcctggtatcaaacttttgcatatgatttcgtgctggatacgtgtggatttaaaggaaggagtcagtatacccgctggctgcgagatatacagtacgaaacggcgttgtttcaggaaaacggacgaaatttacgccaggcggggtcgattcagcgcatcgaaagatgcataaactggccgtccgggtcaaaggaacagatgaaacgctcattcttgccggtacggccagaaagctcatagctcgcctggaattgttcaaagtggttcacgtcaacgagctgcgtttgcgtgttatagcggatagccgcctgatccttgcaaagctgcgccatattgagcgtggtttgcggcgtaatacgagcgcgctgcgctttttgcgtcggcggggagacggtctcgctgcagcccgcgaggagcagcaccagcatgacggaaacaacacctttcaccacgttctcctccaccgccttgttagcaagttgttatcctaaagattcagtattacaggtattttgcgaatatcatgaaactgcgacaagtctgtgaccgaaaactcagactaatctattgcgacaccgggaaaccgggcaggtcatatcttatttctccagcagacattgagggactgatgcaagaaaagatacactggatcaccaacctgcgcggcatcgcctgcatgatggtggtgatgatccacagcaccagctggtatatcactcacccccatgcgattaccctgctgcaatgggatatcgccaatctgctcaattccgcctcccgcgtcagcgtgccgctgttttttatgatctcgggctacctcttttttggggaacgcagcgcccagccgcgccatttctggcggattggcctgtgcattgcgttctatagcgcgctatctctgctgtatatcacgctgtttacccatatcaacgtcgagctgtcgttaaagaatttgctgcagaagcctgtcttctaccacctgtggtttttctttgctatcgccgtcatctacctgctctcgccgctgattcaggttaagtccaccagtagcacaatgctgctggcgctgatggcgatcctcggcattctggccaaccccaatatggtcagcgttaaagccgccggaattgagtggctgccagtcaacctttatatcaacggcgacaccttctactacgtgctctacggcgtgctgggcagagccattggcaccctggacaccgataaaaaatggctaacaccgctctgcgccgcgctgttcatcgccgccgtgtgggtcatttcccgcggcacgctgcatgagctgcgctggcgcggagacttcggcgacacctggtatctctactgcggaccggcggtgtttgtttgcgcggtcaccctgctgacgctggccaaaaactggcttaacgcgcgtcccctgcccggtatcgcctgcattgcgcgacattcgctggggatctacggctttcatgccctgatagtgcatgcgctgcgcgccagccatctggagctatcccgctggccgctgctggatattgtgtggatatttagcgccgccctgctcggcagcctgctgctgtcaggcctggtgcagcggattgatagccgccggctggtcagctaacggtccgccgcccggaggggcccgacttacgtctcaggcccctcttccgtcacgctgagaggttcccgtaagcgcgtcgggtcccagacatcacgcacgtttttctgtaccgcaacagcgccaaacaggctcaaaaaatacgccagcccatagaaccctttctcgctgagcagcagagtggcattccacagtccgataaccagcagacctacagcgataacgaagatcaccagacaggtggtgtagtacagcgcggtggtcggaatggcttcatacttatcgcgcaccgtcttttgataagatgccgcggcaaacagccccagtaccaggacggcaaaataatagcctttctcattcaactgcatatcggcattccacagccccaccagataggtgacgatgccgccgatcagggcaatccaggagatcaaatgaaacgcaggagaatacgtcgcgtgcttgttttccatcactttttaccttttacgcgcctcggggcggcgcttattccgttttttgcatcgcgcgggcgatgcgggtccgttcgggggttgccgatgcgccatataagcagacaaaccatgccgcgatatagacggctttttcatgccagtctgccggtacataccaggcgccgaccagcagcaggccgaccgatagcagcagcaccagccggcataaggcaataaaaccgtcgtcctgttcctgccactgactggcgcgctgatgggcgagaacagcaaacatccccatcaccagcacgccgagaaaataccctttgccgctgaacagcgggcaggtccgccagataccgagcagataaaccagcgatcctgtcgccatcatccccctggcaatattgcgttttgtgatcatctcacctccctggtcgacaggggctgattatgaccgactccctcggcgatgcctcagattacgtacgacaaagcggagatttcggaataaataaatacgcatttatggatggatgtagccgggacattcaggaagggaatccgcccggcgctgccggacggactgaggctaagacatcagcggtttcagttgctgataaatctggcggaaggtttcccgctgcggcgcatagtgggccacacggcgatcgtccgggcgatgggcttgttcaagcggcagcggcttcagcagcccggggcggtctgcctcgtcgtgaaccgccagctgcgccagcctggccgcccccagcgccgggccgacatcgcccccggtacggtaatcgagctgcaggccgctgatatccgccagcatttgccgccagtaagcgctgcgcgccccgccgccgataagcgtgatgctctgcggcttgatgccgcaggcgtgcaccacgtccataccatccgccagcgcatagcccaccccttccagcaccgcccgcgccagctctgccggcccatgctgatgcgtcaggccaaaaaagacgcccttggcctgcgggttgttgtgcggcgtgcgttcgcccgacagatagggcaggaaccacaccggaccggcgctttcatccgccgtctgcgccgccgcgatcagcgccggcacgctggcgagaccggttaattttgccgcccagtccagacaggaggccgcgctgagcatcaccgacatcaaatgccagcggcccggcagggcatggcagaagctgtgcaccgcgctttcgggtttgctaaggaacccttcactgacggcgaagtagacgcctgaggtgcccagcgacagcatcgcctgaccggcatcggccatgccgaccccgaccacgcccgcggcgttgtcgcccccgccgcccaccaccagcgccggcggcatattccacgcctgcgccacctcaggtcgcagttgcccggtgacgtcgctgccttcgaacagcgctggcatcgcatcccgactgagatcgcaggcggcgagcatctcgtcgctccagtcgcgccgggcgacgtccagccacatcgtgccggcggcgtcagacatatcgctggcgagctcgccggtcatgcgcaggcgcagataatccttgggcagcagcactttatcgacctggctgaacactgccgcctcgtggcgctgtacccataagagcttcggcgccgtaaagcccggcatcatcaggttgccggtgatctgcctggaagcgctgactttgtcttccagcagctggcactcttcggcgcagcggccgtcattccataaaatggccggacgcagcacctgtaacgatttatccagtagggtggcgccgtgcatctgcccggcaatgcccagcgccttcacgtcgcgcaggctatgctgcgcgcccagggctttcatcgccgtgtccgtcgccagccaccactgttcgggatcttgctccgaccacagcggatgcggacgcgagacggtgagtttttcggtatgcgatgccactacctcaccctgctcattgagcaggatggctttgacgcccgacgtccccagatcgatgccgatatacatactccctctccttaaacgcgcgccacggctgagcgtggcgcgaacagagcatcctggttgcggcgccggtcaccccgggcgccgccgcatgattacttgtcaaacagataatggttgaccaggttttccagttgttcctgctggccgctgcgatgctgcggcgccagctgatgctgagcggcatactgggcaatatcgctcagggtcatctgcccgttaaggatctgctgccccagctcaccgttccagccagcgtagcgtctggccacgcgcttatccagttcgccgtcctcgatcatccgcgccgcgaccttcagcgatagcgccatggtatccatcgcgccaatatgaccatagaacagatcgtatttgtcggtgctctgccggcgcactttcgcatcaaagttgagcccgccggtggtgaagccgcccgctttgaggatttcatacatcaccagcgcattctcttcgacgctgttcgggaactggtcggtatcccagcccagctgcggatcgccgcggttggcgtcaacggagccgaacagccccagcgcgatggccgtcgcaatctcatgatggaacgaatgaccagcgagcgtcgcgtggttagcttcaatattcagtttaatctctttttccagaccaaactgtttgaggaagccgtaaacggtagaggcatcatagtcatactgatgcttggtcggctcctgcggtttgggctcaatcagcagcgtgcctttaaagccgattttatgcttatgctccaccaccagctgcataaagcggccaatctgctcacgctcctggcgcaggtcggtattcagcagggtttcatagccctcgcgaccgccccacagcacatagttttcaccgcccagttgatgggtggcattcatggcggtgaccacctgggtggccgcccagctaaatacttccggatccgggttggtggccgcgccggcgccgtagcgcgggttggtaaagcagtttgcggtcccccacagaagcttcacgccgctctgctgctgtttctcagccagcacctcgaccatccgggcgaagttattgctgtactccttgagcgaagcgccttccggcgagacgtcaacgtcgtggaagcagtagtaaggcacgttgagtttatggaagaattcgaacgccacatcggctttgcgtttggccatctccagggcatcgccaggctgctgccagggacgatcaaaggagcccacgccaaacatatcggcgccattccagcagaaggtgtgccagtaacaggccgcaaaacgcagatgatcttccatccgtttgcccagcaccagttcatccgggttgtaatgacggaaagccagcgggttagtggatttcgggccttcgtaacgaacgcgatcgagttgatcgaaataggtctgcatagagaactccatattcagagatgcggcgaataaccaatcagataccctaaataattcgagttgcaggaaggcggcaggagcgcaagtccccggtaaccaggggcggagcaacgaatgtcaccaacccacctacaacttgaagtatgacgggtttaagccaatatagaatttcgctttcattttcctcaattacgttatttcacaccgccattgagagaatccacaaacgtgcgccagctcgcaaaaataatatccagtcgccgttgcgccgctctgtcagagacagtccagtgcaataataagagcgtgcatgaataaaatacgatcgccgtcataatttgcacattaaacgaaatttcataacggcaaaataagaaccggtaattgccagccctgctttccgcgttaagaatctgtaacgtatccgcaacctcatgtatcaaacattattttccgttcgtcttacctacccttacaaaaaaggtatcgttattatgaagataaagaacctttgccttacgctttgcgccagctccctcctgctcgccagcatggcggggatggcgaaagaagtgaagattggcatggccatcgacgatctgcgtctggagcgctggcagaaagaccgtgatattttcgtcaataaagcggaatccttaggcgccaaagtttttgtccagtccgctaatggcaatgaagaaacgcagatgtcgcaaattgaaaacatgatcaaccgcggcgtcgatgtgttagtcattattccttataacggccaggtactcagtaacgttattaaagaagccaagcaggaaggtattaaagtcctggcctatgaccgtatgattaataatgccgacattgatttctatatatctttcgataatgaaaaagttggtgaaatgcaggcgcaaagtctggtcgacaaagtgccgcagggtaattatttcctgatgggcggttcgccggtggataataacgctaaactgttccgcgccggacagatgaaggttctcaagccgtatgtcgatgatggcaaaattaagattgtcggcgatcagtgggttgacggctggctgccggagaacgcgctgaaaataatggaaaacgcgctaacggcgaataataacaagatcgatgccgtggtcgcctccaatgacgccaccgccggcggcgccatccaggccttaaccgcccaggggctggccggcaaagtggcgatctccggtcaggatgctgacctggcgggcgtgaagcgcattatttccggtacccagacgatgaccgtctataaaccgattaccaccctggccaccaacgccgctgaaatcgccgttgagctgggtaacgataagcagccgaaggccgataccacgctgaataacggcttaaaagacgtcccttcgcgcctgttaacgccaattgaggtgaataaagaaaatatcgacgccacggtgattaaagacggtttccataaaaagagtgaactgtaatggctgacgccccgctgcggggcgtcattttcatcccgccggatatcactgttgcggagtctttatgacctggctactcgaaatgaagaacatcaccaaaaccttcggcgctgttaaagccgtggataacgtcagcctgcgcctgaacgcaggcgaggtggtctcgttatgcggtgaaaatgggtcggggaaatcgacgctgatgaaggtgctgtgcggtatctatccgcacggaagctatgagggcgagattatttttgccggcgaaacgctgcaggcaaaccatattcgcgataccgaacgcaaaggcatcgccattattcatcaggagctggcgctggtgaaacatctcaccgtgctggagaatattttcctcggcgccgagatctcccgccatggtctgctggattatgaaaccatgacgctgcgctgtcagaaactgttggcgcaggtcaatctgcccatttcgcccgatacccgcgtcggcgacctcggccttggtcagcagcagttggtggagatcgccaaggcgctgaataaacaggttcgcctgctgatcctcgacgaaccgaccgcctccttaaccgaacaagaaaccgcgacgctgctggcgatcgttcgcgatctgcaaaaccacgatatcgcctgcatctatatctcgcataagctcaatgaggtcaaagcgatctccgatacgatctgcgtgatccgcgacggccagcacatcggcacccgcgatgccagcggcatgagcgaagacgatatcatcaccatgatggtcggccgcgagctcaccgcgctctatcccagcgagccgcacgcccacggcgaggagatcctgcgggttgaacatttaaccgcctggcacccggtaaaccgccatattaaacgggtcaatgacgtctcattttccctgcgtcgcggagaaatcctcggcatcgccgggctggtcggcgccggacgtaccgaggcggtacagtgcctgttcggcgtctggccggggcgctggcaaggggagatctttattgatggccagccggtgagcatctctaactgccagcaggccattgcccacggcatcgccatggtgccggaagaccgcaaaaaagacggcatcgtgccggtgatggcggtgggcaaaaacattaccctcgcggcgctcaaccagttcaccggcgcaatgagcagcctggacgacgccgccgagcagcactgcattcagcagtccattcagcgtttgaaaattaaaacctcctcgccggagctggcgattggccgtctgagcggcggcaaccagcaaaaggcgattctggcgcgctgtctgctgctcaatccgcgcattctgatcctcgacgaacccacccgtggcatcgatatcggggcgaagtatgaaatttataaactgattaaccagctggtgcagcagggcatcgcggtcattgtcatttcatccgaactgcccgaggtgctcggtctcagcgatcgggtgctggtcatgcacgaaggcagactaaaagccaatttggttaatcaacatctgacccaggaacaggtgatggaagccgcgctgaggagcgaacgccatgtcgaagaacacgtcgtctgaaatcaaactcaccccaaccgcccccgcggccctgccggcgctgaaggggctgaatctccaggtcttcgtgatgatcgccgccatcgtcgtcattatgctgtttttcacctgggttaccgatggcgcctacctgagcgcacgcaatatctccaacctgctgcggcagacggccatcaccggcattctcgccgtcggcatggtgtttgtgattatttcggcagaaatcgacctctccgttggctcgatgatggggctgctgggcggcgctgcggcgatctttgacgtctggctcggctggccgctgccgctcaccattctggtgacgctggtgatgggcctgctgctcggggcgtggaacggatggtgggtagcctatcgcaaagtgccctcgtttatcgtcacccttgccgggatgctggcgtttcgcggcattctgatcggcatcaccaacgggaccaccgtctcgcccaccagtccggcgatgtcgcagatcggccaaagctacctgccagacggcatcggcttcggcatcggcgttgtcggcatggcggtgtttatcgtctggcagtggcgcgggcggatgcgccggcaggcattaggtctggcgacctcgtcctccaccgccgccgtcggccgccaggccattaccgcggtgattgtgctgggcgcaatctggctgctcaatgactatcgcggcgtaccgaccccggtgctgatcctcgccgccctgctgctggcgggcctgtttatggccacccgcaccgcctttggtcgccgcatctacgccatcggcggcaacctggaggcggcccgtctgtccgggattaacgtcgagcgtaccaagctggcggtgtttgccattcacggcctgatggtcgccattgccgggctaatcctcagctcacggctcggcgcggggtcgccttcggcgggcaatatcgccgaactggacgccatcgccgcctgcgtcatcggcggcaccagcctggcgggcggcatcggcagcgtcgccggggcggtaatgggggcgtttattatgtcggccctggataacggtatgagcatgatggacgtcgccaccttctggcaatatatcgttaaaggcgccattttgctgctggcggtgtggatggactctgccaccaagcggcgcgcataaggagagactctctgaagaatgtctgaattctttgcgctaccgccaaacttcgccataaggcgcttgaaatatctcgggcattagccggtagtgtatacccaacatcattcgggttgcagacggcgcccccggccgcgtaccggcgtacgtggccgggatgagtggtaagtcaggccatcggcaacatcttgaatgaaggggtatgaccggggttagagcaggaacattatctatgtttgaaaagcgtcaccgtattacgctgttatttaacgccaacaaagcttatgaccgccaggtagttgaaggtgtcggcgagtatctgcaggcctcccagttggaatgggatatctttattgaagaggactttcgggcacgcatcgaaaacatcaaagagtggttgggcgatggcgttatcgccgactatgacgatcccgaaatcgaaaagctgctggccgatgtccacgtgcccatcgtcggcgtcggcggatcttatcatcagccagagcagtacccgccggtccactatatcgccaccgacaacgccgcgctggtggaaagcgcttttctccatttgaaggaaaaaggggtgcaccgcttcgcgttttacggactccccacctccagcggtaaacgctgggcggtagagcgcgagtatgccttctgccagctggtcgcgaaggagaagtatcgcggcgtggtctaccaggggctggagacagcgccggagaactggcagcacgcgcaaaaccggctcgccgactggctgcaaaccctgccgccgcaaaccggcatcatcgccgtcaccgacgcccgcgcccgccacgtcctgcaggcctgcgagctgctgcatatcccggtgccagagaaactgtgcgttatcggcatcgataacgaggagctaacccgctatctctctcgcgtcgccctctcctctgtcgcccagggcacccgccagatgggttatcaggcggcaaaattactccaccggctgttgaataacgaggccctcccgctgcagcgccagctgatcccgccgatgcgcgtcgttgagcgacgctccaccgactaccggtcgttaaacgatccctccgtgatacaggcgatgcattacattcgcaacaatgcctgcaaaggcatcaaggtggaacaggtgctcgacgccgtgggcatctctcgctctaatctggaaaaacgcttcaaagaggaggtcggggagaccatccacacggtgatccacagcgaaaaactggaaaaggcgcgcagcctgctggtgtccactagtctgtcgatcaatgagatttcgcagatgtgcggctatccgtcgctgcaatatttctattcggtgtttaagaaggagtacgacgtgacgccgaaggagtaccgcgatcggcacagcgaggtgatgctgtagggtaaaaaaatgcccggcgacaaggccgggcatccggattacagatgagcggcgatgagccgctgattgtcctgatacatcgcgaagagatagttgttgtagctcgaccctttggtcgaataccccttcagcttatggatcatggtgctggcagttacttcctgatccgccttgcgcagctgcaggcgcgacttgcggaaagaagaataggccgggtgggtgttcaggtttgttacgtaagcctgcaccgactgctctaccgactcaaactgcgagtaacctttcatcgcgccgcggcagcgaccggcgccgcacttcatgccgaacaggttgttattctcgcgcgccagcctggaggtaccccagccactttccgccgccgccatggtcgccaccatgctgttcggaataatgtcgacacgctcaagcagcgcgttccagggcacatgacgcgtattgcctgaccacttcaccttataacgggaagcgatatccttcaggcgcgccttctcagtcggtgaccagcgagcatcgtactgcttggaaataagccagttacgatccgcagtaatcgcctgattctgcttggtaatataaggcatgaccgtccggagaaacgcttttttccttggtgttccggaagggtattttcgcaagtcaggaagtgaactgctctttacactattgcgagaatactcttgtttactgcttaccttagtactacttatcttctttaccgttggggctttatgactctttgtcgctgtgtgcgttgtcgccaacacactacctgaaaagatgcaggttagtaacataagtatggcggccccatatcgtcgtatgggattcgatatcatcaggtctcctggtcggatatatgcattccaacaccttgtttttcacaaaaaaacgatagctgaatcgctaatagtatcaaaaatacgcactgagggcatcaacagaaatagtccaattccgaattgctgtcatctgaaatcggtttctgcggcgcatcgccagcgcgaaaatgctagcttcgtctcatttttagcctattttttgagcggtgtcactcaccccttttcatcctcctggtaaaacgcgcgtcaggaggagttcacccgcgcggcgacaaggcacactagataaaaaccgctcacaggatctcgcaatgaaactcgctgcgcttgccacgttattcgtgcctgggatggcttttgccgcctggactaccaccgactttcctgcttttaccgaagaagggaccggccgattcatcagccagaaagtggttgagaagggtacacgtcccctgcagctaaattttgaccagcagtgctggcagccttccggcggcattaagctcaaccagatgctgtccatggagccctgtcgcggcacaccgccgcaatggcgcatcttccgccagggtctgtataccctggaggtggatacccgttccggcacgccaacgatgatgatttcgctggaggaaaaagagaccagcgccgcggcgccgcagatccgccagtgtccgaagtgggacggaaaaccgctgaccatcgacgtcagcaaaaccttcgccgagggcagcaaggtccgcgatttctacagcggcaatgtcgcgaccgtcagcggcggcaaaatcaccctgcagcccgccttcggcagcaatggactgctgctgcttgagcgcgccgagaccgccgccccggcgccgtttgactggcacaatgccaccgtctacttcgtcctgaccgatcgcttcgtaaacggtaacccggccaacgacaacagctatggtcgccataaagacggcatgcaggagatcggaaccttccacggcggcgacctgcagggattaaccagcaagctggattatctgcagcagatgggagttaacgccctgtggatcagctccccgctcgagcagatccacggctgggtcggcggcggcacgaagggcgatttccctcactacgcttatcacggctattacacccaggactggtcgaaactggacgccaacatggggaccgaagcggatctccgccgactggtggatgaagcgcataagcgcggaatacgtattctgttcgacgtggtgatgaaccatgccggctacgccaccctggccgacatgcaggagttccagttcggctccctgtatctgcaaggcgatgagctgaaaaaaactctcggcgagcgctggacggactggaagccgggcgcgggacagacctggcacagctttaacgactatatcaacttcagcgacaaagccgggtgggagaaatggtggggtaagaagtggatccgcaccgatatcggcgattacgacaatccgggctatgacgatctcaccatgtcgctggccttcctgccggacctgaaaaccgaatcgaaggaggtctcaggcctgccgaacttctatagccataaaccagacaccgcagcgaaagcgatcccgggctatacgccgcgcgactatctgacacactggctgagccagtgggtacgtgactacggcatcgatggcttccgcgtcgataccgccaaacatgtggagatggacgcctggcagcagttaaaaacccaggccaccgccgcgctggcggagtggaagaaagccaatccggataaagcgctggatgcggcgccgttctggatgaccggcgaagcctggggacatggagtgatgcagagcgattattatcgccacggttttgatgcgatgatcaatttcgactaccaggaccaggcggcgaaagcggcgacctgtatggccaatattgacctcacctggcagcaaatggcggacaagctgcagagctttaacgtcctgagctacctctcctcgcacgatacgcggctgttccgcgaaggcggcaccaccgcggcggagctactgctgctggcccctggcgccgtgcagattttctatggcgacgaatcatcgcgcccgttcggccccaccggctcggacccgctgcagggtacccgctcggagatgaactggcaggatgtcaacggcaaggcggcccgcagcgttacccactggcagaagatcggccagttccgcgctcgccatccggcaatcggcatgggcaaacagacaacgctgtcgatgtcgcgtggttatgggttcgtgcgtgagagcggtgaagacaaagtgatggtcatctgggccgggcagcagcagtaatccacatgtggctctccgccctgcggggagccaccattcagcacaaaatgctaacaaaatagcaatatacaggataaagataaaaatccgcctcctcccgccgatttgcaccatgccagcgctggcgttatggttagccactttccagaaccaccgatagactattcgcgatgacattttcccttttcggcgacaaattcacccgtcattcaggcatcacccgcttgatggaagaccttaatgacggtctgcgcacgccgggcgctattatgctgggcggcggcaaccccgctcagatcccggaaatgaatgactacttccagcagctgctggccgacatgctggataatggcaaagcccttgatgcgctttgtaattatgatggtccacagggcaaaagcgagctgctggctctgctggcgaacatgctgcgcgacgagctgggctgggagatcgaaccacagaatattgcgctaacaaacggcagtcagagcgcatttttctacttatttaatctgtttgcaggccgtcgggcagatggcaccacccgtaaggtactgttcccactgacgccggaatacatcggctacgccgatgccggtctggaagaggatctgttcgttgccacccggccgaacatcgaactgctgccggaaggccagtttaagtaccatgttgattttgagcatctgcaggtgacggaagagaccgggatgatctgcgtctcgcgccccaccaacccgaccggcaacgtcatcactgatgaagagctgatcaaactggatgcgctggcgaatcagcacggggtcccgctggtgattgataacgcctacggcgtgccgttcccgggcattatctttagcgacgcccgaccgctgtggaatccgaacatcgtgctgtgtatgagcctgtccaagctgggcctgccgggcagccgctgcgggattatcatcgccaacgaaaaaatcatcaccgccatcagcaacatgaacggcattatcagcctcgcccctggcggcatcgggccggcaatgatgtgcgaaatgattaaacgacaggatctgctgcgcctgtcagagacggtgatcaagcccttctattaccagcgggtgcaggaaaccatcgccattattcgccgctatctgccggaggagcgctgccttattcacaaaccggagggggcaatcttcctctggctgtggtttaaggatctgccgatctccaccgagctgctgtatcagcggctgaaaaagcgcggcgtgctgatggtgccgggggattacttcttccctggtctggataaaccgtggccgcacacccaccagtgtatgcgcatgaactatgtaccggacccgcaaaaaatcgaagccggagtgaaaatcctcgccgaagaggttgaatttgcctggcgcgaacaggaagcataatctctgacgccgcgggcgggtaacgttcgtcagcgaccccattcacgccagcgccagccgctggcgtttttgcgcgcatagcgcttccagctccgcgggaaccatcacccgcagcgcctgcgtcgggcaggcggccacgcaggccggtccttcggcgcggtgatggcatagatcgcatttcaacgcctgcgcctgctcgttcattaccgtaacggtcatcgcgccgtacgggcaggccaccatgcagcttttgcagccgatgcagcgccgctggtcgacccaccagacgtcattgtcgcgctgaatcgccccctgtgggcaaacgctggcgcagggcgcatcctcgcactgccgacaggccatcgccgtcgatatgtcaccgcttttcaccacccggatacgcggcgcgaaatggttcgtcgacagggcggcgacatcctgcgcctgctggtgcgccaccgcgcaggccacttcgcaggtacgacagccgctgcaccgctgggcattggcaataagaaactggttcatcctctgctccctggggataaaaccgcagggtgccagaatatcccctgcccgcgctttgatcctgaatggaatcagcgctgttttttgtcagatggccggcaggatgtggtcatttgcctgacgcttcacgcaccgtgaaacccagctcacgcgaaattgcttcggcggtctcacgtagtggttttaacaagttcttttcgccagctccccggcacgaagtccgccggggagccgacgttaatgattaccggaacaatgccttatcgcgcaggatatgatcgttgccgcgacggcgggtgaagccaatccgatcgaaatactccaggatctggatcgccagcttccgccctacgtttaaggtatcgcggaaatccgccgcgcaggttgaaccgcgcagccgatccagctcgcgcacccgctgggcgaattgcacaatgcgatcgttgcggtagtaacgatccttgacgatcgcggtaatcatcccctgctgcgccgcctggcgcagcaccgcgcgcatcagggactcttcaacatggacttcgcgcgcaagatcgcgcacccaccacggatcgtcgccgaacaaagtctccaccttctgccagaccgcctgctgctcgtcggtaaacccggctttatgctccggcaaatgcagccagccgtgatggctgtggactaagccgctctcgcgcatctgctcaatcagcagcagcaccagcgcttcatcttccatcggcagcgcgatgcggcgcaggcgctcccggccagggcccggctcgtctcgatgctgctcatggtagcgcgcaagggcatccagcaattttcgctgccagcgggcggcaagcggcgcgctaagcaggcgctgtccggcctgccgatagtccggtcgctggatcagggccgccatcccggcttcgctgagctgccgcgcccaggcgaagcgctcaagccggacggcatcccgctgcagatgcagctccagcgcctgcgcatcgtcagcgccgaccgccgccagggcgtgcagccactgcagatattccggtttacgtttgccgcgacgcggaggatccagcgtcaccacccgtgcgcccgccagcgtcaagcgagcggagatatcgcggagcaccagccggtcgttatccgccagccacagcggagtatccagcaccagctccgccaggttgccctcaagaagcgacacccggccggtaatgtggctggcagcatggtgaatatgcagcggctgccactggctgagcggcgtatggcactgcagctcgacaatcacccgttctgctggctccggcggtggtgaggagagcagccagtcgccgcggtgcactgcctctttttgcgcatcgccgacaatattcagcgcaatgcgctgtccggcgtgcgcctgctcaaccgcttgattctgggcatgcaggccgcggacgcgcatcggcgtgttgacgccggtaagccatagggtatccccgacccgtacttcgccggagagcgccgtcccggtgaccaccagccccgcgcctttgacggtaaaagcgcgatccagcgccaggcgaaaccgctgctgctgcgggcgggggcgctccgcaagctgcagcagatggctgcgcagttccgcaataccgatgttttccgccgccgcggtgggaaagaaagcgacggcgtcaaagcccagctcgcccagggtctgctcgacctctgcctgaacctccgccaccctggcggccgccacgcggtccgttttggtcagcgccacggtcagcgtcggctttccggtcagctgcaggatcgccaggtgttcgcgggtttgcgccatcaccccgtcatcgcaggctaccaccagcagcgcatggtcaataccgcccgcccccgccagcatgttggacaaaaacttttcgtgcccgggaacgtcaataaatcccagcacccgcccgtccggctgcggccagtaggcatagccgagatcgatcgtcattccccgcgctttctcttccggcagacgatcggcattcacgccggttatcgcctgcagcagcgtcgttttgccgtggtcaacatgtccagcggtggcaataatcatcgtaacaacatctccataaagcgggtttcatcttccagacagcgcaggtccaaccagagccgaccgtcataaatgcggccaatcaccggacacggcagcgcgcgccagcgggccgccagcgcctccagccggctaccgcggccgtcatgcggggtaaaggtcaacgccgcgctgggcaggcggtcgacgggtaacgaaccgctgccaatctgcgactggcaggctgccacgctgacggcaaagtcagcatagtgtgccgccaggtcaggcagcaggcgttcagccagccggcggatctcttccgccggacgggtgagcaagcgcagcgtcggtaatctctccgtcagcacctccgggtgctgatagaggcgcagcgtggcttccagcgccgcgagggtcattttatccgcgcgcagggcccgcttcagcggatggctttgcagccgggcaatcagcgcgcgtttgccgacgataattccggcctgcgggccgccgagcagcttgtcgccagagaaactgaccaggctcaccccggcggagatcatctcctgcggcatcggctccttcggcaggccatactggctgagatccaccagcgacccgctgcccaggtcggctaccaccggaacatccagttcgcggccaatggccgccagctccgcttcgtcgacggctttggtaaagccttcaatgctgtagttgctggtgtgaaccttcatcagcagcgcggtattgtcattcaccgcctgacgatagtctttggcatgggtgcggttggtggtacccacttcgtgcagctgacaacccgcctgacgcatcacatcaggaatgcgaaatgcgccgccgatctccaccagttcgccgcgggaaaccaccacttcgcggccgctggcggtggccgccagcatcagcagaacggccgccgcgttgttgttcacgatacaggcatcttccgcgccggtgatctggcacagcagatcggcaatggcgcgatcgcgatggccgcgcccggcgtcgtcgagatcatattcgagcgtcaccggcgcgcgcatcgcgctggcaaccgcctccacggccgactccgcctggatggcgcgccccagattggtatgcaataccgtaccggtgagattaaacaccggacgcagggcgctccgctggccggcggtgagccgctgctcacaggcgtgcagccagtcatggctccagtcaggcagtgtctgacactggcggatctgttcccgcgcctcgtccagcatctggcgcagctgcgtcaccacctgcgaatggccgtgctgcgccagcagggaggaaaaagcggggtcgcggagtaagcggtcaatggccggaagccgggtataaagcgcacgaatttcggtagtcatgaatgggcctggcggtaagttattttcccccctcccgacgggagagggagtcaacaatcagcggcgattgtaacgcctccttgcgcaaactgttacctgcctgggtcaagtccgcggcggttcagtgcgcgcaaagctggcgcgctggaacagcgcatccatcagcttcaccagctgcggccgggtggcgcaccagccgggcgcgacccggcgaaagttcagctaagcaatggcgcaggccgtggaaatggtcgccagattaacctcgtcgccgcgcagcgttccgtctgccgcgcaggcttccagcctgtcgagaccgcgagccactttctcccgctggcggagcagttcttgctctgactgttgcgcacccgggcgagccttttcacgcaccagcgcctgggcggcctccatcacgccatccgccagcgcctctagctggcgcatcctgagagcggctctggggtcggcggggatcatcggcggcgctacgcccagcagctccagatactgggcgatgaccggggagtcaaaccagcactcaccgtcgtccgtcaccagcgccggtaccttgcccagcgggttatagcgcgccacaccgttgctttcgctgtagggggattcgttgacaaactcaaaagggatgcgcttttccagcaggatcaccgatattttgcgcacaaagggactggtgtagctgccgatcagtttcatagcctgctccttatcgccaacaaattatcgccaacaaagatatgagtatggctcagggcaggacaaaaggcaggtgagcgtccggctcaacctgccgccgatcgcattaatgatcgacatagaggtagtgcatccagctggtcatccgcagcagcactttacgcatcaccgagacgtgggtgaaatggtcggagtagagcgccacctgcgcgtagataccatcgggtaatgctgatagcccttgttcaagcgatcgcgttccgtcgacacgcgggtggtattggcctggcctcagagagctgcggcttggggacgttaatacagtacagcgtcgttaccaggttggcctgcaggcggtcgactcgcgcctgattgggcgccgggtcaatcgtaaatagcgcctcgcctttctcgacgcgctgagtggctctatcggttcggctttacgggattatttatatgattttattcacaatatactgatattcgccccgctattttgaggataattcacgcctttcatttatgccatccggcgtaaaaaagttattcggcaattaaggttgcttagttacagggtcatcccggcgtggaagcaaaaccgggccgagatcacagcggcgtaaacccctcgcgaaattctttgtgatcaaaatcacaaacaaacaacaaaaacacgaaacaaaaatgtgacaaatatcacacaaaaaggcagatcagcggctaaaaaggcgctgtgttgtttttttacacagtaattttgtgatcatcatcactacaaaaccctcttagccccctatattcatgtgatccaaatcacataaaagggcgctggctggacagctaaacgtttcagtgccagatttcgcactatcaatcagggcccggctacctctgccgccacattaacaacaaacctcgggctttaagcctgcgcgctacgcaaaacagaagaaggggtgttttatgtcatccgatatcaagatcaaagtgcaaagctttggtcgtttcctcagcaatatggtgatgccgaatatcggcgcgtttatcgcgtggggtatcatcaccgcgcttttcattccgacagggtggttgccaaacgaaacgctggcgaagctggtcggtccgatgatcacctacctgctgccgctgctgatcggttacaccggcggtaaattagtcggcggcgaacgtggcggcgtggtcggggcgatcaccaccatgggcgttatcgtcggcgcggatatgccgatgttcctcggctccatgattgccggcccgctgggcggctactgcatcaagaaattcgataactgggtagacggtaagatcaaatccggttttgaaatgctggtgaataacttctccgccggcatcatcgggatgatcctcgccattctggccttcctcggcatcggcccggcggtcgaagttctgtcgaaaattctggcggctggcgttaactttatggtggcgcacgacatgctgccgctggcgtctatcttcgtcgaaccggcaaaaatcctgttccttaacaacgccatcaaccacggtatcttctcgccgctgggtattcagcagtcccacgagctgggtaaatccatcttcttcctgattgaagctaacccgggtccagggatgggcgttctgctggcgtacatgttctttggccgcggcagcgcaaaacagtctgcaggcggggcggctatcatccacttcctgggtggtatccatgaaatctacttcccgtacgtactgatgaacccgcgcctgatcctggccgttatcctcggcgggatgaccggtgtcttcaccctgactatcctcaatggcggtctggtttccccggcttccccgggttccattctggcggtactggcgatgacgccgaaaggcgcctacttcgctaacatcgccgcgattatcgcagcgatggcggtctccttcgtggtctctgcggttctgctcaagaccagcaaagtcaaagaagaagacgatatcgaagccgcaacgcgtcgtatgcatgacatgaaagcggaatccaaaggcgccagcccgctggcggccggcaatgtcaccaacgacctgagccatgtgcgtaaaatcatcgtcgcctgcgacgccgggatgggttccagcgccatgggcgccggggtactgcgcaagaaagtgcaggatgccgggctgagcaacatctcggtcaccaacagcgcaatcaataacctgccgccggatgttgacctggtcatcacccaccgcgaccttaccgagcgcgccatgcgccaggtaccgcaggcgcagcatatttcgctgaccaacttcctcgacagcggtctgtacaccagcctgaccgagcgcctggtcgcggcccagcgccacatcgacaacgaagtcaaagtcaccgatagcctgaaagacagctttgacgatactaacaacaacctgttccagctgggcgcggataacatcttcctcggtcgcaaagcagccaccaaagaagaagccattcgcttcgccggtgagcagctggtgaaaggcggctacgtcgagccggaatatgtgcaggcgatgctggaccgcgaaaaactgacctcgacctatctcggcgagtccatcgcggtaccgcacggcaccatcgaagcgaaggaccgcgtgctgaaaaccggcgtcgtcttctgccagtacccggaaggcgtgcgcttcggtgaagaagaagatgaagtcgcgcgtctggtcatcggcatcgccgctcgtaataacgagcacattcaggttatcaccagtctgactaacgccctggatgacgaaaccgtgattgagcgcctggcgaaaaccaccagcgtcgacgaagttctggcgctgttaaataaataatcaacgctatccaaccctctcctttgggagagggttggggtgaggggaaaggcctcaccccagccctctcaggtgaaaacattaattgaaggttaatactatgaaagcattacattttggcgcaggtaatatcggacgtggctttatcggtaaattgctggccgacgcgggcatcgaactgacgtttgccgatgtcaatcagaccgtacttgatgccctgaatgcccgtcatagctatcaggttcacgtcgtcggtgagaatgagcaggtggacaccgtctccggcgtcaatgccgtcagcagcatcggcgatgaggttgtggacctgatcgctgaggtggatctggtcaccaccgccgtcggtcccgtcgtgctcgagcgcatcgcgccagcgatcgccaaagggctggcgcagcgcaaagcgcagggcaccgaacgcccgctgaacatcatcgcctgcgaaaatatggtgcgcggcaccacgcagttaaaaggccacgtgtttaacgcgctggcggaagaagataaagcgtgggtggaagcgcatatcggctttgtcgactctgccgttgaccgtattgtgccgccatcggcttccgccactcatgacccgctggaagtcaccgtggaaacctttagcgaatggattgtcgataagactcagttcaagggcgcgctgccgactatcccggggatggaattaactgataacctgatggcatttgtcgaacgcaagctcttcaccttgaacaccgggcatgctataaccgcctacctcggaaaactggcgggccatcagacgattcgcgacgcgatcctcgacaagaaaattcgtgccgtcgtgcagggcgcgatggaagagagcggcgcggtgctgatcaaacgttacgcctttgacccgcagaagcacgcggcttatatccagaaaatacttggccgtttcgagaacccgtacctgaaagacgatgttgagcgcgttggccgtcagccgctgcgcaaactgagcgctggcgaccgtttaattaagccgctgctgggtacactggaatacggtctgccgcaccgcaacctggtgaaagggattgcggcggcgatgcatttccgtagcgaagacgatccgcaggcgcaggagctggcggcactgatcgccgacaaggggccgcaggccgcgctggcgcagatttccggcctggatgccgcaagtgatgtcgtcgcggaggccgttaacgactacaacgcggaaaaatgatgcacaacctggcgcggccgacgtcgcgcccattacgactcctgtcagatatgcaggcaatgatggaagaaacacaagcatttgaaaaccgtgtgcttgagcgtctgaatgctggcaaaaccgtacgaagcttcctgatcgccaccgtcgagctgttaacggaagcggtcaatattctggtgcttcaggtgttccgtaaagacgactacgcggtgaaatacgccgtcgagcccttgctggagggcagcgggccgctcggcgatctctctgtacgcctgaagctgatttatggccttggggtgataagtcgtgccgaatatgaagacgctgagctgctgatggccctgcgcgaagagcttaaccacgacggcaatgagtacagctttaccgacgacgaaattatcggtccgttcggcgagctgcactgcgtcgccgccctgccgccaacgccgcaatttgatgacagcgatgccgaactgctggcaatgcagaaactgcgttaccagcagatggtgcgctcaacgatggtgctgtccctgactgagctgatttcacgaatcagcttaaaaaaagcctttcagaaatcaacgctctgattccggttccgtctggtcgcaggtcggccggtaaagctgacgataatattccagacgctgcaggaacaacgcttccttatcctgaggaatgtctcgcggtacatgctgcagacgcggagactttttcaaatactccataaacgcctgactggaagccataaaatcaaccgctttgtcgattaaacgtggtacgccgtcgccgatctttgccatcacgtcctccttttgggaataatctgattaagcattagccaattcaccagcgtgggttaaggaaaacgtgcttatctgccgacaggcttcacagaaatgaaattagaacgggtattaggcggaatattaataaaattcaaattattagcgataaatgatattgcattccgcgggcgacaaacggcgaatttttgataaatagctatcaacaatagcggtcacggcacatactataggcgaatgaagcccctttattaacagatcaaaccaccatgaaagaagtcgaaaagaatgaaatcaagcgtctgagcgatcgtctcgacgccatccgccaccagcaggccgagctgtcgctggtggaagccgccgataaatatgctgaactggaaaaagaaaaagccactctggaaacggagattgaacgtctgcgttccgtccagagccagaagctgagcaaagaggcgcagaagctgatgagcctgccgttccgccgcgcgattaccaaaaaagagcaggccgatatgggcaagctgaagaaaagcgttcgcggcctggtggttgtccatccgatgaccgccctgggccgggaaatgggtctgaaagagatgaccggtttcgcccgcagcgaattttgatacccagccctctccgtacggagagggctattctgtcttcactcccccacatttttaccttcagccgggtcgattggtccaaccaataatttcatccaccccctggcagttcacaaatccgtcaaaacccatcacaaacacgttgcttaagagtaacatctgattaaccattcattgtcatcaaccctgatacccttaattggacgggccaattttactttcggtgggatcggcaatgagcgcagactcagccctcctctcctggcggcccgatggagaccctgcatgaatctctggcaacaaaactacgatcccgccggtaatatctggctatccagtcttatcgcatcgctaccgattctgtttttcttttttgcgctgattaagctcaaactgaaaggctacatcgctgccacctggaccgtcgcaatcgcgctggtcgttgccttgctgttctataaaatgccggtggaccgcgccttagcctcggtggtctacggcttcttctacggcctgtggcctatcgcgtggattattatcgccgcggtcttcgtctataaaatctcggtgaagaccggacagttcgacatcatccgctcatcgattctgtcgattacgccggaccagcgcctgcagatgctgatcgtcggcttctcgttcggcgcctttctcgaaggggcggcgggtttcggcgcaccggtggcgattaccgccgcgctgctggttggtctcgggtttaatccgctgtatgcggctggcctgtgcctgatcgtcaacaccgcgccggtggccttcggtgcgatgggcatcccgattctggtcgccggccaggtgaccggtatcgatagcttcgccatcggccagatggtgggccgccagctgccgttcctgaccattatcgtgctgttctggatcatggcgattatggacggctggcgcggcattaaagagacctggccggcggtgatagtcgcaggcggttcgttcgctattgcccagtacctcagctcgaacttccttggcccggagctgccggatatcatctcgtcgctggtctccctggtctgtctgaccctgttcctcaaacgctggcagccggtacgcatcttccgcttcggcgatctcggcgcctcgcaggtggatatgacgctggcccgcacacgctacacggcgggacaagtgatccgcgcctggtcgccgttcctgttcctgaccgccaccgtgaccctgtggagcgtgccgccattcaaagcgctgttcgctcctggcggcgcgatgtatgacttcgttatcaatatttcggtaccattcctcgacaaaatggttgcccgtatgccgccggtggttagcgccgcaacgccctacgccgcggtatataaattcgactggctgtcggcaaccggcaccgccattctgttcgccgccctgctgtccatcgtctggctgcgcatgaagccgaaagatgcgctgaccaccttcgccgggacgctgaaggatctggcgctgccgatctactctatcggcatggtgctggcgttcgcctttatctctaactattccgggctgtcgtcgaccctggccctggcgctggcccataccggccacgcgtttaccttcttctcgccgttccttggctggctgggggtattcctgaccggttcggacacctcgtctaacgccctgttcgccgcgctacaggcaacggcggcgcagcagattggcgtctccgatattctgctggtcgcggccaataccaccggcggcgttaccggcaagatgatttccccgcagtcgatcgccatcgcctgcgccgcggtaggcctggtgggcaaagagtcggatctgttccgctttaccgtcaaacacagcctgatcttcacctgcatggtggggctgatcaccacgctgcaggcctacgttttaacctggatgatcccgtgatagtgatgcctaaacgcctggccgacgacgtggcgcgtcgcgtccgggcgctgattgaagaacaacagctggaggcgggcatgcgactgcccgccgagcgccagctcgccgcccagctcggcgtctcacgcaattccctgcgcgaagcgctggcgatgctggtcaatgaaggggtgctgttgagccgtcgcggcggcggcaccttcgtccgttttcagcatgagccgtggtcagagcaaaacatcgtccagccgctgaagacgctgctggccgatgacccggactacagcttcgatatcctcgaagcccgccacgccatcgaagccagcaccgcgtggcacgcggcgatgcgcgccaccgacgccgataaagaaaaaattcgtctgtgctttgaagcgacccagagtgaagacccggatatcgcctcgcaggcggatgtccgctttcacctggcgatcgccgaagcctcgcataacgtggtgctcctgcaaaccatgcgcggctttttcgacctgctgcactcctccgttaagcagagccgccagcgcatgtatcaggtgccgccggtgtttgcccgcctgaccgaacagcaccaggccgtcatggaggcgattgtcgccggcgacgccgaggcggcgcgccaggcgatgatgggccacttaggctttgtccacgccaccatcaaacgttttgatgaagaccaggcccgccaggcgcgaattacccgcctgcccggtgaccacaatgaaaattccagggagaactcgtgatgattatttccgccgccagcgactatcgcgccgccgcacagcgtatcctgccgccgtttctgttccactatattgacggcggcgcctacgccgaacataccctgcgccgcaacgtcgaggacctttccgatgtagccttgcgccagcgtattttgcgcaatatgtcggacctgagtctggaaacgacattattcaacgagaagctggcgatgccgacggcgttggcgccggtcgggctgtgcgggatgtacgcccgccgcggcgaagtgcaggccgccggcgcggcggacgacaaaggcattccgttcaccctctctaccgtttccgtctgcccgatcgaagaggtcgccccgaccatcaagcgcccgatgtggttccagctgtatgtcctgcgcgaccgcggctttatgcgcaatgcgctggagcgcgccaaagccgccggctgctcgacgctggtctttaccgtcgatatgccgactcccggcgcccgctaccgcgacgcccattccggcatgagcggcccgaacgccgccctgcgccgctactggcaggccgtcacccatccgcagtgggcgtgggacgtcggccttaacggtcgcccgcacgatctgggcaatatctccgcctatctcggcaaaccgaccgggcttgaggattacatcggctggctggcgaataacttcgatccgtcgatttcatggaaagacctggagtggatccgcgatttctgggacggtccgatggtgatcaaagggatcctcgatccggaggacgcccgcgacgcggtgcgcttcggcgctgacggcattgtcgtctccaaccacggcggccgccagctcgatggcgtgctctcctcggcccgcgccctgccggcaattgccgacgcggtgaaaggcgacatcactattctcgccgacagcggcatccgtaacgggctcgacgtggtgcggatgatcgccctgggcgccgacagcgtgctactgggccgcgcttacctgtacgccctggcgacccacggtaagcagggcgtggcgaatctgctgaacctcatcgagaaagagatgaaagtggcgatgaccctcaccggggcgaaaagcatccgtgaaatcagccgtgattcgctggtgcagaacgccgaagcgctgcagaccttcgatgcgctgaagcagaataacgccgcgtaattctccacgttttcccttacgccgcccctctccctcagggtgagggttcaacaaatatctgctattctgccccccgcaattaagggggcagtatgctgaacatcgtgttattcgaaccagagatcccgccgaacaccgggaatattatccgcctgtgcgccaacacgggcttcagtctgcatatcattgagccgatgggcttcacctgggacgataaacgcctgagacgcgccggactggactatcacgagttcactgccgtgcagcgctatgcggattacgcggcgtttgtcgccagcgcgcagccgcaacggttgttcgccctcacgactaaaggcacgcccgcccacagcgcggtaagctatcaggacggtgatttcttgatgtttggtccggaaacgcgcggcctgccggccagcatcctcgatgccctgccgccggagcaaaaaatccgtattccgatgatgccggacagccgcagcatgaacctgtcaaacgcggtgtcggtggtggtgtatgaagcctggcgccagctggggtatcctggcgcggtcttgcgcagctaacctgagcggttcccggattacggcgcgttgcgccttatccgggctacatttctgtgcttagcagcggcaaatggcaatacatcaaatcccgtcgccgtactcgaaggtgtggtggatgccgttgaaatgctgatccatatccatcgccggcttgtcgctctccggcttgccgacgatacgcgccggtacgcccgccgcggtggtgtgcggcggaaccggctgcaataccaccgaaccggcgccaatcttcgcgccacgcccgacttcaatattgccgaggatcttcgccccggcgccaatcatcacgccttcgcgaattttcggatgacggtcgccgctggttttaccggtcccgccgagggtgaccgactgcagaatagagacgtcatcttcaatcaccgccgtttcgccgaccacaatgccggtggcatggtcgagcatgatcccgcggccgattttcgccgccgggtggatatccacctggaaagagacggagacttgattttgcaggaaaatcgccagcgcgcgtcgcccctgagtccacagccagtggccgatacgataggcctgcagggcatggaaacccttcagatagagcaacggcgtggagtatttatccaccgccgggtcgcgcgtgcgcaccgcctgaatatcgcaggcggcggaggcgatcatttccggatcggcggcgtaggcctcttccaccacttcgcgaatggcgatcgccggcataatcggggaagccagcttgttggccagcatatagctcagcgcgctgccgagattttcatgcttgagtagcgttgcgtggtaaaaactggcgagcatcggctcacagtcagccaaagcccgggcttcggctttaatattattccagacgatatccagttcttcacacggcattgcatactccaggcgatatagtaatgacctgccagttctgcgctggcagggtcattcaggtgacaaaggaaagctaattgctactgcgctcgtccttgcgggcgcgacccaataaggtcaatgctgcctcgcgcgcaatttttccgcaatacaatacctgataaatttcctcggttattggcatttcgacacctaaacgctgtgccagaacgcgaacttccttggtattgcggtagccttcaaccacctggccaatcttgtcctgggcactctgcacgtccataccctggccgagcatcatgccgaagcgacggttacgggactggttgtcggtgcaggtgagcaccaggtcaccgaggccggccatgcccataaaggtttccggatcggcgcccagcgccgcgccgaggcgggacatttccaccagcccacgggtaatcagcgccgtacgcgcattggcgccgaagccgatgccatccgacatacctgccccgatggcaatgacgtttttcaccgcgccgccgagctgcacgccgataaagtccgggttgatgtagacgcggaagcttttgccgcagtgcagtaggcgctgaaggtcttccgcaaactgcggatccgtggccgccagcgaaatcgccgtcggcaggccggcggccagctctttggcgaaggttggccccgagatcaccgccagcggaatatcatcgcccagcgctgcacgcgccacgtcctgcagcagacggccggtttcggcctccaggcctttggtggcccacactagccgcgcgtcggaacgcatcagcggtttaatctggcgtaacacctgaccgaatacatggctcggcaccacgacaaggatgtcgcggctggcggccagcgcggtggccaggtcgctctcaagatgcagcgtatccgggaaaggcacatcgggaaggaacgcggcgttgcagcgatcgtgttgcagcgtcgcgatatgtttcgggtcatggccccacagcacaacgtggtggccatttcttgccagggtgatggcaagagcggtgccgtaagagccggcaccgatcacagtcattgcagcattaagtgcgttcatcaggcatcctgatgttgttcagcaccttcgccagcctgctgctgcagatagttcatgaacagcgcgtcgaagttcactggcgcaaggttaagttgcgggaaggtaccgcgggaaaccaggctggtgatgcactcgcgcgcgtacgggaacagaatgttcgggcagtatgcgccgaggcagtgcgccatctgggtgccttcgatgccgtcgatggagaaaataccgccctgctgtacttcacagaggaacgcggtttcttcgcccagcgcagcggtcacggtcacacgcagcaccacttcataaacgccttcagccagctgggtggaggcggtatccagatcaagtttaacttccggctgccagtctttctggaaaacttgcggcgcgttcggcgcttcaaaagagatatctttggtatagatacgctggatctggaaggtcatttcggtgctgttttgttctgacatagtaaaaccctttcgtgttgtccttaaatacgcgcttccgccagggaaagcgcgcaaaaattagcgcaagaggggatcaagtccaccacgtgaatcaagcgcatacaagtcgtcacagccgccaatgtgctgcgcatcaataaaaatctgcggaaccgtcgtccgtccgctgcgctggatcatctcctcacgcttcgcggcatcgccatcgatcggcaactcatggaacgttacgcctttgctgttcagcagcgctttcgcgcggatgcagaacgggcaggtcgctttggtgtagatctcaatattggccatgacttcactcctgttgttaccctgagggttttacgccgcagcctgtgttcccttcacgtcaggcgtgaaggagaaaacgcggcggcatcaccacgcgaggtaagttatttgccgcgtaccagagggaggttttcgccgctccagccagcaatgccctctttcagtacaaagactttttcaaacccggctttgttcagcgcgctggcgggctcttgcgcctgcatgccggaaccgtctaccacaataatgggttgcgatttgtgtttttccaactcgccgacgttattggctttgatatcgctgggcagcaggttaatagcgccggcaatatggcctttacggaaatcgtcacgctgacgcaggtcgaccaccaccgcatcttctttattgataagacgcgtcgcttcaccacgggtgatgactttaactttcgacatcagccccttgaaggtggtgaacactaccgcacccagcagcgcgatccacgcgatgctcaggaccgggtgacggccgatgaattgcataatttcttgcatggggggttacaactcccgactaagtgagaaaaaaaccaggaaaggagtatacctgtgccttgcggcaattacagccagtgagcgcgatgtaatgtattttctgcgggcggtggcgaaaaaaagccgctctcgctgacccggcgcggcccggccgctccctttctttgatctttcacggggatttaaacgattcagctgtagtaaaattacgcaaaatttctgtctttgagcatgaggttgtcgcaatgtcggtttctaaaaaacctatggtactggtgattctggatggctacggctatcgcgaagaccaacaggataacgccatttatagcgctaaaacgccggtaatggacgcgctgtgggccaaacgtccacataccctgatcgatgcatccggcctcgaagtcggcctgccggaccgtcagatggggaactccgaagtaggccacgtcaacctgggcgccggtcgtatcgtctatcaggacctgacccgtctcgatgtggaaattaaagaacgcaccttcttcgccaacccggtactgaccgccgcggtcgataaagcggttgccgccggcaaagcagtacatatcatgggcctgatgtcgccaggcggcgtccacagccacgaagatcacatcatggcgatggtggagctggcggcagagcgcggcgctgagaagatctacctgcacgccttcctcgacggccgtgatacgccgccgcgcagtgcggaaaaaacgctggcgacattcgaagccaaatttgccgcgctgggcaaaggtcgcatcgcgtcgctcatcggccgctattacgccatggaccgcgacaaccgctgggatcgcgtggaacaagcttatgatctgctgaccctggccaaaggcgaattccaggccgataccgccgtcgcgggtctgcaggccgcctacgcccgtgacgaaaacgacgaattcgtgaaagccaccgttatccgcgccgccggccaggccgatgccgcgatggaagacggcgacgcgctgatcttcatgaacttccgtgccgaccgcgcgcgtgaaatcacccgcgccttcgtcaacgccgacttcgacggctttgcgcgtaagaaagtggttaatctcgatttcgtgatgctcaccgaatacgccgccgacatcaaagtcgcctgcgcctacccgcccgcctcgctggccaataccttcggcgagtggatggcgaagcacgataaaacccagctgcgcatctccgaaactgaaaaatacgctcacgtcaccttcttcttcaacggcggcgtagaagagccgtttaaaggcgaagagcggatcctgattaactcgccgaaagtggcgacctacgatctgcagccggaaatgagctccgccgagctgactgagaaactggtcgacgccatcaaaggcggaaaatacgacaccatcatctgtaactacccgaacggcgatatggttggccataccggggtgatggaagcagccgtaaaagcggttgaagcgctggatcgctgcatcgaccaggtggctcaggcggtggaatccgttggcggccagctgctgatcaccgccgaccacggcaacgccgagcagatgcgcgacccggccaccggccaggcgcacaccgcccataccaatctgccggttccgctgatctacgtcggtaataaagcggtcaaagcggtcaacggcggcaaactttccgacatcgccccgaccatgctgtcgctgatgggaatggaaatcccgcaagagatgactggcaagccgctgttcatcgtggaataatccttccccatgaggggaaaggcgatgtattcaactacatggatcgcagcggcagttcgatccgtcctttacgccagcgcgctcagcgctggcgtattgctgtgcgcgtcatctgcgcatgccgacgatcgcgatcagctaaagtccatccaggccgacatcgccgccaggcagcgggcgattaagcaacagcagcagcagcgcgcaagcctgctcgcccagctcaaagcgcaggaagaggcgatcgccgccgcggcccgcaaactgcgcgaaacccaggatagcctgaaccagctcaataagcagattgacgagatgaacgccgctctcgcgaagctggagcgccagcgcgcgtctcaggagcggaacctcgccgcgcagctcgatgccgctttccgccaggggccgcataccggcatccagatggtgctcagcggtgaagagggccagcgcaatcagcggatgcaggtctatttcagctatttcaaccaggcccgccaggagactatcgcggagttgaagaaaacgcgcgaagagatggcggtgcaaaagtcgatgctcgaagaaaaacagagccagcagcaaacgctggtctacgagcaaaaggcccagcaggcgaagctggagcaggcgcgtaacgaacggaaaaagaccctttccggcctggagtcttccattcagcagggtcagcaacaattaagtgaattacgggctaacgaatcgcgcctacgcggtcgtatcgcccaggcggaagctgccgccaaagcccgcgccgatcgggaagcacgcgacgcgcaggcggtgcgcgaccgccagcaggaagcatcgcgcaaaggcaccacctataaaccaacggaaagtgagcgttcgctgatgtcacgcaccggcgggctgggctcgccgcgcggtcaggcgttctggccggttcgcggtccgctccttcatcgatatggcgaacagctgcaaggtgaactacgttggaaagggatggttatcgccgcgtctgaaggcaccgaagtcagagccattgccgatggtcgggtcattctggccgactggctgcagggctatggtctggtggtggtggtcgaacatggcaaaggcgacatgagcctgtatggctataaccaaagcgcgctggtcagcgttggtacccaggtgcgtgccggccagcctatcgcgctcgtaggcagcagcggcggtcagggccgtccgtcgctctatttcgaaattcgccgccagggtcaggcggtcaatccacagccgtggttgggaagataagttttgcttcaatttcgcgcaattgctcttgccgtagccggttcgctggctctggcggcgccagcgttcgctggcaaactctccatcgttattgacgattttggctaccgcccgcagaccgagaatcaggtgctggcgctgccggcaactatctccgtcgccgtgctgccgaacgcgccgcacgcccgggaaatggccactaaagcgcataatcagggccatgaagtgctcatccacctgccaatggcgccgctcagcaaacagccgctggaaaaagacaccctgcgtcccgaaatgagcagcgaggagatcgagcgcattattcgcgaggcttacggcaaagtcccttacgccgtcgggctgaataaccatatgggcagcgcgatgacctccaacctgtttggcatgcagaaggtgatgcaggccctggagcgctacaatctctattttctcgacagcgtcaccatcggcaacacccaggccatgcgcgccgcgcagggtaccggcgtgaaggtgattaagcgcaaggtgtttctcgacgatacgcagaatgaagccgatatccgcaaccagttcaatcgcgccatcgccctggcgcggcgcaacggttcggcgatagccattggccatccgcatccgacgacggtgcgggtgctgcagcagacggtctataacctgccgccggatatcacgctggtgcgcccgagcagcctgctgaacgagccgcaggtcgacaactcgacgccaaactacgcccagccgcccgcgcaacaaacgcagcagaagccgcgtaatccgttccatggcgtgaagtcttgcaaaccgaagcgcccgctggagcctgtgaacgccagccgcttcttcactatcctcagcgatagcatcagccagagcgcgctgatccagtactatcgcctcaaatggcagggctgggacaaccccggcaactagaccactcaggggtccgttcgcttttgcgcgacgggcgcctggttatcttcgtgggcgtaccacgccttaaaatatttcagaaagctgtaaaacgtcgcgtacaggccggtcaccacgccgaccttgccatagcgccacgccccgctaaacagataccacttaaagaaagcgccaatggcgctgacgatcccccgcgtcagcgaaggtttgatctgctggtacttcaccagccgggtggtatagctgttcagcttattaaacacttcatgcagcgaataaaaggtatcgtggcgaacgaagcccggcagcctgacggagctcgcgtgtccgaccacctggtcatccaccggccgatcgttaaaccgcgcctgctggcggttaaagaggcgcaccggataatccggtgaggaaatggggtagatagtccgtacctgtttgcctagcacaaaccagtagcgcggcagacgccaggcgcaggtcgggtcaggctcctcccccgcttttagcgcctgaatggccgtcaccacgtcattatcaagaatttcgtcgctgtccatgcacagcacccagtcatggctggccagcccgatggcatagttcatttgcgcgccgtgggctttataggcatggtgatggacggtgagaccaaactgctggcaaatagcgacggtttcgtcggtactgccggagtcgacgacgatacattcatcggccaccttcagcagaggcggcagcacctccatcagcaggcgcgcagagttacaggtcagtaagcatacggagagtttaagcatgatagttacaaagttaaactgcgactaaacacactgtataagcgaataaccgtaaaatcgatgtagaaattgtgcgcttaatattaagcaggctaaaaatgttatccaaatctaaattaaggcgcccgcaggcgccttttttgctgatttttacgccagcatgggggattagtcccagctcaaaaccactttaccggactggccggagcgcatcgcgtcaaaacctttctggaagtcatcaatgccgaagcggtgggtgatgatcggtgagagatccagaccagactggatcagcgccgccatcttgtaccaggtttcgaacatttcgcgaccatagatacctttgataaacagccctttgaagatgaccttggtccagtcgatggacatatccgacggcgggatacccagcatcgcgatacggccgccgtggttcatggtatccagcatgctgcgaaaagccggcggcgcgccggacatctccagacccacatcgaaaccttcggtcatccccagctcggccatcacgtcattaaggttctctttggccacgttcaccgcgcgggtaacgcccattttgcgcgccagctcaagacggtactcgttgacgtcggtgatcaccacgttacgcgcgccgacgtgtttcgctaccgccgccgccatcacgccaatcggaccggcgccggaaaccagcacgtcttccccgaccagatcgaaggagagcgcggtgtgcaccgcgttgccgaacgggtcgaagatagacgccaggtcatcagagatattgtcggggattttaaaggcgttaaaggccgggatcaccagatactcagcaaagcagcccgggcggttgacgcccacgccgatggtgttgcggcacagatgggtgcggcccgcgcggcagttacggcagtggccgcaggtgatatgcccctcgccggagacgcggtcgccaatcttaaaaccacgcacttcctgaccaatccccaccacttcgccgacatattcgtgaccgaccaccatcggcaccggaatggtcttctgcgaccactcatcccagttgtagatgtgcacgtcggtcccgcaaatggcggtcttgcggattttaatcagcagatcgttatggccgacttccggttccggtacgtcggtcatccagatgccttcttccgctttcagtttggataacgctttcatctcatacccttattaggcgatgacgcccagttgtttgccgatgcgggtaaaggcttccaccgcacgctcaatttgttcaggggtatgcgccgccgacatctgggtgcgaatacgcgcctggcctttcggtaccaccggatagaagaagccggtgacatagatcccttctttctgcagctcgcgggcaaagttctgcgccaccaccgcctcacccagcatcaccggaatgatggcgtggtcggcgccggccagcgtgaagcctgccgcggtcattttttcgcggaacagacgcgcgttagcccacaggcgatcgcgcaggtctgccccctcttcaaccatctccagcactttgatggaggcggccacgatggccggcgccagagagttggagaacagatacggacgggagcgctggcgcagccactcaaccacctctttgcgcgcggcggtgtagccgccggaggcgccgcccagcgctttacccaacgtgccggtgatgatatcgacgcgccccatcacatcgcagtattcgtgggagccgcggccgttttcgccgacgaagccgacggcgtgggagtcatcgaccatcaccagcgcatcgtatttatccgccaggtcgcaaacgccttgcaggttggcgatcacgccatccatcgagaacacgccgtcggtggcgatcagcacgtgacgcgcgccggcctcgcgagcttctttcagacgcgcctccagctcttgcatatcgttgttggcatagcggaagcgcttcgctttacacagacgcacgccgtcgatgatcgaggcatggttcagggcgtcggagataatggcgtcttccgggccgagcagcgtttcaaacaggccgccgttggcgtcgaaacaggaggagtagaggatcgcgtcttccataccgaggaaatcggccagcttcttctccagctgcttatgcgtatcctgggtgccgcagatgaagcgtaccgaggccatcccgaaaccgtggctgtccatgccggatttcgccgcggcaatcagttccgggtggttcgccagacccagatagttattggcgcagaagttaatcacgtggctgtcgccgacggtaatgtccgcctgctgcgccgaggtgatgatgcgctcttctttgaacaacccttcggcccgagcggtctccagattgctagttaactgtttgtagaaatcaccacgcattgcaactctccagattcggcaaaatttggcacatattacccaaagctatacgctgatacgagatgatgcaggcctgaatgaattatttgcagcataaatcacgtcagcccagcaccttattctgcgaatggctgtaggcttgctcatgtggtgatatgataagagcattcatgtccggattgtctccgggctctcaacttcaaaggtacagttatgatcatcgttaccggcggcgcaggctttatcggcagcaacatcgttaaagcgctgaatgacaaaggcatcaccgacattctggttgtcgacaatctgaaagacggcaccaagtttgtaaacctggttgacctgaacatcgctgactacatggataaagaagactttctgatccagattatggcgggtgaagagttcggtgaaatcgaagcaatcttccacgaaggcgcgtgctcttccactaccgagtgggatggcaagtacatgatggacaacaactatcagtactccaaagagctgctgcactactgcctggagcgcgaaatcccgttcctgtacgcctcctccgcggccacctatggcggacgcaccagcgacttcatcgagtcccgcgagtacgaacagccgctgaacgtttacggctactccaaattcctgttcgacgaatacgtccgccagatcctgccggaagccaattcgcagatcgtcggcttccgctacttcaacgtctacgggccgcgcgaaggccacaaaggcagcatggcgagcgtcgctttccacctcaatacccagctgaataatggcgaaagcccgaaactgttcgaaggcagcgacggcttcaagcgcgacttcgtctacgtgggcgacgtggctgacgtcaacctgtggttctgggaaaacggcgtttccggcatctttaacctcggcaccggccgtgcggaatccttccaggccgtcgccgatgcgaccctggcataccacaaaaaaggcagcatcgagtacatcccgttcccggacaaactgaaaggccgctaccaggcgttcactcaggcggatctgactaacctgcgcaaagcgggctatgacaaaccgttcaaaaccgttgccgaaggcgtaacggaatatatggcctggctaaaccgcgacgcgtaagaaacaagcatgaaaatattggtggtaggcccgtcttgggtgggcgacatgatgatgtcgcaaagtctttatcgtacgctcagggcgcgctatccccaggcgattatcgacgtgatggcgccagcctggtgccgtccgttgctttcgcgcatgccggaagtgaacgaagcgatcccgatgccgctgggtcacggcgcgctggctatcggcgaacgccgtaagctcggccacagcctgcgcgaacgtcgctacgatcgcgcttacgtgctgccgaactcgtttaaatcggcattagtccctttctttgccaatatcccgctgcgcaccggctggcgcggcgagatgcgctacggactgctcaacgacgcccgggtactggacaaagacgcctggccgctgatggtggaacgctacgtggcgctggcctacgacaacggcgtgatgcgctgcgccaaagatctgccgcagccgctgctgtggccgcagctgcaggtcaacgaaggggaaaagtcgcaggcctgcagcgcctttaacctgtccaacgatcggccgatcgtcggcttctgccccggcgcggagttcggcccggccaaacgctggccgcactatcattatgctgcgctggcgaaaaagcttatcgacgatggctatcagattgcgcttttcggctcggcgaaagataacgaggccggcaaagagatcatcgccgccctcagcagcgagcagcaggcctggtgctgtaatctggcgggtgaaacccagctggagcaggcggtcattctgatcgccgcctgtaaagctgtagtgactaacgattcggggctgatgcacgtcgccgcagcgctggaccgcccgctggtggcgctgtatggcccgagcagtccggactttaccccgccgctgtcgcataaagcgcgggttatccgtctgattaccggctaccacaaggtgcgcaaaggcgatgccgccgaaggctatcatcagagcctgatcgacatcaccccagaacgcgtcctgcaagagctgaacgaactgttagcggaaaaaaccgagcacgaggaagcgtaacggatgcgggtattgatcgttaaaacctcctccatgggcgacgtgctgcacacgctgcccgcgctaaccgacgccgcgcaggctatccccggcatccgcttcgactgggtggttgaagagggtttcgcgcagatcccctcctggcataaaagcgtcgagcgggtgatcccggtggcgatccgccgctggcgcaaagcctggttctccgcgccgatcaaagccgagcgtcaaacctttcgcgaggccgttcaggcggtaaagtatgacgccatcatcgacgcccaggggctggtgaaaagcgccgcgctggttactcgcctggcgcacggcgtcaagcacggtatggactggcaaacggcccgcgagccgctggcgagcctgttttacaaccgccgccaccatatcgcgaaacagcagcacgcggtggagcgtacccgtgagctgttcgccaaaagccttggctacgcgaaaccccagacccagggggattacgccattgcgcgccatttcctgcagcacgaggctagcgctgccgcgccctatctggtgtttctgcacgctaccacccgcgacgataagcactggccggaaacccgctggcaggagcttctcgatctgctggccgacagcggcgtccacattaagctgccgtggggggccccgcacgaagaggcgcgggcgaagcggctggcggaaggccgggagtatgttgaagtgctgccgcgcatgagccttgagcaggtggcgcaggttctggccggcgcccgggccgtcgtctcggtcgataccgggctgagccatctgaccgccgcgctggataaaccgaactttacgctctacggcccgaccgacccggggctgattggcggatacggtaaaaaccagcatatcgtgcggccggaaaacagcgccagcaccggcgatattgcggccagccggattcatcttctcctgcaaaatcaggggctgctctgatgggatccctgtttaagcagatctaccgctatacgcgccctcgcgcgtatcgccacaatgaaaatctgtggccttttacccgtattgcgcgtgcgccaagcggcgaaatcagcgcgttacgctataaagggaaaacggtgccgctggtcagcctgagcgcgctgaaaaacagtatgcagggcgaagtcctgctgaccgccaccggcccctcaacccgcaatatcgatttttccctgttgtcgaaaacgatcccggtgatgggcgtcaatggcgcctggcatcttgccgaccggctgcacttttcgctctataccatcgtcgacatggaatttttcgataagaagccggacattatccgcgccattgtcagccagccggatattttgctgttcaccaccatgcacgggatcgccaaaatcgtcgatcgctatggggacgcgctgcgctgccgtttggcgttgattgaggacggttgctataagatttaccagccgaaagtcgccagcgaagcgataaagcgcacttaccagcagaatgcggcgatgtgctttcatcctcagcgcccggatatctgttttagcaccgatattcgccagggcatctttgatgccggcacggtggtctactgggcgctgcaaattctcgcctggctgggcttcaatactatcctggtgagcggcctggatatgaccaactttaaccagccgcgattctacgaaacacaacaagaaaaattgccttcttacctggcaacaaaagtggataccctcgtcatgccctcctttgcgcatgccgcgcaggtactgcagcaacgccagattcgggtgattaatttttccccagaaagcgctgtgccggatactatcttcgaaaaggttgcgtttaatgagtactttaaaagtgagtaacttcgccagacagggttactcgattgtctttcctttgtttttatttttcagcgcgattttttgcatgtccacccggaccaataatctgctgcatttatcgatcctgctgctattgctgtcgctggtacgccaggaaaaccgccaggcgctggccggggtgttacgcgagcagtggcagacctggacgctgctggcggctttctttatctattacgccctcagtaatgtgtggggccatacgccgcagcatattgactcgccgatcacccacggcgtgtatctgaccgggtatctgttgctgatgacgatgctgctcagggacggacgaacccgccgactggcgatgctggcggtggtcggtgggatcaccgtgctctccctgtggacgctgattatcgaccatacgctggttctcaccgaacgagcggtctcccccgagaaccccggaccaacgaacgttatcgaccttgccggttactgcggcatcggcattttaatctgcggcatgctactgaaagaaaaagccagccactggctctatctgccggtggtcatcatgctggtgatgctgctgctcacccaaagccgcgggccgatcatcgccctggtgctggcggtcggctgtacgctgcacctgcacgtcttcacccgccgcaacctgctgatcgccgcggcgctggccgtgctggtagcgctgcttttggtcatgacgccggtgggcgacatgctgctcgcccgtttcgaggagctgggcacccaaagcgggctgcgcctgagcatctggcaccatacgctgtcggagatggccagccagccgtggctggggcgcggtttcagctatgaactggatttcatcaactacagcggcgagcacatcaccaccacccacagcgtgtatatgggcgccctgctgaaaggcggcatcgtggggttactgctgctgttggcgatcattgcctgcgggctatggcaggcgtggcgcaagcgccataccgacagccgctacagtctggcgatcctgttttacgcgctggtgtttatggcctcgcaggggatgtttatcatcagcaatccccgggaaacctgggtgctgttctggctgccgctgggcattgcgctcagcaaagggttggcggaaaaacgctaacaaaaagggccgtcagcggccctttttatattaactttttaaattaactgcgggcggcgaccagccggtcggcctgctctttaatcacgggccacaccgactcaatcgccacatcggcgacattcgcttcttcacagactatctgcttcgccttgtcatagcccggcgcccagatgtgatagccgggcagcccggtattcttgagtttgcgtttgttatagaccgccaccatcggcttatcgaaagcccgggcaatatgcacgatcgaggtgtccggcgtaatgactaaatcacagctgcggatcacttctacggcggagttgatggtgctgtcggcgatgtacagcgccatatccagccccagctggcggattttttcactgcgccccaccatcacgatacagacccggtaaggcagagcatgtagccgctcgaccagggtcgccacctggtgacgacagaagtctttatcctcggaggcggtaaaagggttaatggcgatacgcagttcgacctctccggcctgagaaagcaagcgggccactttctcccgctcatggcggcagccggggagatgatagtgatacgggcggtcgtcaacgatgccaaacagcttcaccacctgcttatagcgcagggaaatatggctgttgccgtcaaaaaaagcgattgagtgatcgtaaagtttatagggctctttattaaaaccaatcacgctggtcgcccgtaaatcggcgagtaatttaaagcgttcatagctggtcacgtcatcaaaatcgataaccgcatcaaaacccgccgcccgcaacgtatttaaggacatgcggggccgatataaatatacttgctgaatgaattctgagcctgctaatatttcgctgcatattggtccggttaacaccgaaacctgatatccccgttcggccagtattctggcgcagccggtcgtgaccaccatatcaccgactttatcatccagacgcaatagcagcacgcggcgcacagccgctgggtcgaaggctttacgcgccggcttatttctgtatcgatagttaattaaattaaatttaatgccgcggaaaaaagcattctttttccgcgttaattgtttaaggatacgcatacggtaccttgagctgtgttagcgctgtgtaattttccgctggtaatattctgccaacgtcatgcccttcacctgcggcgccagccagctaaaaaaggcttcgaggtcagcgtataaacgctcaatatcccgttcattctggaacgtggggctgccgccgggcatatactctgaagagtggagcatatattccacgtagtcattgccctgcgtcaacgtttgttcgacgacttttttcatcgtctccacattgccgcccatcggtcgcagccagtgtacggagggggaacgcactttgccgcgcaggcggtcgtagccctgcttcacgctgttcatccacgctgagtgcttgtactggatgctcatcggcacttccagcagcggcgagtggccctcgcggctgatgtcattttcatcgaggaaataggcatgctgcggaaagcggcgataatcggtcccgccatcgccctgcggcgcccccttggcggtcttccagttcacccgcggggtcaccgagcaatccacctgatacccgtactctaccagcagacgcgcatagcgctcgtcaaaagcccagcgcccggcgcgatggctaaccattttggtctggaaggtatcctccagcagacgcgtcatatagtcgaccttctcacgcatcatagcgtcgctgtattcaataagataaggcttatggcgccagtcatctgcggtcagcggctcggtcggcgggctgttccacgcatgcagatgcatgccgacttccgcggtgccgcgggcaatcacgtctctggcgaattcgatataaaaggggtcgatggccatttcatagttggtcaaatagaccggtttaaagccatacttttcgcaaagctgctgaaaacgcggaagataacgcgcattctcggtggtgatgctgtcatgtttttgccagaggttatcgccctctgtatcaatcgtgatgagaaatgcgggattgtgcacgaaaacgtcctcaggccatacgtatcgggtcatggtagagcaatacaacgcttctctcaatctgtctgatcccctagaatcggaacccttatcctggatgaagaacagagtatgacgcctgaaaccctctcccgcggcccgttgaacccggcgcggatcctggtcattaagctgcgccatcatggcgacatgctgctgatcacgccgcttattcacgcgctgaaacagcagtaccccgccgccagcgtggatgtcctgttgtatgaagagacccgggatatgctcgcagccaaccccgatatccaccatatttatggtctcgatcgccgctggaaaaagcagggaaaaaggtatcagctgaagatgcaatggcagctcattcagacgctgcgccagcagcggtacgatatggtgcttaacctggccgaccagtggccgagcgcggttatcagcaaactgaccggcgccgcgacgcggattggttttgattttccgaagcgccgccacccggtctggcgctattgccacaccgcgctggcctccacccaacagcacaaccagctgcatacggtacagcagaatctctctattctcgctccgctcggtctccagttgaacgatgcgccggcgcggatgggctacagcgaagcagactgggccgccagccgcgccctgctgccggaggacttccgggaacactacatcgtcatccagccgacgtcgcgctggttctttaaatgctggcgcgaagatcgcatgagcgccctgatcaacgcgctgtccgccgaaggatacgcggtggtgctcacctccggccccgatgctagagagaagaagatggtggataccatcatcgccggctgcccgcaggcgcgactacactctttagccggccagttaacgttgcgccagctggcggcggtgatcgatcatgcccggttgtttatcggcgtcgactcggtgccgatgcatatggctgcagcccttggcactccgctggtcgccctgttcggcccctcgaagctgaccttctggcgtccgtggcaggcgaaaggcgaggtgatctgggccggcgacttcggtccgctgcccgatccggacgctatcaacaccaacaccgacgaacgttatcttgatttaattcctaccgacgccgtgatcgcggcggcgaaaaaggtactagcatgagtaaattcaggctggctctggtgcggcagaagtaccgcccggacggcggcgcagaacggtttgtctcccgcgcgctggaagccctcgacagcagtcatttgcaactgaacgtcatcacccgcgaatggcaggggccggtgaaaccggactggcagatccatatctgtaacccacgtaaatgggggcgcatcagccgcgagcgcggctttgccaacgccgcgcgcgagctctggcagcgcgagtccttcgacctggtgcagagccatgaacgtattcccggctgcgatctctaccgcgctggcgatggcgttcatcgccgctggctgcagcagcgctcgcgcattttaccggcctggaaaagccgcctgctgttcgccgaccgttaccaccgctacgtcatgcaggcggaacgcgagatgtatgaagactcacacctgcgcggggtgatctgcaacgccgagatgatcaagcgcgagattatcgaagactttggcctgccggcggagaagatccacgttatttacaacgccattgacaaccagcgcttcctgccgccagacgaagagacctttgccgccttacgcgccaaatggcagctgccgctgcaggcgacctgcctgatctacgtcggctccggctttgaacgtaaagggctggcggcggcgattcgcgccatcgcccctaccgatcgctacctgctggtggtcggcaaagataaggatcagcctcgctatcaggcgctggcgaagagcctgaactgtgaagcgcgggtgcgcttcttcggcatgcagtcggagacattgcccttctatcaaatggccgatggtctgctgctgccgaccctctacgatccgttccccaacgtcatcctcgaggcaatggcctgcggtctgccggtgatcaccaccaccggctgcggcggggcggagtttatcgtcgacggccacaatggttacgtctgcgacgctctggatatcccggcgctacagcaggcggtaatggccctgcccgcgcgcgcgctgggctccgcggaaggcggtcacgcccgcgagcgcattatggcctgcaccagcgagcgactctcaacccagctgctttctctttatcaggatctggtgaaataacgatgcgcatcttatttgtgattgacggtttacccggcggtggcgcggaaaaagtggtcctgaccctggcggcacagttcctgcgcgacggcgatcgggtgtcgctcatttcgctgcgcgatgtctgcgagtacccattgcccgaggggctcgactaccaggtagttgccgatcgctgccgtaaaccgtggcgcaagctgaccgagctgtcccgccgcgcccgccagctggatgccgcggtcgtgcgggccgaacagcaggggcaatttgaccttgtgctctccaacctgcacaaaaccgaccgcatcgtcgcccgcagccgggcgctgcgcgagcgtaacgtctggttctgtctgcacggcgtattctctgcctcctatctcgggcaccgcaccggctttgaccgctggatgaagcagcagaaaattaagcgaatttatcagggtcgcaacgtggtgacggtttccgacgcggtggggcgagatctggtggaagagtttgccctgcgcccggcacagctgaaaaccatctacaatcccttcgatatcactgccctgcgcgccgaggcggaagccgatagcgagcgcccggacggtgactacctgattcacgtcggtcgcttccatccgggcaaacgccatgaccgcctgcttgaagcctatgcgcagagcggcatcgacgcaccgctggtgctgctaggccagggaaaaccggagcaagagcagcgcctgcgccagctggcaaaaacgctgcacattgacgatcgggtgtggttcaaaggttttcagaaaaaccccttaccgtggatcaaaggcgcacggatgctggttttgagctccgatagcgaaggattcggcaatgtggtggtggaggcgctgctgttacatacccctgtcgccagcacccgctgccccggcggcgtcaccgagatcctcaccggcgaacttgcccgcggtctggcggatctgaccagtccggcgctggctcagacgatgcaaagcatttaccataacccgccggccatcgacgatgccgcgctggaaaaattcagcgtcgtatccatttgtcagcagtaccgtcagctgcagcgcacctgacgccgttagttaaccaggatcgaagatttatgagtcaaacgcctttattgagcatcgtggctgccgtctacaacggtgagaaatttctagcgcaattctttgagtgcattgaacagcagcagctggacagctatgaactgatcctggtgaacgatggttcgacagacaacagcctggcggtgatcgccgaatggcaggagcggctgcagaacgtccaggtgctggagcaggaaaaccagggcgtctcggtcgcgcgcaataccggcctcgccgccgccagcggcaaatatctcgcgtttccggatatcgacgacaaactctatccgggcatgtatcgcacgctgctggagatggccgagaaagaacatctcgatatcgccacctgcaacggcacctatgtgtacgaaaagcgccgcgagagccacccgatcttcccactggatcgcctgccctcgacgggtgtgctgccgggccatgtctggcttaagcaggccttggactcgcggaagtttctgcacgtcacctggcttaatatttatcgtcacgactttatccgccagcatcacttccatttcgagcctggcctgcgccatcaggatatcccatggaccacagaagccctgctggccgcggagcgcgtgcagtacaccagtcagcagttctatgattactacattcactctgagtcggtgtcgcataagccggacaacgacgacacgctgatgcgttcggcgcgccactatatgaagattctggagatgctggaggcgattaaccagcgctacccggataaagtacgccatatcgccgcctgtcgctggcagatcgccaaagaaggcctggggatcatccataccttcgatagcatgaaagatgagtccaaaaagcatgttattattaacgaattcttcgaccgcggtatctggcggttaatctggaaaaacgcctgtactttccgtttacgctggcgcctgggacgccgttatctgcgtattaagcgttatcgccacgcgggatagaccaaaaacccgctgtttccgccaaagagatagctttacgcgggctaaatgcttagaatttgcccgccaaaacagagaacggataaatagtttggaattgctttataccaccctactttaccttattcagccgctggtgtggctgcggctgctgctgcgcagtcgtaaggctcctgcctatcgcaaacgctgggcggaacgctatggcttctgtcagaacaaggtagagccggatggcattctgctgcactccgtttccgtcggcgagaccttagccgccattccgctggtccgcgccctgcgccaccgctacccttctctgccgatcaccgtcaccaccatgacgccgaccggctccgagcgcgccatgtcggcgtttggcaaagatgttcatcacgtctatctgccctacgatctgcccggcgccatgaaccgcttcctgaacaccgttcagccgaagctggtgatcgttatggagaccgagctgtggccgaatatggtggccgcgctgcataagcgtaagatcccgctggtgatcgccaacgcgcgcctgtccgaacgttccgccaaaggctatgccaaactgggcggctttatgcgccgcctgttgagccgcattacgcttatcgccgcgcagaatgaagaagatggtaaccgcttcctctctctggggctgaagcgcaaccagctggcggtcaccggcagcctgaaattcgatatctccgtcacgccagagctggcggcccgggcggtgacgctgcgtcggcaatgggcaccgcaccgcaaggtctggattgccaccagcacccacgacggtgaagaacaaatcatcctccaggcgcataaaaaactgctggagactttcccgaacctgctgctgatccttgttccccgccatccggagcgcttccctgacgcccgtgagatggtacaaaaggctgggatgagctttactctgcgcagcaccggcgagatcccctcctccagtacccaggtagtcattggcgataccatgggcgagctgatgctgctctacggcattgccgacctcgctttcgtcggcggcagcctggtggagcgcggcggccataacccgctcgagccggcggcgcacgccattccggtgctgatgggaccgcataccttcaatttcaaagatatctgcgccaagctgcagcaggacgatggcctgatcaccgtcaccgacgcgaactcgctggtcagggaggtgtccacgctcctgaccgatgaagattaccgcctgtggtatggccgtcacgcggtggaagtgctgcaccagaaccagggcgcgctgtcgcgtctgctacagttactgcaaccttacctgccgcagcggagtcattaatgtctaaccggctttccgtggtgatgatcgccaaaaacgcagcggacctgctgccggattgtctggactccgttagctgggcggatgaaattatcgtcctcgactccggcagtactgacagcaccgtcgagctggcccgccgcctcggcgcccaggtctatacccataccgactggcgaggctatggcattcagcgccagcgcgcgcaggattacgccaccggcgactgggtgttgatgatcgataccgatgagcgcgtcacgccagaactcaggcaggctattcttaaggtactggacgccccccagcgcggcgccatctacagcatcgcccgccgtaactattttctcggacgctttatgcgccacagcggttggtatcccgatcgcgtcctgcgcctgtacgaacgcgcccgttaccgctataacgataatctggtccatgaatcgctggatagcctgggcgccgaggttattccgctgaccggcgatctcctgcacctgacctgccgcgacttcgctggtttccagcaaaaacagctggcgtatgccgccgcgtgggcgcttgagcgtcaccagaagggcaagaagacctcgatggcagggattttcagccatacgctgggcgcgttcctcaagacgttgctattgcgcggtggggtgctggacggtaaacagggatggttactggcgatggtcaacgcgcagtatacgtttacgaaatataccgagctgtgggcgctgagccacggctactcggagaaagagtcatcatgagcacaaaagcgatctatccgggtaccttcgaccccatcaccaacggtcatatcgatattgtcacccgcgcggcaagtatgttcgataaagtggtgctggctatcgccgccagcccgagtaaaaagccgatgttcagccttgatgagcgcattgcgctggcagagcaggcgacggcccacctggtgaacgtggaggttatcggcttcagtgatttaatggccaatttcgcgcgcgcgcagcaggccaatatcctgatccgcggcctgcgggcggtggcggatttcgagtatgagatgcagctggctcatatgaaccgccacctgatgcccacccttgagagcgtgtttctgatgccgtgcaaagagtggtcgtttatctcttcctcactggtgaaggaagtggcgcgccaccagggcgacgtttctcactttctgccagctaatgtgcatcaggcgctgttgaataagctgaagtaacgcatctgccgggacatgagccacgtcggctggcgcagcactgcgccgctgggtcattcacaccggctctgtcccggtctttgtgccagatggcgctacgctgacctggcctacaaacgcccccggcccaccagatgcgcacccgcaggcccgctgacctggccgacaaacattcctgttcctgagaactacttctggcactgacggcaataaaaggtcgcccgctgggcatgtttggtcccgacgaccggcgtgccgcagatccggcagggttcgcccttgcggccatagacctgtagctcctgggcgaaatagcccggcttgccatcgctttgcaggaaatcctttaacgtggtgccgccctgctctatcgaacgcagcaggaccagcttaatcaccttcaccagctgctcacactcttcccgcgacagcgaggacgccagccggtcaggatggatcccggcggagaacagcgattcactggcgtagatattccccacgcccaccaccagcttgttatccatcagccagggtttgatcgcggttttcttcttcgcgcatttttgctggagatagtcggcgttgaacgcgtcgctgagcggctccgggccaagatgggccagtaccggatggccttccagcgttctggtccacaaccaggcgccaaagcggcgtggatcggtgtagcgcaacaccttgccgttactcatgaccaggtcaacgtgatcgtgtttttcagcaggcagctcttcgctcaggatgcgcaggctccccgacatcccaagatggacgatgatccagccgtccggcagctccagaagcaggtatttggcgcggcgacgcacgctgagaaccggaacgtcgctcaggcgatagatctcttcggaaaccggccagcgcagccgtccgttgcgcacgacggcgtgcagaatggttgcgccaaccaggtgcggctcgatgccgcgacggctggtttcaacctctggtaattcaggcatgattttcctccgtttacccgacgtattgtgcttcacggacagatgactgaaaagggagtatgtgaaagcaatatgggggagttttaaaaacaaaaaaccccgccgaagcggggtttttatacaaggaggctaaaattatttaattttagcttctttgtagataacgtgctgacgtacaaccggatcgtactttttcagttccattttttccggtttggtacgtttgttcttcgtggtggtgtagaagtgaccagtaccagcggaagaaaccagcttgattttctcacgaatacctttagccatgatttatttcctctaagtacttagtacttttcgccacgggcacgcagttcagccagaactgtatcgatgcctttcttatcgattacacgcatacctttagcagatacgcgcagggtgacaaaacgcttctcgctctcaacccagaaacggtgagagtgcaggttcggcaggaaacggcgtttagtcgcgttcagtgcgtgggaacggttgttaccggtcaccggacgcttgccagtaacttggcagactcgggacatgtctattctccaaaaatcaaattagctcgagcttcgtatggggtattggcgcctcgtcaggctttacagcctggtcatcgcagttcaatgtgaactctcgactgccaggcccaaatgccaaacccgagattctcaaaggtggcgtagtatacgctgactcggcgatgtgctcaagtcccgaacagacaaagatcccgaaggatcgccagttcggggctaaatccagccacgttcggcaaaagatacatacgcaccgcggccgataaccagatgatcaagcacgcgtatctccatgaatctacaacattttatcaccctttcggtaatcagtctgtcggcctgacttggctccgggctaccggagggatgattatgcgcaaggatcacggcggcggcgttcactttgatggcttcgcgtacaatttctcgcggatgcacctcaacgtggctaagagtaccagaaaaaagacgactatgtttcaacacccggttctgattatctaaaaagatcaccataaagatctcgcgctcctcttccgtcagctggctttgtaaaaactcgcgcgtcatcgagggggtgaccagcgcggcctcctcgaccagctgcgagctaaaatagcgtcgcgccagctcggcaatgcccttcagttgggcatatttcgccagccccagtccgtctacagcaatcagttgcgctttatcagcggaaagcagagcgtagagtgagccaaaacgctgcagtaacgcctgggcatagctgagcacatcctgacgacgcgtgccgacgcgcagaaacagcgccagcagctcaacatccgttagcgtttcgatgccgtattgcagcatcttctcccgtggcatcagattttccattccgtccatgcgccctcctgggtgaatcagcctatcctggcacagcctgccggcgctgccgacccgccgattttcaccctgcgtagccgctcgcaaagtgaatgcccggcagaggcacgacggcggcaggattgtgataagatgcgcggattctggtctacggcaacaggaagacatcatgatgactctggcgggtaaaaaaatcgtcctgggcgtcagcggcggcatcgcggcgtataaaaccccggaactggtgcgccggctgcgtgaacgcggcgcggaagtgcgtgtcgcgatgacggaggcggcaaaagcgttcatcaccccactcagcctgcaggcggtatccggctatccggtttccgacagcctgctcgatccggcggcggaagcggcaatgggccatattgagctcggtaaatgggccgacctggtgatcctcgccccagcgaccgccgatttaatcgctcgcgtggcggccggcatggccaacgatctggtgtcgacgatctgtcttgccaccccatccccggttgccgtggtgcccgccatgaaccagcagatgtatcgcgcgcaggccacccagcataatctgcagacgctcgctacccgcgggctgctgctatggggaccagacagcggtagccaggcctgcggcgacgtcggcccggggagaatgctcgatccgctaactatcgtagacatggccgcgcagcatttcgcctcccctgtcaaagatttgcaacatctcaacctcatgattaccgcgggcccgacccgtgagccattggatccggtgcgttatatcaccaaccacagctctggcaagatgggcttcgcgattgccgccgccgcagcgcagcggggcgcgaacgtgaccttgatcagcgggccggtatcgctaccgaccccgccgtttgtgcagcgcattgatgtcactaccgcgctggagatggaagcggccgtccaggctggcgcccagcagcagcacatttttattggctgcgccgcggtagcggattaccgcgccgccgtcatcgccgaagataaaataaaaaaacaaggtgatgaattaacaataaaaatggttaaaaacccggatatcgtggccggggtcgcggcgctaaaatcacatcgcccctacgtcgttgggtttgccgccgaaacgaataatgtggaagaatatgcgcggcaaaaacgtgcccgcaagaacctcgacctgatttgcgccaacgatgtttcccagcctaatcagggctttaacagcgacagcaacgcactacaccttttctggcaggatggggaaaagcgcttaccacttgagcgcaaggaactcctgggccaattattactcgacgagatcgtgacccgttatgatgaaaaaaatcgacgttaagattctggacccgcgtgtcggccagcaatttccgctgccgacctatgccacctccggctccgccggacttgacctgcgagcctgtctcgacgacgccgtagagctggcgccgggcgcaaccacgctgttgccgaccggccttgcgattcatatcgccgatccctctctggcggcggtgatcctgccgcgctccggcctgggtcataagcatggcgtagtcctgggcaacctggtgggccttatcgactccgattaccaggggcagctgatggtgtccgtctggaaccgcggtcagcagagctttattatcgagccgggcgaacgtatcgcacagatggtctttgtgccggtcgttcaggcggaatttaacctggtggaatccttcgatgccaccgaccgcggcgaaggcggcttcggtcactcagggcgtaaataagcccagcaacacggaatctgcatcccaacgcgcataacgcaataacattaccgcaagccctggtttgcggtcgcgttgtggatgtctgcctgacaagtgcttattttcaggggtattttaaaacatggcagaaaagcaaactgcgaaacggaatcgtcgcgaagaaatacttcaatctctggcgctgatgctggaatccagcgatggtagtcagcgtattaccaccgcgaaactggcggcttccgtcggcgtctctgaagccgcgctgtatcgccattttcccagcaaaacccgcatgtttgacagcctgatcgagttcattgaagacagtctgattacgcgcatcaatttgattttgaaagatgaaaaggacaccaccgcgcgcctgcgcctgatcgttctgttgattcttggctttggcgagcgtaatcctgggctgacgcgtatcctcaccgggcacgcgctgatgttcgaacaggaccggcttcagggtcgcatcaaccagctttttgagcgcatcgaagcgcagctacgccaggtgatgcgcgagaaaaaaatgcgcgaaggcgaaggctacaccctcgacgaaaccctgctggccagccagctgctggctttctgcgagggcatgctgtcgcgctttgtgcgcagcgagttcaaatatcgtccgacggatgatttcgacgcccgctggccgctggtcgccgcacagctgcagtaaatcctcacatgcagccgccaggctgcatgattctcctcgcaatctgcgtaagtttgtcgcaaatcccagggccattggttgaattgcccaatgcgcgtttccgctttcctttcctactatccagcttgctgaacatttcaccctcccccaacaccacccgacaaggagagatttgatggcgacgtcacggcgggatttactgaagataggcgggttggcaaccgcatcgctactggtcagtcaaaaaagcttcgcagcatgggccccctctgaacgctatccggacccacgcatcgtggccgtcgatgatagctttcgtcgctatatgcttgccagcgcaaaggtcgaacgcatcgccagcggcttccgctgggcggaaggcccggtctggttcggcgacatgcgaatgctgctgtggagcgacattccgaataacgccatcatgcgctgggatgaagtcagcggagaaaccagcgtctttcgctacccggccaattatagcaatggtcacgcccgcgacagacaggggcgcttaatcagttgcgagcacgacacccgccgcattacgcgtaccgaatacgatgggtctgttaccgtactggccgatagctaccagggtcatcgcctcaattctccaaacgatatcgttgtgaagtcagacggcaccatctggtttaccgatccgccatttggcatcagtggtttttacgaaggccacaaagcaacatcagaattgccgcaaaacgtctattgtctggagccggaaagccgcaaactgagcgtggtactgggcgacgtaaaagggccaaatggtttgtgtttctcgccggacgaaaagaccttatacgtggtggaaagccgggcgacaccgaaccgcttaattctggcgtgggatgtggaaggcaatacgctgaaaaataaacgggtatatctcgactgtgggaacggtaccgccgatgggatcgcctgcgacgcagacggcaatctgtggtgcggatggggaagcggaaacgaagaactcgacggcgtgcggatcttcaacccacagggtaagcatatcggcaccattaaactgccagagcgctgcgcgaacttgtgctttggcggcgaacagcgcaatcgtctgtttatggcgtccagcacgtcaatctattcgctgtacgtcaatgcgcagggcgctaagctgatatagcggaaatccggcagccgaggctgccgggcgcatcatcagacgccgtaggcttcacgataggcgcgaactgacgccaggtgttccgccatctcgggtttctcttccagataagtaatcagctctttcagagtgatgattgagataacctggcagccgtaatcccgctccacttcctgaatggcggagatctcgccgcggccgcgttcctgacgatccagggagatcagaacgcccgccagctgcgcgccctgggcctggataatctccatggattcgcgaatcgccgtaccggcggtgatcacgtcatccaccagcattacccggccctgcagcgggctaccgaccagattgccgccttcgccatgggtttttgcctctttgcggttaaagcagtaaggcagatcgcggtcatgatgctcggctaacgccaccgcggtggtggtggcgattgggattcctttgtaggccgggccaaacagcaggtcaaactcaattccggaatccaccagcgcctcggcataaaaacggcccagcagagccagatcgcgcccggtgttaaacaggccggcgttgaagaaataggggctcttgcgcccggatttcagcgtgaattcgccaaacttaagaacctgcttgctaagcgcaaactcaataaactggcgctgatacggcttcatggattcgctcctttggtacttttcatcattgtcagactgcgcgctccccttcgcaggtgtgatgaaggataaagcgcaaaaaaaaggcgacttctcagtcgccttaatcattaattttctaacgccgccttctgcgtcgtgataatggactcgatcccccctcgggctaacgccaggagagtgaggagttcttcatgggtaaacggctcaccttccgcagtgccctgcacctcaataatacggccatcttcggtcatcaccacgttcatgtcggtctccgcggcggagtcttcgatgtactccagatcgcagatggcttcgccatttacgataccgacggagaccgcggccaccatccctttcatcggattggttttcagcttgccggcggcgaccagcttattcagcgcatcggccagcgccacgcaggcaccggtaatggaggcagtgcgggtgccgccgtcggcctgcagtacatcgcagtcgagagtaatcgtgaattcgcccagcgctttcaggtcaaccgctgcgcgcagcgcgcgggcaatcaggcgctgaatttccatcgtccggccgccctgcttgccttttgccgcttcacgcgcgttacgcgtgtgcgtagaacgcggcagcatgccgtattcagcggtgatccagccctggccctggcctttcaggaaacgcggaacgccttcgtcaatagaggcagtgcacagcactttggtatcaccgaattcgaccagcacggagccttcagcgtgttttgtgtaattacgggtcagggtgacgggacgcacctgattagcgctacggcctgctggacgcatgatagaaatctccggcttgaaacgaatgtgagggcgcattatacgaatttcatggcaaaaagcctatgcccactccagccggacgcgccgataatgtcagtccagcgttttacgataagatttcaaccccacgccaatgacaatcaccgccaggcctatcagcggcaagaggtcaggcaacaatgccgttgctgaatagcctttcagcataatgcccttaaccaggcggatgaagtaggtcagcggtaaacaggagccaatggctttcgcccagtctggcatactaataaaggggctgacaaatccggacagcataagtgaagggatgaaataaaatgacgacatttgcagcgcctgcagctggttttgtgctaagccagaaataccgataccaattgacagacaaagaaagacataaattaacagcacaaaaaatagtaggaagacgctaccgtgaagggggatatcgaacaacaaaacggcggcaatcaggattaacgtcgcctgaaacagaccaatgataacaaaaggcgttattttcccaataatgacctcaagcccggacaacggagagaccagtaaattttctaacgccccgttttctcgctcgcgggtaatagacagggcggtcatcaggattaacgttgtactgagtatagaccccataataccgggaatagtattaaactgggttatcccctcagggttaaacatgcgatgaatgataagctcgaaatcatcctctttttgcaccacacgcatgtcgcccggcaaatcgtgctgaaacatcgacttcgccacctgcacaagggcgctgagcgcattccccgtggtgatcggatcgatggcatccccctgaattaatagttgtggcttttctccacgcagtaacttgcgcgtaaacccttcagggatcgtcacgataaaagtgacatccccccgcacaaaggctttctgcgccgcctcttctgaatcgacaggaatcatcgaaaaatacccggtattttgcgcttccgtcacaaagatttgactcatgcgttcggtatcataatttagtaaggcggtcggaagattatgcggatccatattgatggcatagccaagaatgatcagctgaaaaagaggtgtcaggagcaccatactgatgctgactttatcacggcgtagctcgtgaatttccttaataaccacgccaatccaccgcgtaatggagaagctaaaattaatttttttcacaattatttttcatcaagtaggtaaatgcatcttccagattggtatccaccttacagaactcataaccctgttgcgtaaaggcaaaaagcgcggattttaacttcgcttcatctctggatgtaatataaagctgattgccaaaaatgaccgtttgctcaatatccggcaagcgctgtagctggctttcaagcagcgtcagaccggcgccgctggttcgcatggtgatcaaattctgggaggcgataatcgacgcaatagtgccattcgccagcagccgaccataagatagataggcaaccttatggcagcgctcagcctcatccatataatgcgtgctcaccagtatcgagatcccccggtcagagagctggtgcagcatttgccagaactctcgccgcgccttgggatccacgccagcagtcggctcatccagaaatagcaaaacaggttcatgcaacatacaggcggcgagggccattctttgcttccagcccccagaaagctccttagccagctggtgctgtcgggcagtgaggcctaactcagaaagcgcacgttcaacccgatctctacgccgatcgaggctatataatcgcgcaataaaaagtaagttttcccgaatagttaaatttccccacattgagaaatactgggtcatgtagcctatctttttctttatcttttcccgctgcgtaaagatatccatacccagacaagtaccttcaccggaatccggcgtaatcaaaccacacatcattcgaatcgatgtcgtttttccgctaccgttcggaccgagaaaaccatagatctcgccttttgctacctgtaaagagaaatcctttacgacgtgatgctcgccaaaatgtttattgagattttttacatcaatacaaagattattcatcgccaataatctccacatcaaacggttggccgattttcatccgccctgcctgctgcagcgcagggatagcctccgccataaaaatgagcttctcacgacgtttcgtactataaataactggaggcgtaaactcggcctcagggctgatatagttaataacgccagcaatgggctcagcgcaaccatcgcatataagttttaccttagatccgattttaaatttaccgagcttcgcttcgggtataaagaagcgtacttttatattctcaggaggtaacagactgattattggtttaccagcagaagggcgctccccggcacgataaataatatcgaagactttagcattgaccggagaaacaatcgtcgtttgctggacatcccacagcgccttatcccgttcgagttttgccgcggccaccattgagcgctgcttgctaatctcatcctgccgggcagggagttgccgtgctttgagttgattaattaactcttcaacctgtgcgcctttttgagttaattcatcccggatatcctcccattccgcaagcgatatggcatgattggcgtaaagattacgatatcgcccaagctgccgctttacctgggattctgccgattgtgctttttttatctgcgaacgtataatatccaactcttcaggccgttcgccagattccagatttcgtaatagagcgctctctgctgatagcttttcctcagcgcgcaggaaaatattttgcgcatcgaaggactcaatcttcactaactcctgtcctgcggcgacgttatctcctttattgatcaagatccgttctattttttcgttaccagaatatgaaaggtatacaaattctccatgtgaataaccggataacatgttatctgatttgttatcacatccggtgagtatcagcaccgatatcaatataataaatatatttattggctttcgcattaaaacgcatccatacgcatatcatttcccttatcactacggtctggattaaggcacgctcgctccaggaccgtacagtcatcgtcagtttaatcttttaaataatgcttaacgtagctttcattcaatttatctatagagctcagatttaacccagctatcgaattaaaagaatcatcttttgtgaatgcaagaatcgacgatccgcccggggagaaccatttagcactctgtttaaaaggccagggaagttcataaccttcttctctcagcaggtgattaagcatgctccagtctgctctaaaatcttcgccacaaaatggagtatcatcctgtacattttcggcagtgaacaatgctatcggcgtacaaaaatcagttgtcgaggaaaagtatatattatagaaactgatgatgagtttctgtactttttcaggaaaagttccaggaatggtcagcacacccagcaagtatttatagtccggatatctttttataaagtcaaatatcccttgccataaataatcaagcaccttacttttttgataaggtttctgaataaagccgcggccaatttccacacacttctctaaacaggaataggcattatcatggtatttaaacaagctgttgctatagaggcctgttacaccatgttgggccagctgctcgccaacgggcataacacgatatgctcccaggatttccacatcagaaggatcccacaaaatgatatgataataactttcatcaaaaacatcgttatctcggtcgttaccagttccggcaccaatatcgcgataacagcgttcgcgtaagcgccctaactcatcaataataggtgaggttcggttagtattacagcgatatatcactagttttctaccgtcttcaaactgccttaatatttcgcactcctctattgcgctaattagctcctctttacctggttctaattcttgcggcgcaatcgtatctaacatagccgggccattcttcgctatactctggaggtgcgtcaaacatacatttgccgcggcagaaagatctttattgtattctttaaacgaggataaggctatttgctgtcctatattgattttcatggtcttgccatgatggcggagagcttcacgaataaccatcatgttcgacagttgccgccagaatgttgcagtaagataataaatcttactgtttgctcccgtaatatgaattggtaccaatgctgcattatttctcatagcaagctgtaaaaaaccggggttccacttatgctcctgtaacccggaaagagaccagttagccagcttacccgcaggacatataatcaatacgcctccttttcgcaggtgatcgttcatctcgcggaattttttatggctcatcttaccggccatattctcaattccaatggtaagttccgatacctgggggaatataattggcaaaacgtgattggctattatttttatatcactcctgactcgagagaccgtatgtattaagctaagtccatcgattaccgtcggatgatttgaaataacaaccgtagccccatgcccaggtatgttgttaagttggtggcgttcgctttcacatttcaactcaaggagttcaacaactgcattaacccactcgaccccatttttattaacgagtcgctcgttatatattaagcgagaaaataccttattgccaaatgccgtcctgaatagccattttttccaaaaaggtatggttgtatttggaaaaaattcccttacgactctgtcaaagatagcgtccatattaaaatcctttttatagaactcatcgtaaacgactatactagcgttctttcagtcggacaataccgcataaaacttaaaaaggccaaaacaaaacaattagatataattaatacaacagtattctcaccataaatacaatcaccaaagttttaataaatttatagtaatcaatgcaaaaaaaacatacataatgcttaaaggtaataccctatctcatttctggtggttatacttcctaaaactcacagaatagcttttctggcggtatatgcatttgtacaaaggcatccgaattccatgcccgtatctaatatcagaaaatattaaccatggattcccataatatataaccccacctacagcccctggtgaaaataactttgcggcgatatcccttaaaacaatcgtccttgaagtatttcatcactattcctgttaagtcaccgcccgcacggctataatccttgcattcattattacgaaaacaggaacgcctatgatccgcagtatgaccgcctatgcccgccgtgaaatcaagggtgactggggtagcgccgcatgggagctgcgctcggtaaaccagcgctatctggaaacgtacttccgcctgccggagcagttccgtagtctggagcccgtggtacgcgagcgcattcgcgcccgcctgactcgcggtaaagtcgaatgcaccttgcgttttgaacaagatcccagcgctcagggtgaactcatcctcaacgaaaagctggctaaacagctggtaaacgctgccaactgggtgaaaatgcagagcgatgaaggggaaatcaacccggttgatatcctgcgctggccgggcgtgatggccgccaaagagcaggatctcgacgccatcgccgccgacattctggccgctcttgacggcgcgctggacgacttcatcgtcgcccgcgaaacggaaggccaggccctgaaagcgcttatcgagcaacggcttgaaggcgtgagcggcgaagtggcgaaagttcgcgctcatatgccggaaattctccagtggcagcgcgagcgcctggtcgccaagctggaagatgcggaagtacagctggaaaataaccgccttgagcaagagctggtgctgatggcgcagcgtatcgacgttgccgaagaactggaccgtctcgaagcgcacgttaaagagacctataacattctgaagaagaaagaagctgtgggtcgccgtctcgactttatgatgcaggagttcaaccgtgaatcgaacaccctggcgtcaaaatcgattaacgccgaggtgaccaactccgcgattgagctgaaggtactcatcgagcaaatgcgcgagcagatccagaatatcgagtaagtatttaagcgctatcacaaagacgcacgaaaccagcaaagcccgcacatcgccgggcttttttgttatcatgggctatcataaaaacgcaacaaagagcatgattgccgtgtacacctaggtgtaccaacggcgttaggtgtactcatctaggtgtacaccccttattaaaagtttggaatagtttggatattcgcaaaatgccaaaactcacagacatgcagatccgcgcatggataaaggccggggagcgattcgagggacgctctgacggtaacgggctttatctttcataccgcgaaaactaccagacacccgtctggcgcttccgctataaattcgctgggaaaccccgcgcaatgatgatcggttcatatgccgagctatcactatcaaaggccagagagacagccaaagagctatcggctcgcgttgcgctgggctatgacgttgcgggagagaagcaggagcggaaggccgaagcgctggcgaagatggaagcagagaaaaacgccatgcgcgtttcagagcttgccgctgaatactttgagcgtcagatcctgccccgctggaagcaccccgacattctccgccgccggatagacaaggatataaatccccacatcgggcgcatgaaggtagaggacgtaaagccgcgccatattgatgacatgctcaaggcgatagtagaccgtggagcgcctaccatagcaacggacgttctacgctggacgcgccgcatattcgactacggaatcaaacggcacgcgctggagattaacccctgttcagcctttgaggtggcagacgctggagggaaggaggttagccgtgaccgctggttaacccgcgatgagttaatccagctattcaaagccatgcgcacggctaagggtttcagtcgccagaatgaaatcacgttcaaattactgttagcgttatgcgtccgcaaaatggagttatgcgccgcacgctgggaggagttcgaccttgatcaagctgtctggcgcttgccagaggaacgcagcaaaaacggcgacgctatagacatcccattagcaccgccagccgtcgaatggctgagagagcttaaaacgttctcatgcaacagcgcctgggtactgccagccagaaagatgcaaaaccgcatgatcccccatattcaggaaagcaccctgcccgttgcgctggcgaaggttcgcgctgaaatgccggacgtgccgagcttcactattcacgacttccggcgcacggcccgcacccatttagccgcgctgggcgtggatccggtagtcgcagaaagatgccttaaccacaaaattaaaggtgtggagggtatctataaccgccaccaatactttgatgaacgccgggccgcgttaacacagtgggcgggcttgctggtggcactggaacgcggcgaagaatacaacgttacaccgctgagaaaggcgaagtaaccaagatatgtaaagaataagaggacagattgagcctagcccgacggggtgaaaagcgggaagccttaccgcctggctcaatcactttaaaggcatggcgtaaaaggtaacgttatggcacatggcaaattaattaatatctgggaaaaaaataccatccctccattaccgtggtgctcactaaacagagcagcaacactattgaagtgcgaattatcagacttctcagcatggatgaatcatctaaatcctatgattgaatttaaacaaagttcagtggaaggtactctgacggttacattgaataactatgataacccatatgagtatggggatatttcaaaagaatatattgaccttatacctgtggcatcacgaggcggattgactccaacttcgccaatgatagataccgcattcaccattgataaaaataaaaaaacactggattttgtgggctactttgatggcatggcatccgttttggaagggatgtatttaattgaaaatgatgaactaattgtccttccgcaagatttgttctgtgagattcctattgcaaaactaggcgctccttatgttggtgaagactgcccggtactgtcagtagatgatattttaattagacctgtttatgcgtattgctacgatgctcagccaattgttttgagtatgaatgatgtttatctaagcagggaggatatagagctaatttacaattgcggagtccaaggtatagatttaccagaagatagattgaccgtgcctgaatcaattaaggctaagccaaaaattagggaaacggcaaagcaatctagatttattgcttatctaataaatgctttaggcgtgaagcaagacgaactaaaaacactttccatcaaaaatattatggatagattaagccatatggcaaatgagattaaatttcctgatgtaacggatgactctttacgggattggttggaaaaagccggttataggtaattatggttagttttcgccaatgaagatgtgccgttagtttcaagcaaacaatctcataactcggaggaattttctaaaactcggcgagattgtgaactgctattgatagcctttccatcaccagctatcacaggagttacgggacatatgacagcctctcaaaccgcacaatcagcacttcccactactggatacatccgccgctttcgaatgccggcgttgttaggggtgtcaatgccaaccattgatcgatgggttaaaaacggcacattgccacgcccggtgaaactcaccaataacgtgactgcctttgatgcggtagagattaacaaatggctggcagaacggcgcgggaaggtggcctgatgaaaaaagaaaaccgcccattacaggcggctaacatagatattcgcggatctgatgttacgccactagcctacaccgttcaagcctcaaagcgcattccgaagaaacaccgcgcccgcacctacatgctgcgttgtggggctggtgggtggacagaaaacgatatcctgcgcaattgccggctctcatctggccgcaactatgcgagcgaacttgagcgtgagcttgatatctgcctggaacgccttgaagagaaaaatcctgatggtatcggggcgcacatgcgctaccggtttgcgtgccgtggtgacgtgctgaaggtgattcagttcgttaaccgcatggccgcagtcaaccaacactacgggctttctaagcaggatatcgccgacattctgaacctctacccggacaacttcaccgccgcataacggagccgaaaaatgaaaatcgaaaaaagcagattcaattctgaggccgcccctcaacccaacgttaacccgggcgtaactaacggcaatgactttgccgccatcgttcccgttattcccggccaaattggcgggcgcgaaaccaatattgcgagcgccagagatttgcataaagcgctgggtgtgggccgcgactttaccaactggattaaaggccgcatcgaccagtacggatttgtggccgggactgactacatccgtgttgaaaatttgagctcaccaaaacgggcgagcgcaaaatttcgccagcaaatcgagcatgattaccttctctcgctggatatggctaaagaagtggcaatggttgagcgcaatgaacaggggcgcgccgtccgccgctatttcatccagtgcgaggaagcgctacagctgagtgcgccggaaatcgccgcgaagtatcgccggcacctcaaagcccgcattggtgctgctaacctcttcaagccgatgtgcgccgctctggatgctgcccgagcagaacaggggaaagagacgcaagcccggcactacagcaatgaaagcaacatgatcgcccgtattgtgctgggtggcatgaccgctaagcagtgggcgcaggtgaacggtatcgacggcgaaccgcgcgatagcatgagcgccgcccaactggaacacctcagctacctggagggtacaaacatcacgctgatcgatatgggcatggagtacggccagcgtaaagcggaattaacccgcctctctcagcgttggctggctaaacgtctgggggctaacgatgaataagcccaccagcacaccgctgccaaaccactcctatcgcgacgctcacggccagatggtgagcgtgaccgctgtagcgcataaccgcgtgacgttctatcgcgaggggtatcagttcccgtgcgtacagcccattgagcgcttcatgaaggagtacacggaggtgaagcaatgattacctccgcccagggtaaaagcctctctctggctggcctgatgtatgcaaaagttaacgatcttcgggcggtgtgtcaccgcaggagcctgtcaaaacctgtcattctgtgggccaatagtggctctgttgaagtttatttcgaggcaggtacgcgcgcgggtaagcgttcggaaactgactatctggaagatagcgcgtccggcgccggcggtggatgtggagcacatcacaccgccagctataaattgccgcaccgtgacaaaaaggacttgcggtctgaaggtatcccagtctatggtaatagcgcaccagcaaaatctggtgccgggattggcgtcctggtaattcgaatggcgacacatgacgcgcctagcgtctttttttgtgccgttagtctgactcaccctttttttgagcgttgggatataatccagcgcctcgcaagagcaatggtggctcaggcaggggcttcttcggaagcgccggtatccattcgagccggttacgccaaccctgcttgggctaccaccagtgaaattggcgtttccggtggtagcgttacccgctatcgaatggaggctgccgcatggctactaccctcacccaaattccgcaatttatctggattatcgccgctgttcgccgcgatatgccgacaattaccgcaaaaattcaccatatcgccgcacctactgagcgcgaagcccgccgttctctggttcgggatcacgtctgctttttcgctggccgtatccgtctggaggtggctcatgcttaaaacctacgatgtgcctgttaatccaactgaacgcacccaccacctgatttctctggcggagctgatgcgtgatgtattggacagtaaagctgattctcgcgaggactatctggaggcattgattgccatgctggagatgtctttgcgcgatctgcatggtctgctggaaggtaatgaactgccggaggtgcgccatgcgtaactatttccgcatcaccggctacgccgttaataagcgcggtttaacggtagggatcggctatcaactcacatccagcgacactaaaacagcaactgcccacgcagtgcttcaggcgcagcgtgaaggtttcagccatgtacgcattacacgcgttcaggaggtggcagcatgagcaccgcgattaccaccgtccccaacgaaatcactaccccccccgaagttatccactcaggagatgcggcggcggtagtcatttacgccagtgagcttctggaactgtggaatttgcaccttgataagccactgcgtgccgccaacccgctttttgccgcgcggcttgggacgctaatagttgaaatgcgatgcgcagccattagaaccgagcgcaaagttaatcgcctggctgatgaactaacgaagatgcgtgagtaccgggagggcggcgcatgagcaagttatccctgattgattcagcctgccgtatcaagcaagcgcagcaagttctttctctttggcttgaagcaccgattaaaaaagatagcggcacggatcatcttattggcgcagtcattacccttctggatggtatccccgagctgatggattcagtagaaggcgagttagttgatatggatctaagtttgggcggtaaagcatgagcaacgcacagaaattcagaccgggaagtgccgacttattacacgtcgaggccacgccagacggtatcaacattctgacgctgaacgatgacggcctttggcagcattcgcggatgctgggctactccgctgcgattcgccagcttgatagcggcggctatgaccgtgatttgaccgcagggatgcaggttatttccgggatctgggaagccgagaggaaaggctacctcacagaaagtagcgagcaaatggcgattgtctggcgctggctggtggcctgtctgttcattctggagcagcaggaacgcaacggcacggtagatatagccaacgacgagggcggctatgatcgtgccgtgaagtacgtcggtagacatggcggaataagcatttacccggctacggaacgcttttcactggcgaaccacgtcgaggcgctggcaattgagaaatatggcgcagatacaggattgctgatggctgttcatatgtaccagagcatgacggagacagtgccggggaaagggatgaaattgtctgctgtggggcgtgaattgctggaaggatcgcacgacagctttatccagatgctgaataccgaaggtatgccagcagcgccaacagcgcactgagggggtaacaatgcgtaatatcgaccttatccgcgaagtgaccaccaccgccgcgaacaactggcctcatgtgctggctggcctgtctatcgacgtgcctgattcatcacgccgtcatgccccctgccctgcatgtggtggaaaagaccgtttcaggttcgacgataacgggcgcggtagctttatctgcaaccagtgcggcgctggcgacggcttagacctgattaagctggtgaaccactgcgacaccaccgaagcggcacagcttgccgctgacgtgctgggtattgattaccgggctgcggaaacaaaccagaaagcagccagccagagaagggagcagatggaagctgaccgccagcagcgggagcaggagcgccagaaacaggcagcggaggacgcagagcagcgccgggctacgtttgcccgtctgtatggtgaaatgcgccagagcgccacagagggtgaatctgattacctgaaatcaaaagggctgaccgggtttaattaccccattctgcccgatggctcgctattgctggcgctggtggacggatccggcgcagtcaacgccgcgcagaccatcaccccacagggagaaaaacggcttctgaccggttcggcaaagcgcggggcatatcacgccgtaaacgcaccagaaacgccgcagagcgttttaattgccgaggggctggcaacggccctttcagttcacctgatgcgcccggacgcgctggcagtggcagcaattgacgcgggcaacctgctacccgttgccgaagtgatgcgccgtaaacacccgaaggcgcaaattattatcgccgcagacaacgaccaccaccaaaacggagaagccaatacaggctgggaggccgcagagaaagccgccttatccgtggctggctgggtatcacttccaccgactgactataaagccgactggaacgacttccaccagcaaaacgggctggaagtcgctacggctgcgtttaacgattcgatgtaccagattcagggggaagccgtgaaaccacggttgcaggccattgagggcggtaaagctgaccagccagagaaagacccgctaaagccccgcattgagagccgcaaagatggcgttttctgggtaacgcctaaagtggacaaggaaagcggggagatcatcaacaatgaaagctggctggcctcaccgatggacgttatcggaaccgggcgcgacgacaaagaccagtatttgataatcagatgggcggcttttggcgcagataccgcaacgaccgcagctatcccgctggctgatattggtgagcgcgagggctggcgcaccatgaaagcgggcgggattaacgtcacgaccaaaagcagcctacgggcgatcctggctgactggctacagcgcagcggctcgcgtgaactatggcgcgttgctcatgctacgggctggcaatgcggggcgtacatcatgccggacggggaaatcatcggcacacctgagcggcctgttttgttcagcgggcgcagttcagccgctgccgggtataccgtagcaggaacgtcggaaagctggcgtaacagtgttgcacggctggcatacggcaactacgcgatgatgacaggcatcgccgcagcactggcagcgccattaatcggggtggcagagcgtgacggattcgggattcatttttatgaacaatcgagcgccgggaaaacaaccgcgcagaacgtggcgggcagtctatacggaaaccctgatgccttgcgcctgacgtggtacgggacggcgctggggctgataaacgaggccgccgcccacaatgacggactgatgccgctggatgaagtcggacagggcgcagacccgataagcgtttctcagtctgcctatgccctgtttaacggcgtggggaaattgcagggcgcaaaggaaggaggcaaccgggatctgaaacgctggcgcaccgtggcaatcagcaccggggaaagggatttagaaacgttcatcgccaccgcaggacgcaagacaaaagcggggcaactggtgcgactgctgaatatcccgctgagtaaggcggtgcgctttcatgagtaccagacagggagagaccacgccgacgcgctgaaagacgcttaccagcaccatcatggcgctgccgggcgggagtggattagatggctttcagaccaccagcagcaggcgattgatgccgttcgtgagtgcgaggcccgctggcgcagtcttattcctgccgactatggcgaacaggttcaccgtgtaggggcaaggttcgccattctggaggccgctttactgctgggtggcgtggttactggttgggatgctcaaacgtgccgggatgcgatacagcacacctataacgcatggctgaaagagttcggcacggggaacaaagagcaccagcagatcatcgagcagacggaggcgtttttaaatgcctatgggctgagtcgattcgcgccgctgggttatgacccgcgcgatttacccatccgtgatttagccgggtacaggaagaaggggaaccacgacggcgacccgataattttctacaccttcccggcagcgtttgagcaggagattgcaaagggcttcaataccaaacagtttgccgaagttctaaagaatgcaggaatgcttacacccccaacgagcgggcgaggttatcaggggcgggtaagggaaggagggcggcaaattcgcgtttatgtgctcaacttcatggatgaggaaagcagccagccagaagaataatcttttttcacatacgtagttttagtgttgtctcagttgtctttgttgtctcattttgtaatctgcattgatttataaggattttattttaatttctgagacaacatcgagacaacatttagccattttgagacaacatggcgaacgtgtgttttttaatctggcaggcagtgagacaacatttactcagggtgagacaacactaaattgcaaatgttgtctcactaaaatccagatgtggcgcggcctgtagagccgtgagacaacaaagacaactgagacaatactatttttgtttatatgcaaaaaaatctggcgaaggtgtcccacaataagacggcgccgggtaattttcattagcaaaactaataatcagaggtattcgcaaaatgacagcacagatatcagcatacgggcggctggtggcagatccccagaccagaacgacgaacagcggaacgagcatggcaatggcgcggctggcggtggcgctgccgtgcaatgcggcagataacggagaagctactttctggctgggcgttatcgcctttggtaaacaggccgacgcgctggcagggcacgttaaaggcgatttagtcagtgttgccggagcgatgcaggtcaatcagtggacgggcaaggatggcggtacacagcagggctatcagatagtggctgacagcgtgatcagtgcaaagacggtaaggccgggcgggaagcgtagcactgcgggaatgaataccagccagccggcgagccgaccgcagcagatcgcgccgggctgggaggtgtacgacactcctgatgactttgatcaacgccagccgtttgatgatgggttttaagctggaggacaagcagcatgatacgcgacaaaaaggccgaagaactggaggctaaagggttgttccgcagggcggcggcgcggtggcttgacgttatggcggcgtgtaccgaggatgccgacagggagcaggcgaagcggaaccgtgaaagatgccttgaaggcgtaaagcgcccacgctttaagctggaggaatttgcagaccttcacagagcggcaaaagccaccactaaccgcatggggatagcgcagaacaacggggaggctttcagattgccagccagcagaaaacgagcacgtaaggcgcgcaatgatggcgcataattccggtgccctggctgcgtgggagtttgagcatcacatgtagaatcatactgccccatgaaaatgcccatatcttatttataggcagaaacggtgtgttctggctatgtatggcagaaatggtgtgttctgcctataagggcagaaagcgctcgaaagtggtcgttgagaacgcgctgtagcgggagatagttaagcgcccaccagcccgcgcagaagttcacaaggcagcgaaagagacacagcgccgcatgggaatagctcagccgaatggtgaggcgttcaggttaaaaacaagacgatgaaagtgattgtattggattaatcttcttcgatgttacgataatactttatttacttttggggataagttgatgtcagtatggaacatcattgttttgatattcgctattatcatttatgttcttcccggcgttatagccagttcaagggagcataaaaacgctacggcaatatgggtgctaaatattgtcctgggctggagcttcttgggttggatagccgcgcttgtctggtctttcacaaaccccggagtggttaagcttgaaccacaggtgtttggcgcggattctgctggtggcggtttagtagacgatactaaaaaatgtccgtattgcgccgaaacaataaaaaaagaagcaatattgtgccgattttgtggcaaagatttataaatcgacatcgtcaagcaagggtggcatcaatgaaaattattatggtattaatttcatcacttttatttctcacggcatgtaagcctacagaagagaaagccatagagttggctaaaagcgagatatcgcacgacatgaaagatccatcatctacccagtttagagatgttgtgtcaaaaaaagttggtgaaaaggacgatggctctatcgcaatgcttgtctgtggtgaggtgaactcaaagaacagctttggggcatattcagggtactcgccttttgtcatcgcgctaacgatgaaatcaaagggttttttctcctccggcgtggtgtatgcagtcgaagggaaaacagttgatgaccgtccaacacgcaagaatagtgcaaatacgatcaacccctgcaagtaacaccacaccaaacccgtgaccacgggtttttttacgccacatcatttcacaaagcgcaatgcttgccatttatgttgcataaactacaatataaattgactgtataaatatcaggggtaagcagatgaaccgatcacaaatcacggtagcactttgccgggaacatcttcagtccattcgtgaaattcaggaagaggagcgcaagcgttctccgattggtgtagcaccaacggtaaacgctattgcccgcgcattggtcgctaagggccttgaatctgttaagcggggtgggtgatggaacaactacagaggctggctgaagtaattgccgagacctatattcgcgatctgcgccgggaaactggctccaacgttcttagcattgatggtgtaagtggcaacgttgaaaaacacctgctcgccgcggggcttgtcgataacacaatatatgccgctaaagatgaatatggcgcgacatttgaacgagaagcctatcgcatgttaatgaattttatatcatttgatggtccggaatatcgccttaccgaacatggtcgattagtcataactcttctgaacaccaacgctctgaaaaaaaacaaagtaagaaccctacactgaggcgctcatgacaactgattttggcaaatacaccattgagattgaagccgatgcggccaaactgctggcgggtcaggcgagcgcagattcagctttaaagcaaattgaaaactcagtcaaaaaaacagctaactctgctgacaagctagataaaagcctggataacttgggcggaggtttttcgcgccttgctgtggccgtgaaaggatacatatcaattcaggcgttgatgaagctccaacagctgtctgaggaattcacgctacttcaggcgcgagtaacgcgtttatcttcaagttcagaggaaggtgcgcggagctttcagcagcttgtgggtattgcttcggcaaccggtgccagccttggggataccgtcaacctctggcagcaactgaccgctacactaaaaactgtaggcgccactaacagtgatgttaaccggctagtgatgaccctgcagaagatcggcgctatcggtggctcatcggctcaggaaatggctaacgctctcaggcaatttatgcagtcggttgcgtccggcagaattcaggcggaagagtttaactcagtgctggaacagatgccggaactggcgaggcagatcgccgatggtatggggattccgtttaacgagctccgtcagttgatgctggcaggcaagttagatattggtgaggtgctagcggcaatcgaaaagaggtctgacgaaatcaatcagcagtttgaaactatgccgcgtactgtatcgcaggcaacaaatgctttgatcactcagttcggggtagctatctccaaaattgatgatgctattggggcgtcgcgctatttggcaaaacttctcgaccaaactgctctttcaatctccgtagccaccggaaatgtagatcctattgttgcgatagatgcgcagttggattcgctgaataaaaaattagctgtaactgaagcggcttacaataccgtttccaaagcttctatctacactgacgcaggcactaaaacacaaatagatgctatcaaaggtcaaatagcggccctagaacgagcaaaatccctttattccgatgttggcaaggcggcatcgggttctgtagacggatctaagccagcctatatcaccaatctcgaaaagaaaactgcagagaacaacgccaattcgatcattaaatctggtcaaacagtagttgataagctcacccagcagcgtgaacagctaagcaaagacaaggccaaagggctaatcgatgataagaaatatgctgaagctgctgctgttctggataagcaaattgccgacgccagaaaaaaacaggataaaacgccgaagaatgcctttgcccgcggcgatgactcaatagacaacttgcagcggcagattgccgttttgacaatgcgctatgacgagaacaccagagaggctgcgcagtttaatgccgtggccgctctcggagctaaggccaccgacacgcaaaaagagcgggtgcgcgaactggctggacagttatttgacgcccagcagcgccagaaagaccttaacgacgcgatcagcaatgaccctgtgcgtaaggaaaataaaacctattcagacggtcgagaccagctaaagcgccagctagacggccagatgattgaccagaaaacctataaccagcaatcagagttgatggagcagcagcatcaagtcaatctggcaaaaatacgcgctcaggagcaaacagcaaacccgatagcagccgcccgcgctgaaattgacccggtacagcaactggtcaatgaaaacaaccagaagctggccctcatgcagcagtaccagcagcaggaacaggcaatactccagcagagctatcagcagggaaaaatcagttacgatcagttcatcgctgccaaatcagctacggatgctcagtatctggcgctgagaacggcgcaggagaatcagttcaacgagcagatgacggcggcgcagtggcagttgttgagccagcagggacttggctggcagactttgaccagcgccgtggatgctttctccggcagcgcgtccaacgccattaccggaatgctgactggctcaatgagcgcgtctgaggcgatgaaatcgcttggaacgaccatcctcaacagtgttgttaactcgctggtgcaggcggcaattcaggcagctattgttaagccattgctggaagcgtttggtttatctgccgaaagcacgcttggggcaagtacggcatcggcggcagagtcctacgctgcatgggcgccagcggcaatagcggcttccattgccacgctgggcagtgcggcaggcgttggctttgctgcatattctggtgctacgttggctggcaaggctcttggcggacgtaaaaatggcgggccggtatcagctggtaatatctaccctgtaggtgaaggaaacctaccggaactcatgcagaccagcaaaggactgttcatgatccccggtgatggaggaaaggtattcagtaacaaggatgtgaatagcggctctccgactatacagaaggcatcaacagggaaagaatatctcccgacatcctccgcatcatccagccaggcagaaagccgcactgaacgaccgatacaggtcaacataacccttatcgaccagaccaccggcaatcagcacaacatcactggcactgaagctttccagcaaggtgacattgtgacagttactggatggctgaatgacgtagataccgccggcccaatgtctacagcattcgcagatgctcacggactaagaaggcaggcaaggggggctttttaaagttgacccgagggggagggttaatcgcctccccttttgttacgcgggactgctttatgaatggcattttcacaggacagaaataagaactttttttcgtgtaaacgcagccagtaaacaacctaccccatgagagggtgacaaaagttgacatcgaaaggcgatcccgtgactaacgacgaaaagcgaaaactataccgcgcgtgggctgatgatatcggcggcggaacatctttcccggacgcctgcagggatatgacgtgcggagcgacgaccaggaaagggacaccctgcaaaatgacggcgctgtatgcttctggccgctgtaagttacacggaggcatgagcaccggagcaaagacaccagagggtaaggcacggcagttagagggattccggcgctggctggagaaaaggcagcagaccaccagccagagtgatagtacgcagtaaagtttgcgtcgatggtgcgcagtacgcagagaggtacgcagcaaaaagaaggttttttcagtgcgtacttgtttaagcgtgttttgcgcgtggctctgtaagtcaatgattaggcttaattatagcgaagcgcgataatcgggggagcgaatatgggtattaaaggcaggggcatgaacaacattcgccgcaacatcaatgcgctggtgagggacatcacagggcggcgcttaccgcgtgcaatgacagccgccttgcatgaaggtgggctcgtagcagcaatctatacgccagttgataccagcaccctgattaactcgcagtttaaagaggttatcaccaacggaacgcgcatcactggccgaatcggatactctgcgaattatgcaatttatgttcaggatccgaacatcccgcagaaatttaccctccccagggccagaaaagagtttttgcagcatggtgttgctgatgctaaaccgcagatggaggcagctttcctgcgagaattatcaaaacgctgattgcggagaaaacgaaactgcttaccccatgagtggttaacaattgttaaggttatagcaacgattattaggccgtactcgaagtaaccaattgtgcagaactcatataatttcgtattcattagcgggtttttttagcggagatctgaactaatgagagagcagacgcgggtttacacctctgcgctaccacgaattaacctccagtttctggcagatatgcaaagaaagctggtggactcgagcccgaaaacacagattttttgtgataccaagagcggaagggtgtgtttctctctggttcctggcggctacagtgcgacaatcaacggggtaacgcgagttattggcatcacgattacccgggcagggtttggttaccggcgatggtacatttgcccgcattgtggtggccgggttgcgaaattattcattggccggaaggacgtagggtgtcgtaaatgctggagccttcactatgccagccagagtgaagatgaggtcgctcgcttacggcggagtgtgtggaagcagaggcatgacctatggggggatgattacccgcccgcgggcagcctgctaaatagcccgctcaagtttccgaagcctgccggcatgagatgggataccttcgagcaaaagcgctctcgactgctaaagactgaatcagcttactggcggttgaaagaaccgagggatgctaaagggttcgccagcgtaatgcgcagagctgaggcgtcaatgcgctcatttgaacgggcatcgaaaaaggctaccccatgagcgccctactattaccctaatgcctaccccataagcacagcaagactacggcaaggttaattccggttctgagccggaattagctaaaaacagccggttacctgccatatcaggagcgacaacgatgttagaccgcataacactggagttagccatacaggagatagccaggcagagcggtgaaacacttgataaccacgcccgctacaccattcgaaacggcgtggcgcaggtgctacaagccaaagaaagccaccgccgcaggatggtagcgccagcctaccagtggaagaagcccaccgcgccgcgcagataacattacagcgccgccgataacttctcagcattgcgcccctgatgcttccaggcgctgtaaatgtctttatcccacgccttacccgccttagtctgataacccgcctcattgagcctctcagcgataatgcgcccgttatcgaaaccctcccggatagtgtccgcgataatcccgatcaccgccgtttcattgtacggggtaggcgggatcccctgcttacctccggctagcgccgctgccgctacttccattcgctccaccagcgccagcatacgggactgagggttactctctggctggcttagtttgctgcgcagggcatcgactagccacgctgttctatcgccgcctgatgccgctacagcctgattaaatgcgtcctgcaattcagccggaacgcggaatgctaccagattggatttgctcatgagggccgccatatcagtgttttctgtctgtacagtatatcactgtataacgctgttatacggttgggttgctggctggtttgtcatttttgatgtccacgctaacttttgacgcgccgtgctggtggtcatgaattttggaatgctttggaaatttgaaaactaccgacaaccaaaagagccgctagagtgatggtttaaggctgaatacttagcggaggcatccaaaaagatgagtgctaaatttgtactgtttgatacggatttggattgtgctgattggcaaacatgcgtcgtggttggcgctgcatactttaggggcgatcgggtgtattaaatttgccaggccgtacatgcgggggaatctcggatgtaagaggtagggacaaagtaacggtgagctactcagttgctggattaaagggcagaattctgcccttagtgctgagtggtagcgttatgggttaaccaagccgcacacactcgcctgatatcgaattatcagcgccgcatgtatcacgtattagccggcatgttcccggcaggccataacgcgtgacattacaccagacgccgggagaatccgcgctactctgcgtggtgttttgccgttgctcgtataccgtcaccctttccagcaggccaccagctaccatgttttcgagagtgcgccgggttgattcgagctggtggcgcttgtcgaacgactccatgccatgaagcagataagccacgccggacacatcgagagggggcgcaccaatctcacccgtcacccattctaggttatccggctcaaagtagctgagtatcttttttttacggctggtcattctcatggctggctgattccttattgtgggatagaggtatcatacaataagagcgacggggcaaggttgctgcaagggtgaaaaccgaccaaaagaccgagcgcctcaaaaaaccgtgtacacatgggtgtacataatgagaatcagcattacaagaaactcagtaacggcgcggcattgagccacctactcaataaacagatccaatatcgagtaacgctttctcgtttgttaatgtatttcggtatccagggccatgataaatcatggcctttttatttatctctctcacgggcgaatgataagaatctacttataaaaaatagtcgtccagttttcggttgtggcaaataagcacaacgcggcacagtcaggaaaacactaccgcgagagaaaagaatggactttaatgcgcttcaccagcaacaccaacctttgttgcttgccaatgtctgggatgccagcagcgctcaggctgctcagcaggctggttatcaggcgctgggatcctccagcgctgctatcgccgcaatgttagggtatgaagatggcgaagagatgagttttgacgagctgttttatgtcgtctcacgcatcaaaaccgttagcgaactgccgttaagcgtcgatttagagacgggctacggcgcgacaaccagccacatcattgacaatatccggcgtctggcgcatctcggcgtgagtggaataaatctcgaggatagtcatgtggtggatggtacgcgtcgtcttgacgatgcggagcgctttgccgtcaaactgcaggaaataacccgcgcctgtcccggtctgtttgttaatgtccgcaccgatacctttcttctcaacgtacaagatgcgctggttcagacgctctatcgcggtcaactctacgccaaacacggcgcatgcggtttttttgtgccttgcgtcacccgcgcggaggatattatcgccatcgttcaccacgtgcgtttacccttaaacgtaatgtgtatgcctgagctggctgacttcagcaccttatcgacactgggcgtaaaacgaatttcgatgggcaattttatttatgctgcgacgcaggccagactgaaagacttattatgtcaggtgcaaacccaacactctttctcaggtgttttttgaccatgaaaattaccgacagcatgcagtgcgatatctggtatcaggcgctgcttgaacgcgcggtggaattcaccggcgtttttttcgtcggcgtgaaaaccaccggcgtattttgtatctcggtctgtcgggcgcgaaaaccccggcgggaaaacgtcgaattttataatgactttaaatccgcgctggatgccggcttccggccatgcaaagtctgtcgcccgacggagaatgcccggacggcccccgcctttgttgaacaagcgctccgcctgctgcgagaagctccaaaggtccgcctcagcgatagcgagctacgtcagcacgatattagcccggaacgcgttcgccgctggttcctgcaaaaccacgggatcacctttcaggcttttcaacggatgcagcgtttgaatatggcgcttcaggaattaaaagcaggccgctcaactaccgatgtcgctttcgatagcggttacgagtccttaagcggcttcggctatacctgcaaaaaattgaccggtttcgcacccagcgcacaacgccaggttgttttaattcatcgttttaccaccccgttagggccaatgtttgtttgtgcaacgcaacggggaatttgtctgctggagtttgtcgacagacgagcgctggagtcagaattcagcgacctgcagcggcggttcaacgccagcatcatcacaggtgaaaatgcccacaccaggcaggcgcaacaggaaataacggagtatttcgccggacagcgtcaatcgttcgaggtggcgcttgatgccccaggcagcgagttccagcgagcggtctggcgccgtttacagcacgttagcttcggtgagacgacgcattatcaatcgattgcgatggagataggtaaaccaacggccacgcgcgcggtggctgctgcaaacggcgctaaccgcgtcgcgattatcatcccgtgccatcgaattatcggcaaagatggttcgatgaccggttacggcggcggcattgcacgaaaaatatggcttattaaccatgaggcaaccatcagggaaaaacgcggctgattttactttcaggatcaacgggcccctccctggctttcaccgcgtctcggtaagcctattttttatccagcacccggcaggttaaaaacgcccctgccgcgcacagcagcgccggagccagatagctgtgatccatgtgggtaaactccatcaccagcgccactgcggtcaacggcatctgcatggaggcggcgagaaacgcggccgcccccaccacagcgaagctgcttttatcaccgccagggaagccgagctgccagagcgcgcagagcagcaggctgaccaatccgcccaccgccagccctggggttaacaatccaccctccgcgccgccgcgcagcaccgccagaatcaccaccatcttcaatactaacaggacagcgaccatggagagaggcagcccgtcgctgagcgccagctgcattggacccttgccattgcccggaagctcggggaaataaagactcaggatggcaagaagagaaaaccccagcagacagaacaccggcatctgccagttacttcgcgcgcgtgaacgcgccgcgctggtcgctttgcgaaagagccaggcgccggtgccaagaatcgggcccgccagaatcgcccaccagagaaaggtgtgcggaagtgcgctggaaacaaaatggtattgcgattcatcccctaaccccagggtggccgtccaggcggcaatcgccgaggtcatcatcgccgccagcgttttttcccagctaaacgacagcagcatgacctcaaggctgaacaacgccccggccagcgggacgttatagaccgccgccagacctgcgcccgccccacaggcaatcagcgtgcgggtttcatcttccagcaggcgcagcttacgcgccaccatccccgcccccagcgcgcccatttcccggggcgccacctcgcggccaggcggggggcccagcgctacggtgacgatcggcagcggcgcgtggatcgtcgtggtgcccgcgggcatgggtgcgcaggggttggccaccgccgccgcaatagaaacccgcctccgcccgtagcgaccaagcagccaccagccaaatccggcgacggcgccgccggccacgattgccacgatgcggcgtggccaggacgactccgtgacgccctgtaaaaatgacaccgaaccgacgatctgcccataactgtaaccaaaagccaggtgctgaatcgcgtgtaaaatcagtgccaaaaccatgccggacagaccggccagaatcccggttaataccacggctatcaggcggatcagatgatttttattcccggcggcgacgctcattttctcaggccttgaaaaggaaaaataaaagaataaaggacgagacctaaacattgcgtaatcatagtgttttcgatagtgatacccatcgcttcacttagcattactttttctaatcaataaaaatccctaaaaaatcaataaacctttaaatcaagccatcacagatactatttccattaatttttcctggcgtaaatgattcgctttagaaaatctcaatcgtgatcctgcgcacaaatcgttaacctgcccgccattacctggggggatctatgctgcttcatgttctgtacttaatcggtatcaccgcggaagccatgaccggcgcactggctgccgggcgccggcggatggatacgtttggcgtcatcattatcgccactgcgaccgcgctgggcgggggttccgttcgcgatatcctgctggggcactatcctcttggttgggtgaagcatcccgaatatgtcatcattgtcgccgtcgccgctgtcctcacgaccattgccgctccggtgatgccgcaccttcgtcggctgtttctggtgctggacgcgctggggctgatcgtgttttccatcatcggcgcgcagatcgccctggacatgggcgaaggcccggttatcgcctctattgccgccgtgatcaccggtgtcttcggcggcgtactgcgcgatatgttctgcaaacgcattccgctggtcttccagaaagagctgtatgccgggatctcctttgccgcagccgtactctatattgctctgcaacattacgtcagcagccacgatgtggtggtgctggctacactgctgttcggctttaccgcccgcatgctggcgctacgctggaaactggggctaccggtcttccactacacccatgacgcccactaaccgccttaaaatccggggatgcgctgcccgctaagccattgcgccagcgccaccacgcccggatggtgcaggaacgccaccagctggcgggctctgatctcccccacgcccggcagcgtgcgccattgcgcttcactttttgccgccagcaaatgccagttctcgctttcgagctgcgccagcgccccctgcggcaccgggatccccatcgccagcacccagcggataaaaggtcgtttgcgaacgagatcaaactgatgccagaggtgctgcccgcgggcggcggaaatccctggcaccgcctgcagctgctcaacggtaagcgccagccaggaaaagatatgcgtcatcgggttttgctgctgaatgacgcgccataaattttcccccacgccatcgacattcagggcggactttgatgacaaccagatcagcctggaaagaaactgttcgctgcactcaggggtggcgaaatagcaggttagcgcattaaatttcgccggcggcggcgtcggtttatggcgctcggccgtccgccagacgacggcgtcgacccgaggaataccctgccctgccagactgatctgcagctgatcgccaaccccaatatccagcatctgccagcgggacacagagccaacgttaacccgctgcacgcgtttatcatccagccgctgggcctcaagctcggccaccacgttgagtctgccgctgcggccggtactgaaacggatcgcccgtacctgcatcacccgcgatgccggaggatatttccaggctgccagccactcgccctttccgggcgaccagactcgccccggcggctcgcgtccttcgcgcacaatcacaccgtcgctgacgaagggcagcggcgagcgataccagcgctggcgccactgcgccacctgctcgatgcgcgacaccggatgggtatattgtccgctgtacttaaaccccgcctgcgccagcagctgctgacgacggcgcatatccgacgggccgtctggccaggcccagataaaaacgtccagttgactgagcgccgccgccgcgtcggctcgcatcatcaacccggcgactttcgcccgcgcgttcatccccccagcctgctgctgaacatggccgtcccggcgcagaaacagctccccctgcagtacgctgtcggccagttcaccggtcatcactttctccagcgctgggatctgccgggctcgggcggtccatgcctcaccgcgcagaccatcgccgcggctaatggcctgaaccagacgcccctggcgataaacgagagtcaccgccacgccgtccactttaggctgtatccacaggtcggatttatttttcatccagcgggcaacgctgtcctcatccgccagcttgcgcacgccggtatgggccaccggatgacgcgcatcgccggtgggcggaggcagatcgtcatcctcaggcgtcgcgcccggaaagcattgtcgccactgcgccaggcgcagggtgagctggtcgtaaacgtcatcgctcactccgctggcgccctgccgccagtaagcctctttccaggcgacaatttgctgatgaaggcgtgatgtctcctgccttcctctggccggcggccagtccggacacgtcgccagcgcgctggcagagaacatccctaacgccagccaccaccctcctttacgcattgcagtcccctcctccatcacctcgcggagagtctgctgcagaatgccgcgagccgcgacggaagctttttcgccttgcgaagcgccttccaggatttacgcctcattgcagcaacggctggcgaattcaggaaaacggcaggcaaaatgaaagaaacagcggcaaaaagtgtgacaatgactgcgtcacgccgcggcgacgtgtataataggctcgtatgtaggacctctttcgataaccacatacaaaagacactcatggctcaaggcacgctttatattgtttccgcccctagcggcgcgggtaaatccagcctgattcaggctttattaaaaacccaaccgttgtatgacacccaggtatcggtctcccataccacgcgggcgccgcgtccgggtgaagtgcacggcgaacactatttcttcgtgaatcacgacgaattccgctcgatgattggcgaaaacgcgtttctggaacatgcagaggtctttggcaactattacggcacgtcgcgtaaagcgatcgagcaggtgctggcgaccggcgtcgatgtcttcctcgatatcgactggcaaggcgcgcagcagatccgtaaaagcatgcccggcgcgcgcagtatttttattctgccgccgtcaaaagatgaactggaccgtcgcctgcgcggccgcggccaggacagcgaagaggtgatcgcgaaacggatggcccaggccgttgcggaaatgagccattacgcggaatatgattacctgattgtgaacgatgattttgacaccgccctgagcgacctgaaaaatatcatccgcgctgaacgtctgcgcatgagccgccaaaagcagcgacatggcgctttaatcaccaaactattggcagactgaacccacattcagtatcatgcccagtcatttcttcacctgtggagcattttaagtatggcacgcgtaactgttcaggacgctgtagagaaaattggtaaccgttttgacctggtactggtcgccgcgcgtcgcgctcgtcagatgcaggttggcggaaaggatccgctggtaccggaagaaaacgataaaaccaccgttatcgcactgcgcgaaatcgaagaaggtctgatcaacaaccagatcctcgacgtacgtgagcgccaggaacagcaagagcaggaagccgctgaattacaagccgttaccgcgattgctgaaggtcgtcgttaatcacacagcgggtcgcccttgtatctgtttgaaagcctgaatcagctgattcaaaactacctgccggaagaccagattaagcgtctgcggcaggcgtatctcgttgcacgtgacgctcacgagggtcagacacgttcaagcggtgaaccctatatcacgcacccggtcgcggtagcctgcattctggccgagatgaagctcgactatgaaacgctgatggccgcgctgctgcatgatgtgattgaagatacccccgccacctaccaggacatggaacagctttttggtaaaagcgtcgccgagctggtagagggggtgtcgaaacttgataagctcaagttccgcgataagaaagaggcgcaggccgaaaactttcgcaaaatgatcatggcgatggtgcaggacatccgcgtcatcctcatcaagcttgccgaccgcacccacaacatgcgtactctgggctcgctgcgcccggataaacgccgacgcatcgcccgcgaaaccctggaaatttacagcccgctggcgcaccgtttaggcatccatcacatcaaaaccgagctcgaagagctgggctttgaagcactgtaccctaatcgctaccgcgtcattaaagaggtggtcaaagcggcgcgcggcaaccgtaaggagatgattcaaaagatcctctccgaaatcgaagggcgtttgcaggaagcggggatcccctgccgcgtcagcggtcgcgagaagcatctatactccatctactgtaaaatggtgctcaaagagcaacgttttcactcgatcatggatatctacgccttccgcgttatcgtccatgatgccgatatctgctatcgcgtgctcggccagatgcacagcctctacaaaccgcgtccaggtcgtttcaaagattacatcgccattccgaaagcgaacggctatcagtctttgcatacctcgatgatcggcccccacggcgtcccggtcgaggtacaaattcgtaccgaagacatggaccagatggcggagatgggggtagcggcgcactgggcttataaagagcacggcggcgaaagcagcaccaccgcgcaaatccgcgctcagcgctggatgcaaagcctgctggagctgcagcagagcgccggtagctcgtttgaatttatcgagagcgtaaaatccgatctgttccccgatgagatttacgttttcaccccggaagggcgcattgtcgaactgcctgccggcgccacgccggtggacttcgcctacgcggtgcataccgatatcggtcatgcctgcgtcggcgcgcgcgtcgaccgtcagccctatccgctgtcgcagccgctctccagcggtcagactgtcgaaattatcaccgcgccgggcgctcgcccgaacgccgcctggctgaactttgtcgtcagttcgaaagcgcgcgccaagatccgtcagctgctgaaaaaccttaagcgcgacgattcggtcagccttggccgtcgtctgctcaatcacgcgctgggcggaagccgcaaactcgccgagatcccaccggagaatatccagcgcgaactcgatcgcatgaagctggcctcgcttgacgatctgctggcggaaatcggtctgggcaacgccatgagcgtcgtggtggcaaaaaacctgcagcagggcgaagccgctgcggcgccggtgccggccaacgcgtcgaaccacggtcatctgccaatcaaaggcgccgatggcgtgttgatcaccttcgccaagtgctgtcgtccaattccaggtgacccgattatcgcccacgtcagcccgggtaaagggctggttatccaccatgaatcctgtcgtaacattcgcggctaccagaaagagccggagaaatttatggcggttgagtgggataaagagaccgctcaggagttcatcaccgaaatcaaggtggacatgtttaaccaccagggcgcgctggctaacctgacggcggcgatcaacaccgcgtcttccaatatccagagcctgaatacggaagagaaagatggccgcgtatacagcgcctttatccgcctgaccgcgcgcgaccgcgtgcatctggcgaatatcatgcgcaaaatccgcgtcatgccggacgtgattaaagtcacccgtaaccgaaactagctttatgaactcaaagcgctacgagcgtatctgcgagatgctcgccaggcgtcagcctgacctgacggtctgcatggagcaggtccataagcctcataacgtctctgcggtcatccggaccgcagatgccgttggcgtacacgaagtgcatgccgtctggccgagcagccggatgcgtaccatggcctccgccgccgcgggcagcaacagctgggtgcaggttaaaacccaccgcactatcgcagatgccgtcggccacctgaaaggccagggcatgcaaattctcgccactcacctttccgacaaagccatcgattttcgtgaaatcgactatacgcgtccaacctgcatcctgatgggtcaggaaaaaaccggcatcacccaggaagcgctggcgctggccgatcaggacatcattatcccgatgatcggcatggtgcagtcgctgaacgtctccgtcgcctcggcgctgatcctttacgaggcgcagcgccagcggcagaatgccgggatgtaccaacgcgccaacagcatgctgccgccacaagagcagcagcgcctgctgttcgaaggcggctatccggtgctggcccgcgtcgccagacaaaaaggtctgccttacccccacgttaacgagcagggcgaagtggaagccgatgccgcgtggtgggctaccatgcaggctgcgaggtaaacccaatgtcaggccgcctgttagatgccgttccgctcagttcactcaccggtgtgggcgctgcgcagagcagcaaactggcgaagattggcctgcatacggtacaggatctgctgctgcacctgcctttacgctacgaagatcgcacccatctttacccgatagccgagctacttcccggagtttatgccaccgtggaaggtgaagtgctcaacagcaatatcaccttcggcggccggcggatgatgacctgccagatcagcgacggcaccggcatcctcaccatgcgctttttcaacttcaacgcggcgatgaaaaacagcctcgcgaccggtcgtcgggtactggcctacggtgaagccaaacgcgggaagtacggcgccgagatgatccacccggaatatcgcgtccagggcgatatgagtactccggagctgcaggaaacgttaaccccagtctatccgaccaccgaaggcatcaagcaggcgaccctgcgcaagctcaccgatcaggcgcttgagctcctggaaacctgcgcgattagcgaactcctgccgccggagctggcgcaggggatgatgagcctgccggaggcgctgcgtacgctgcaccgcccgcctccctccttgcaacttagcgagctggaaagcggcaagcacccggcgcagcagcgtctgattctggaagagctgctggcgcataacctcagcatgctggcgctgcgggcaggcgcccagcgctatcacgccctgccgctcggcgccaacgataccctgaaaaaccaactgctggcctccctgccctttaagcccaccggcgcgcaggcgcgggttaccgccgagattgaacacgatatggcgctggacgtgccgatgatgcgcctggtgcagggcgacgttggctccggtaaaacgctggtcgctgccctggccgccttgcgcgctatcgtccacggcaaacaggtggcgctgatggcgcccaccgaactgcttgccgagcagcatgccaataacttccgcaactggttcgaaccgctgggcatagaagtcggctggctggcgggcaaacagaaaggcaaagcccgtcaggcgcagcaggaggctatcgccagcggcgaggtgcagatgattgtcggcacccacgccatcttccaggagcaggtgcagtttaacggcctggcgctggtgattattgacgaacagcaccgcttcggcgtgcatcagcggctggcgctgtgggagaaaggtcagcagcaggggttccacccgcatcagctgatcatgaccgccacgccgatcccccgcaccctggcgatgaccgcctacgccgatctggacacctcgattatcgacgagctgccgccaggccgaactccggtgaccaccgtcgccatccccgacacccggcgcagcgatattatcgaccgcgtgcgcaacgcctgtacccatgaaggtcgccaggcctattgggtctgtacgctgattgaagagtccgatctgctggaagcccaggcggcggaagccacctgggaagagctcaaactggcgctgccggagctcaatatcggcctcgtccacgggcggatgaaaccggcggagaagcaggcggtgatgctggccttcaagcagggcgagatgcatctgctggtagccaccacggtgattgaagtcggcgtcgacgtgcctaactcaagcctgatgattatcgaaaacccggaacgtctgggtctggcgcagctgcaccagctcagagggcgcgtcgggcgcggcgcagtcgcttcccactgcgtgctactctataaatcgccgctctccaaaacggcgcagaaacgtctgcaggtcctgcgcgacagcaacgatggtttcgtcattgcccagaaagacctcgaaattcgcggtcccggcgagctgctcggcacccgccagaccggcaacgccgaatttaaagtggcggacttactgcgcgatcaggcgatgatccccgatgtccagcgcattgctcgccacattcatgaacgctatccgctgcaggcccaggcgcttatcgagcgctggatgccggaaaccgaacgctattccaacgcgtagcgcgcttttgccgcgctgcgggcaatttttctacacaacgagtggattatgaaacgagaactggccatcgaattttcgcgtgtcaccgaagccgccgcgctggcgggctataaatggctgggccgcggcgataagaataccgccgacggcgcagcggttaacgccatgcgcattatgcttaacctcgtcaatatcgacggcaccatcgtcatcggcgagggcgaaatcgatgaagcgccgatgctctatatcggcgaaaaagtgggtaccggcaagggcgatgcggtagatatcgccgtcgatcccatcgaaggcacccgcatgacggcgatgggccaggccaacgccctggcggtgatggcggtcggcgataagggcagcttcctcaacgcgccggatatgtatatggaaaagctgatcgtcggcccgggcgctaaaggcgctatcgaccttaatctgccgctggaagagaacctgcacaatatcgcccgcgccctgaacaagccgctgggcgagctgaccgtcaccgtgctggcgaaaccgcgccacgacgcggtcattgcccagctgcagcagctgggcgtgcgcgtgttcgctattcccgatggcgacgtcgcggcctctattctcacctgcatgccggatagcgaagtcgacgtactgtacggcatcggcggcgcgccggaaggggtggtttccgccgcggtgatccgcgccctcgacggggatatgcaggggcgcctgctggctcgccaccacgtgaagggcgataacgaagagaaccgccgcatcggtgaaaatgagctggcgcgctgcaaaaccatgggcattgaagcgggcaaagtgctgcgtctggatgaaatggcgcgcagcgataacgtcgtcttctccgccaccgggatcaccaaaggcgatctgctggacggcatcacccgcaagggcaacatggccaccaccgagacgctgctgatccgcggcaagtcgcgcactatccgtcgtatccagtcgattcattacctcgaccgtaaagatccagacattcagcagcacatcctgtaataccgctttttctctcccaggcaaccgtccgcaggcggttgccctgttcttcgtttatatttgatcaatagagctttcttgcgccttcggggtggaaatctggctcgtctggaccgaagataaggcatcgcttggcaacaggagaagacgatggcggactgggttagcggcaaagtgacaaaagtggagtactggacggacgccttgttcagtttatacgtgcgggcgcctgttcatccgtttaccgccgggcaatttaccaagctcgggctggaaatcgacggcgaacgcgtgcagcgcgcctactcctacgtcaacgcccccggcaatcccgacctcgagttctatttggtcaccgtcccggaaggcaagctgagcccgcgtctggcggcgctgaagccgggcgatgaagtcctggtggtgagtgaagcggcaggtttcttcgtcctcgaggaagtaccggattgcgataccctgtggatgctggcgaccggcactgccctcgggccgtacctgtcaattttgcaggaaggcaaggaccttgagcgctttaataacctggtgctggtccacgccgtccgctacgccgcggacctgagctatctgccgctaatgcgcgaactggagcagcgctatgccggcaaactccgtattcagacggtggtcagccgcgaaaccgtggaaggctcgctgaccggccgggtgccgtttctgattgaaaccggcgcgctggaagaggccgtcggcctgccgatgaccactgacaccagccatgtgatgctgtgcggcaacccgcaaatggtgcgcgatacccaacagctgttaaaagagacccggcagatgaccaaacatctgcgtcgccggccgggccatatgacggcggagcactactggtaatcaggcgtccgctttccagcgcacgtcctgggtctccttgccgaacttattctcgccctgggtgccgacaaacgcccccaggtcgatcagcatcatgacgataatcagcgtcggcacaaagcgcccgacgccccactgccagacctgcggcaacatcgcccagttccccgccagcagcatccacgccagaaccatcagcagcgcccacagcccggatttgccgcgatcgtgcagccgcttgaccaccaccgccgccgtcggccacagcaggcagacgataataaacgccgccgtctgcaggttgagcagattgctgcctgccagggtaaacagggcgctcatggtcaccagccagatggcaatccagatccagaaatcgcggcggccaatgcgccctttaattgagaataaccactgctgtagggtcatgcgtttttccttatcatcatcgtctgcgtagtttaccctggcgtcgtgactttttgacaagcgccgcgcttcccgatttaatcgtcagcaggcaaaaaaaggaacgacgggcatgaagaagtggacaattttgtggttaagtgggctgatgggccttgccgtcggcccgcacgcgttgtccgcagagagcgaatcgacgaccgcggcagcgccctacctgctcgccggcgcgccgagctttgaccagtcgatcagtcagttccgcgagaaattcaacgccgataacccaaagctgcctctgaacgaattccgttccatcgccaccagtcgcgatcgggctaacctgacccgcgccgccagcaaaattaacgaaaatctctatgcctccaccgcgctggagcgcggcacgctgaagatcaaatccatgcagatcacctggctgccgatccaggggccggagcaaaaggcggccaggaccaaagcgctggagtatatgagcgccatgatccgcgccttcgtgccgacttttagccaggcgcaaagccagcaaaaactgcagaaactgctggccgccggcaagggcaagcgctacttcgccgataccgaaggcgccgtgcgctatgtggtggcagatcatggggaaaagggcctgaccttcgccattgaaccgattaagctggcgctatctgaaacgctggaaggtaacaataaatgacaaaaagcaaagcctttccagtgacgagtctctatactgtttcacagaccatgctgccctctggggcggctatattccttaattcgcttaagtagcgtggagaattaaaatgcgacatcctttagtgatgggtaactggaaactgaacggcagccgccacatggtaaacgaactggttgcgaacctgcgtaccgagctggctggcgtaagcggctgtgcagttgccatcgccccgccggaaatgtatctggacctggctaagcgcgcggcagaaggcagccacattcacctgggcgcgcagaacgttgacgtgaatctgtccggcgcattcaccggtgaaacctccgccgaaatgctgaaagatatcggcgcgcagtacatcatcatcggccactccgagcgtcgtacctaccacaaagaatccgacgagctgatcgcgaagaaattcgccgtgctgaaagagcagggtctgaccccggttctgtgcatcggtgaaaccgaagccgaaaacgaagcgggcaaaacggaagaagtttgcgcgcgtcagatcgacgccgtgctgaaaacccagggcgctgccgctttcgaaggcgtggttatcgcttacgaaccagtatgggctatcggtaccggcaaatcagcgaccccggctcaggcgcaggcggtgcacaaattcatccgtgaccacattgctaaagctgacgccaaaatcgctgagcaagtgatcatccagtacggcggttccgttaacgctggcaacgccgcagagctgttcacccagccggacatcgacggcgcgctggttggcggcgcctccctgaaagctgacgctttcgcggtgatcgttaaagcagcagaagcagcgaaaaaagcgtaattcgcttttcccggtggcgacacgcgaccgggttgactgacaaaacgtgggagcccggcctagcacagcgcaagccgggctttcttttgccgttacagtttccccaacagctgataccaggcgtagtccagcggcagtaaaatcagataactcaccgccgccagcgccagacacagttgcatccccgccctcgccgggaccttgcctaaccccatcgccaccacgatcggcgacgcctgatagggcagcagcggcgtggaatagcccagcacctgaatcataatcacgcttagcagcggaaaaccggtggcgtcggcaaagctctgggcaaaggtggtatacagcgccggcacgccgttggcggtcataataaagttcagcgcgctggttatcccggtcagggcgagaaagctggtgaaaggattgtctttatccaggggcatcacctgcagcagcgcattgcccactgcgccgccaatcccggtttgggtgacggcgatcgctagccccagaatcccggcgacgtaaatgcaggtgcgcatattcaccccgctggcaaactcctcgccgttaataaagcccacccgcggcagcagcgtgatcacagccgccgccaggccggtccacgccgggccgacgccgtgccagctctcggtcacccatagcgagaggaccaccgccagcagccacgccagacgtttctcgtcgcggctcatcggcggcagcggcgccaggtcgcgcggtggatgcggcttgccgggaaacagccagcaaatcagcgccaccagcaccgcccctttcagccagccaagcaccggcgtatgcagcagtaaatagggaacataattcagatggataccgtacgagccttccgccgcgccactcatcaccagattcggcacgttggcgggcaaaatcgttgccgacagctgaaaggtgccgaaccccaccgccagcgccaggccgaaccagccgcggctgccgtcggcaatgcccgcgcggcgggccatcgccgccacgatcggcatcagcagcgcgatgcgccccatgttggagggcatcacgaacgccagggcgtagctcaggagtaccacgctggcgaccatccgcggccaggagtcggtgagcctggccgacagcgcctgcgccgcccggtccgccagtccggttttacggatggcgatgccgagcacaaagccgctgaacaccagccagaacgccgaagaggcaaagccgccgaagatcacctccggcggagcgattttcgccatcattgccgctgcgaagaacagcagcgcggtgataaattccggcagcagcgacgtcgcccagagcacgatggtgacgccgacaatcaatgaaggaaggaacagcgggtgggtaagccagagcgacatgcctgtctcctgtcgtttttttcagcaagaatacgacgacaggtaagacaggtaaacgccagaactagtggtttgcgttaaggatggcgcagcgatgatcctgaatttcttccgctgaagcccggttcagggtcagcaggttacgctccgtcgcaagcagcaccagcgagccgtcgctctgttgcgccattgccagcgcgaagcgtcccatatgttcacgcgcctccggcacctcttccgccagcatcaggaacgggctacgctgggccagctccgcctccgtcacccgtcgcgccaggtattcgtggccctgaagcccgcccggtagcggcagccagcggctgctgatcgctgcggcatccttatctaactgcgcgcgcacatcggggcgcaggcaggagatatgaatatggaaatggttttgcgtacgtccactgcgcgagttgatcgccagcgataccgcgttatcaggaaccggcgcgccgtggcgctggctcatgatttcacgcccctgccaggcctgccagaaaaagttcggcgtcaacggatccagcagcagcgggctttcggtgccgttgatgcggtaggtcggcatcagcaaatactgcagcgggccgttacggtctttaaacagcacatagccgcccttgaggttcacttccgcgcacggcgacgggttttgctgctgttgctgatggggtacgcactgctgcaggacaatcttgcgtaatgcgtccgggttgccagagtgcagccagtagtagccgcccgccagcgccgcgaggatcgccaccagcagcgccagcaaaaagtatcttactcttctcattttcattccctgttaagcctgaagcggaagagtagcgtaatttgatgactaaatgaaaacagatggtggacggggcgttatcccgggtagcggctgatgccttacccgggctacgcaccgcgcaaaactgtagccctgctaagcgtagcgcaagcagggacaagagaattaacgctggctaatctggtcgaaggtgccgccgttggagaagtgctctttctgcgctttcgtccagccgccgaactcctgatcgatggtaaacagcttcagtttcgggaattcgttagcatatttcttcgccacattcggatcgcgcgggcggtagaagttcttcgccgcaatctcctggccttccggcgagtagagatacttcaggtacgcttccgccacctgacgcgtgcctttcttatccaccactttgtcgaccaccgagacggtcggctcagccagaatcgactcacttggggtcacgatttcaaacttgtctttgcccagttcgttggtcgccagcagcgcttcgttttcccaggcgatcagtacgtcgccgatgccgcgttctacgaaggtattggtcgaaccgcgcgcgccggagtccagcacttccacgtttttatacagcgccttgacgaattcctgggctttcgcctggtcgccgtgattctgatgcagggcatagccccaggccgccaggtagttccagcgggcgccgccggagcttttcgggttcggggtaatgaccgacacgcccggtttgatcagatcgttccagtcatggatctgtttcggattgcccttgcggacgaggaacacgatggtggaggtatacggcgcagagttatccggcaggcgtttcagccagtttttatcgatgcggccgcgttcagcaatagcgtcgacatcgtaggccagcgccagcgtgaccacatccgcttcaataccgttaatcaccgaggtcgcctgtttgccagagccaccatgcgactggcggatcaccacgttgtcgccggtctcctgcttccagtgtgcgctaaacgctttgttgtactgttcgtacagctcgcgcgttggatcataagatacgtttaatagctgaatgtcttttgccagaacgctggcggatgccagcaacagagttaaccctacgccccacttattcatcgcaccgctctctttatgtgtgttgtgatgggttaagcgtgccagaaagcgattcaatgattaaagaataaaaaaagattggctataacttgcggatataaagacgcgagtaaggatgaccccctcccgggcgggagagggcgcgaagcgattagacttcttccatgcgacccagcagcgcctgcagacgttcctgccagccctgctgctgctctttcagctggctgttttcgcgctccagctcttcacgaccatgctgcgcgctctgaacttcctgcaccagggtgttgttcttttctttcagctcttcgatttccatctgcaacagagtgatggtatcaatcgcctgctgaaccttagattctaatttctcaaacacttctaatgacatcgtcatacctctcctgaacttgcaaggcgttgatagaaactcgtgtttcgtatacgcggtcccgccttaacgaaaattagcgcacatagcggtgttatcgtcgattgtatgaatccccgccgcccctgtccagcggcaagccgcgtagattgcggtttgcaacacttttcagtctttacctggtgctttcagcgcagttcgctcgtagttcatgggtcaatgttaattttatggttaacaaaatgcgtggtgaaacgctccggcagcgctctcaatgcgcgcaaatggcgcgaaaacgctcattttcttgacgaggcacacacatttgaagttcgatatttctcgtttttgctcgttaacgataaattaacactatgcctacatggcaatatggtcgtctgtgaccaccctacatacaataatcatcaccacgcttcaggattcgattatgagccaaacatcaaccttaaaaggccagtgcatcgcagagttcctcggtaccgggttgttgatctttttcggcgttgggtgcgtggctgcgctcaaggtcgcgggagccagcttcggacaatgggaaatcagcatcatctggggtctgggcgtcgccatggcgatctacctgaccgccggggtctccggtgcgcaccttaacccagcggtgactatcgcgctgtggctgttcgcctgcttcgaaggccgcaaagtggttccttttattatttcgcaattcgctggcgccttttgcgctgcggcattagtttacgggctttactacaatcttttcctcgattatgaaaccacccaccatatgattcgcggcagcgtggaaagcctcgatctggccggcattttctccacttacccgaacccgcacatcaattttgtgcaggccttcgcggtagagatggtgattaccgctatcctgatgggcgtcatcctggcgctgaccgacgatggcaacggcataccgcgcggcccgctggcccctctgctgattggcctgctgattgcggtgattggcgcctccatgggaccgctgaccggcttcgccatgaacccggcgcgtgacatcggcccgaaagccttcgcctggctggcggggtggggtgacgtcgccttcaccggcggcaaagatattccttatttcctggtgccgctgtgcgcaccggtggtcggcgcggcgctgggcgcattcagctatcgtaagctgattggccgtcacctgccttgcgacacctgcgtggaggaagagcaacagagcccctcctcttccaccgctcaacataaagcttcgctgtaatctgactacgggacaccgactatgaccgacaaaaaatatatcgttgcgcttgaccagggcactaccagctcccgggccgttgtgatggatcatgatgccaatatcgtcagcgtctcccagcgagaatttgaacagatttatcctaagccaggctgggtcgaacacgacccgatggaaatctgggcttcccaaagctcgacgctggtcgaagcgctggccaaagcggatatcaactccgatcagatcgcggccatcggcatcaccaatcagcgtgagaccgtggtggtgtgggagcgagagaccggtaaacccatctacaacgctatcgtctggcagtgccgccgtaccgcggagatctgcgagcagctcaagcgtgacgggatggaagagtatatccgcaaggccacaggcctggtggtggacccgtacttctccggcaccaaggtgaaatggatcctcgaccatgtcgaaggttcccgtgagcgtgcgaagcgcggcgagccgctgttcggcaccgttgacacctggcttatctggaagatgacccagggccgcgtgcacgtcaccgactacaccaacgcctcgcgtaccatgctgttcaacatccacgacctcgactgggacgacaagatgctagacgcgctggacattccgcgcgccatgctgccggaagtgcgcaagtcttccgaagtgtacggtcagaccaacatcggtggtaaaggcgggacccgtattcctatcgccgggatcgccggtgaccagcaggcggccctgttcggccagctgtgcgtcaaggaagggatggcgaaaaacacctacggcaccggctgctttatgctgatgaataccggcgaaaaagcggtcacctccacccacggtctgctgaccaccatcgcctgcggcccgcgcggcgaggtgaactacgctctggaaggggcggtgtttatggccggcgcgtctattcagtggctgcgcgacgagatgaagctcatcagcgatgccttcgactccgagtacttcgccaccaaagtgaaggataccaacggcgtatacgtggtacccgcgttcaccggtcttggcgcaccgtactgggacccgtatgcccgcggcgcgattttcggcctcccccgcggcgtgaactccaaccacattatccgtgcgacgctggagtccatcgcctttcagacccgcgacgtgctggaggcgatgcaggctgactccggcattcgtctgcacgccctgcgcgtagacggcggcgcggtggctaacaacttcctgatgcagttccaatccgatatcctcggcacccgtgtcgagcgtccggaagtacgcgaagtgacggcgctgggcgcggcctatctggccggtctggcggtcggtttctggcagaatctggatgaactgcaggagaaagcggtgattgagcgcgaattccgcccggggattgaaactactgagcgtaactatcgttacagcggctggaagaaagcggtgaaacgcgcgttagcgtgggaagagcacgacgaagcgtaagattgtgaagttattcccggcttgcggcgtaaacgccttagccgggctacaaaaccccaaacagcacgatcttgtagcccggacaggtgcgcagcaccgcctccgggttttttatcagccaaatatcggcagcagcaggtacagcttaatcaccagcgcgttgacgatatcgataaagaacgcccccaccatcggcactaccaggaaggccatatgcgatggcccgaaacggtcggtaatcgcctgcatattggcgatcgccgtcggcgttgcccccaggccaaacccgcaatgcccggctgccagcaccgcggcatcgtagtttttgcccatcatccgataagtgacgaacaccgcatacagcgccatcgccagcgcctgcaccgccaggataataatcatcggcagcgccagcgaggccaactcccacagcttgaggctcatcagcgccatggcgaggaacagcgacaggctgacgttgcccaataccgataccgcgcgatcgaacacccgatacaaccccgccagcgccaggctgttgctgaggatcacgccgataaacagcacgcagacgaaggtcggcagctcgaagacgctccccgccagcagttgcgcaaccaccttgcccagcgtcagacagatggcgatcagggcgatactttcgatcagcaccagcgaggtgatcacccgccccacgtccggcttttcaaaggcggttggcgccacctgatcgtccggtgtcccgtccggtgaggaagagtgcttcaccagataacgcgccaccgggccgccgatcaggccgcccagcaccaggccgaaagtcgcgcaggccatcgccacctcggtggcgttggcaaaaccgtagcgctcaacgaacagcttactccacgccgccccggtgccgtggccgccggataaggtaatcgacccggccagcagacccattagcggatccagccccagcagcgtcgccatgccgataccgagggcgttctgcagcagcagcaggccaaccaccacgatcaggaaagtgcccagcaccttgccgccggcccgcaggctggcgaggttggcgttaagaccgatggtggcgaagaacgccagcatcagcggatctttcagactcatatcgaaatcaatttcgatatccatgctttttttcagcgccagcagcgccagcgccaccagcagaccgccggcaacgggttcaggaatagtgtatttcttaaggaagggaacggtttgtacgagttttctgccgagtaacagcacgagcgttgcggcaacgagcgtcgataaggtatcgagatgaaacataaaaagctccttatgggcgcatgatccattcacacgcgacgatattcctggtgtctttagcttctcatcatgaggagtcagagggggattttacgcagaacggcggaaaaattgacagaaaaagatattttgtatccttaatgatgcgatttagcatacaaaatgttaattacctcgttgcgcatattcacggtataaatttttatgagcaaacgctggcaaacgtttgcttttggtctacagtccgataaaattcccgctttgccaccttgggattgcttgtgatgtccgttaacaccgcagagtcagaaaatgcgcaaccggttgcgcataaaccagccagcgaattaatctaccgcctcgaagatcgcccgccgctaccgcaaaccctgttcgccgccttccagcacctgctggcgatgtttgtcgcggtgatcaccccggcgctgttaatctgccaggctctcggtctcccggcgcaagatacccaacatatcatcagcatgtcgctgttcgcctccggcgtcgcctctattattcagatcaaagcctggggcccggtcggctccggactgctctccatccagggcaccagcttcaactttgtcgccccgctgatcatgggcggtaccgccttgaaaaccggcggcgccgacgtccccaccatgatggccgccctcttcggcaccctgatgctggccagctgcaccgaaatggtcctctcccggatcctgcacctggcgcgccgtatcattaccccgctggtttccggcgtggtggtgatgattatcggcctgtcgctgattcaggtcggactgacctccatcggcggcggctacgccgcgatggccgaccacacctttggtgcgccgaaaaatctgctgctggcgggtatcgtgctggcgctgattattatcctcaaccgccagcgcaacccgtacctgcgcatcgcctcgctagtgattgccatggctgccggttatctggcggcgtggttcctcgatatgctgccagccaacaccgccccgaccaacagcagcctcatcaccgtcccgacgccgctctattatggcctcggcatcgactggagtctgctgctgcccctgatgctggtgtttatgatcacctccctggaaaccatcggcgatatcaccgccacctccgacgtctccgaacagccggtctcgggtccgctgtatatgaagcgcctgaaaggcggcgtgctggctaacggcctgaactccttcgtttccgcggtcttcaacaccttcccgaactcatgcttcggccagaacaacggcgtgatccagctgaccggggtcgcccgccgctacgtcggctttgtggttgccctgatgctgatcgtcctcggcctgttcccggcggtgagcggctttgtccagcatatccctgagccagtgctcggcggcgccacgctggtgatgttcggcaccatcgccgcgtccggcgtgcgcatcgtctcccgtgaaccgctgaaccgtcgggcgatcctgattatcgctctgtcgctggcggtaggcctcggcgtgtcgcagcagccgctgatcctgcagttcgccccggactggctgaaaaacctgctttcctccgggattgccgccggcggtatcacggcgattgttctgaatttaattttcccgccagaaaaggcgtgatctcatgcgttcccggtcacgcaacggccgggacgtcctccaaccaccagccccatcacggaaataaaccacgcctgccttgagaagtgcgcctaaatcgggcataacacggtgatgtgcatctcacagaatggaagaccatgaaatttcttggaaagctgattctctggctgctagtcgctctgctgctcgtcattattggcgcgtggttcctgctgcaaacccactggggcgcccgccagaccagcgcctggctcagcaatggcaccggctggcaggtctccttcgatgagatggagcacgatttctcctccccccttcatgtgcagttgcgaaacgtcacctttggtcgggaaggcaagcctgccactttggtggcaaaaacggtcgacattggcttcagcacccgccagtttagcgatccgctgcatgcggatgagatagtccttaacgacggcactctgaatctgtcaccccactctgcagacctgccgttcgctgccgaccggctgatgttgcgcaatatggctttcaacagcccggaaaccggctgggcgctcagcgcgcagcgcgtcaccggcggcgtcagcccatggacgccggaggcgggcaatgtgctggggaaaacggcgcagatccagatgagcgcgggctcgatgacgctcaatggcgtcgaagccagcaacgttctgattcagggtaagattgatcagggcgaggtcaccctctccaccctcggcgccgatgtcgcccgcggcaccttaaccggcaatgccaaacgcagcgccgatggcagctggcgggtggataacctccagctcaacgagattcgactgcagagccccgcctcgctgaccgagtttttcgcgccgttaaccacggtcccctctctgcagattggccgcctggacatcaccgacgcccgcctgcagggaccggactgggcggtaaccgacctcgacctgagcctgcgcaacctgacccttagccacggcggctggcagagtgaggacggcacgctgtcgatgaacgctagcgaatttatctacggctcgctgcatcttttcgacccgatcctcaatgccgaattctctccccagggcattgcgctgcgacagttcacttcgcgctgggagggcggcatggtgcgcacctccggcaactggctgcgcgccgggaacgccctggtgctcgacgacaccgccttcgccggactggagtacacgctgccggcgaactggaaacagctgtggatgacgccgctgccaacctggctgcaaagcctgacgctgaaaaaattcagcgccagccgcaatctgatcatcgatgtggaccctgctttcccgtggcaaattaccgccctcgatggctatggcggcgagctacagctggtgaaaaacggcagctggggagtatggaacggcagcgcgacgctgaacgccgcggcggcgactttcaaccggatcgacgtgcgccgcccatcactcaaactgaacgccacagcctcgacggtcaatatcactgagcttagcgccttcaccgagcgcggcattttgcaggccaccgccgcggtatcccagctgccgcagcgccaggtcaatctgagcttcagcggccgcggcgtgccgctgaatattctgcaggcctggggctggccgtcgctacctataagcggggatggcaatctccagctgaccgccagcggcagcgtgcaggccgatgccccgctcaaaccgacgatcaacgggcagctcagcgccgtgaatatggagaaacagcaggtggcgcaaatcatgcgcaacggcgaggtcagccccgcccccgccgcgccagcgcccgctcccgtcaccccatagcgatgcccattccctctcctctatggggagagggattgcttcccggcaaaactccactctgactactctctccctttcagggagagagttggggtgcgagtcctgaaacctgtgcgcaatacgcggctatctgtacctatttagcgcaacaggttcctttcaaatatcagagttgctataaccaaatcactggaagtcgataaaaaaccgctccctgtacctacaaaaatataaaaggatcaatcatgcctgaaatacgtcagcgtattctggagaatatgcaaaaattctcccgggccatgatcggcgccgtattgttcttgccggtcattggcttaattctggccctcagttcagtattaactaatccgacattaattgctgaaaccagtttcttacatcagcttgggcaaatgctcggcgacaccttttggcctttatttggcaacctcggcttattattttgcgtcggcatcagctatggcctggcaaaggataaaaaaaccgaagtcgcactggtttcagtgatgtgttttattatgtttcttggcgccaaccactcctggctggaacacacccatggactcgccgaaaaaattaacggtgaatattatggcaccgggcaaacccagctgctgggctttgtggtggtggatatgggcgttttcctgggcattattctcggctgcacgattgcgtgggtgcacaataaagtctctgccattgagctgcctggcgcgctgtcgatgtacggcggcgccaagctgacgctggtggcgatgacgccggtggttatcttctacgccatcgcctttacctggatttggccctttatgacccacggcatctccgccctcaccggttttatgaaaaatgccggggtcgccggggtcttcgtctatggtttctttgaaaaattccttatccccaccggcctgcaccatttcgtctggtcccccttccagctcacccagattggcggcacgctgaacgtggatggtcaggtggtctccggcacccaggccattttcctcgcctatatgcgccatcccgacctgacgccggtcatgaacgacgcattacgtttttcgcagcaagggatgaccactatctttggcctggcgggcgcctcgctggcgttctaccacaccgcgaaaccggagaagaaagcgatggcgaaggcgattctgctgccggcgattatcacctcgatgctgaccggcatcaccgagccgattgagttcaccttcttatttgtctcaccgctgctgtgggtgatccacgcgacgttaaccgccgcctcgcaggccatttgcgacatcttcaccgtacgtccctggggagcatcgggcctgatcgagtttctgatctataacctgccgctgccggtctccttaacgcgctggccgggctatgtccttatcggtatcggccagttcgccgtctactacgtgattttccgcaccctggtggtgaagctgaacctgaaaacgccgggccgggaagatgacgagaacgtgaagctctacagcaaagcagagtaccgccagaaagtcgcgcaaccgcagtcggtcaccgatgacattatccgcggcctcgggggcaaggagaatattctctccgtcgataattgttttactcgcctgcgcgtggccgtgcgcgatatggcgcgggttgatgacacgcaattaaaaaataccggcgccaacggcgtcgtacgcaatcgaaatgaagttcaggttatttatggcgtcaaagtgggacaggtacgttcccgggttgataactggttagcagaaaattaatgaggagtatttatgaaattaaccgtattaggcgggggcggcgttcgctctgcatttttagcgaaatctctggcctataacgctcaccgcattggtttaacagaagtcgtttttctcgataactctgctgataatctggcgatatttggcgaaattgcccgctatgtatttaataccattcgcccggatattcagtttagtaccaccaccgacccggtcgcagccctgcaggacgccaactatatcattaccaccctgcgggttggcggcgatgaaagccgcattcgcgacgaacgtattgcgcttgagcataacactctcggccaggagaccaccggcgccggcggtttcgcgatggccatgcgctcgatcccggcgatccttcgctattgccggctgatcgaagaacatgccgccgaagacgctattctgtttaactttaccaacccgtcaggtctggtgacggaagcgattattaagtccggctttaagcgccgggtctatgggatctgcgatgccccctccgagctgattcgtgaactgccggcgatccttggctgtgaggagcgcgacctcagcgtggaatgctatgggctgaaccatttctcctggtttacccacttcaccgtccgtggggaagaggtgaccgaacggctgatcgccagcccggaactgtaccagaagacggcgatgcagtacttctccccggagctggtacggctttgtgataatcagctcctcaatgaatatctctattattactactatcgcgacgaggcgctgaaggcgattcaaggggccggcgagacgcgcggagagcagatcgcccgcatcaatcaggagatgcgcgaggcgctgcgcaccgtggatgccagaacgcaaccggaggccgccttcaccatctggatgcagcattacctacgccgggaaaacagctatatgcagaacgaatcccggcaggagaaattccacacccgcgaaccgctgacgctgcgccagtttatcgaagagccggacaccggcggctatgccggagtggcgctggatatcctggaagcggtgaacagcaccaccaccaagcggatcgtggtgtcgatccagaatcacgacacgctcgactttttgcgcccggacgacgtgatcgagatcagctgcgacctgagccgggatggcctcaaaccggtgacgccggtgaaggtaccgacggcgcagaagaatatgattgcctgcgtgaaggagtatgagcggctggcggtggcggcgatcctgcagcaggataaatcgctggcggtgcgggcgctgatggcgcacccgctgatcggttcctattcgctggcgaaaaccctggtcgaagcctatctcgacgatgagcagttcgccgcctggcggtaatccgctgccgatgggattcccccgctcgcaccgcgcttagcgggggctaactattgctacgtagactggtaaaccacatcttcaatagtcgctcaaagcctaagatgcagtagccgaaaaacgggttgctccagtaaatatcatcatcgaacttctgcgggtcgtgaataataaacgccgtatccgcggcctgcgccagcgggctttggtagtcgccggtaaagcagaccagattaatctccttcccctccagggccttaacccagttgagcgccgagctgctgcgcccggatttagaaatgatccagatggagtcgaagcaggcggcgtttttctgttcgaggatttcgtaatcgggccacagcgccaggctggcattcacgccggtgacgagaaacttgttgtaaatatactgggcgatcagctgtgaaaagccgctgccgtggatcaggatgcgctgctgtttaaggcttgccagcagcggcgtcagcgcttcttccggctgaacgctcatgtagtcgatatcgttggtgacatcgagcttcggcatggtgatattgaacttgatgaaatagaccagctccagccagccgctgaacttcagttttttcgctagccggaccagggaagaggggttgctgtagcactgttcggccacagcgcgaactccctggcggatacactgctccgggtcgttctgaataaagcgcagcacggtcatttccgttttgcttagcttcacgtcacgaaagatattttctacgtccatggcgggctcctctcagcggcagaatacgctaacaccgttcgacaaccgcgtctgcggcctgagtcaccacaatgaaatgaacgttactttttgtacaaaaatggaataaaaaaaccctctccgcctggcgaagagggctgcagccgttaagatggtgttttacagggtaatcgtcagcgtattgccctcggcgctcaccaccacgcccagttcgctaccggtctgcgtaccgccctgcacgcccgcgacctgcgggatattgcgcagacacagcgtccagccgcgggcctcgccttcgccgctcacagcgatggcgttaccctggcgcctggccttcagggtgaagatcgtcgagccgtctgccgccggaacgtcacagcgtgcctcgcgtccatcctcaaggtggaacagctggaaggcggtgccctcatgccaggcgtaatccggcttctggtcattgttgcccagcgccagcaggctgttgtcgcgaacgtagaccggcaggctcagcgcatcgtgatgctgcttatgccagcggctacccggcaattcatcgttatgccacagatgcgtccagtgcccttccggcagataaaactgcacttcgccggcctcggagaacaccggcgccaccaggaccgaatcgcccagcatatactggcggtcgagatagtcgcaggccggatcgtccggaaactcgagcatcatcgcgcgcagcatcggcgtgccgcactcgttggccagcgccgcctgacgatagagatacggcatcatgcggcatttcagctgcgtgaagtggcgcaccacgtcgcaggactcgtcatcgtaggcccatggcacccgataggatttgctgccgtgcaggcggctgtggctggagagcaggccgaaggcgcaccagcgcttgtagacgtgggccggcgcggtgttttcgaaaccgccgatatcgtgactccagaaaccaaagccggacatgccgatcgacagcccgccgcgcaggctttccgccatcgattcgtagttggcgtagcagtcgccgccccagtgcaccgggaactgctgcgcgcccaccgaggcggagcgggcgaacagcaccgcctcctgctcgccgacggtctctttcagcaccttccacaccagctcgttatagatgaaggcgtagtggttgtgcattttctgcggatcggaaccatcaaaccactggacgtcggtcgggatacgctcgccaaagtcggtcttgaagcaatcgacccccatcgccacgaggccttttagtttgtcggcataccactggcgggcttccggattggtgaagtcataaatcgccagccccggctgccacttatcccactgccacagcgaaccgtccgggcgcttcagcagataacccttctctttcagctccttgaacaccggcgagcgctgaccgatgtacgggttgatccacacgcagaccttcagccctttcgccttcaggcgcttgatcatcccttccgggtccgggaaggtctgcggatcccattcaaaatcgcaccactggaaggccttcatccagaaacagtcgaagtggaagacgtgcagcggcagatggcgctcagccataccgtcgatgaagctattcaccgtcgcttcgtcatagttggtggtgaacgaggtcgtcagccacagaccaaacgaccatgccggcggcagcgccgggcggccggtgaactgcgtatagcggttaagcaccgctttcggcgtcgggccgtcgatcacgaagtactcaaggtattcgccttcaacgctgaactggactttagagactttctccgagcccacctcgaaggagacgcgctgcggatggttgaccagcacgccgtagccgcggttggtcagatagaacgggatatttttgtaggattgctcggtgctggtgccgccgtcctcgttccaggtttctaccgtctggccgttgcgcaccagggcggtaaagcgctcgccgaggccgtagacggtttcgccgacgccgaggtcgaggcgctcaaacatgtagttgcgctgggtcttactatcctgcacgtagccgttgttttttagctggctaccggtgatacgcacgccgtcgcgcagaaaatccagcccccagaattcgcctttagtcacccgcacgctgaggctgccgcttttcagctcggcgaacccggccgtattttctatttcgacatggacgtctttctgcacgttcagcggatagtgcgggccgttatccagcgcgccctggaagtgctccatgcgcacgccgattatcccttcctgcggcgagaaaaagcgcagggtgaacaatggcgtatccagctgccaggcgcgttcgcggacatcgcgcggcgcggcatagaccaccatttcattcccctgctgctccacctcgtaaacctgtacgggttggatcaggttgagccctggttgaatgagccagtttccatcactgattttcattaaaacgtcctcttagttttgccattctttgtcgatcggggcggcggtgaaatcttgttcgttgcgacgcgcgccctcggccagctcggccatcatttttttcaggaacggcgttttcagcgtgtagtagcgtttggcgatcaccgcgctcagcaggtagcacaccgccggaacgagggtgaacaaggcgataatgatggtgagggtggcgctgttctgggttttagcggcggcatcatagccgccgccggccagcatccagccgatcagcgcgccgcccagcgccagtcccagcttgagcacaaacagggtgccagcgaagctgatgccggtcaggcgtttgccgttacaccattcgccgtagtcgacggtgtcggacatcattacccactggattggcgtcaccagctggtgcagtacgccaatgacgaagataaagacaaacatggtgatttcggcgtccatcggtacgaagaacatcgccacgctgagcaccgccaggagggcgttggtccaccagaagacgctgactttgcatttccagtcggtcagcggtttcgccagcgccgagccaatcaggttgccgacgcagtaggtcgtgaggaaggcggtgaacagcgccgccgagcccatgatccaggtggtgtaatacatcatcgcgccgccgcgaacgcagaccgcgaggatattgaggatggtgagcacgccaaccacccgccactggtcattgcgccagatatcgcgcaggtcttcacgcatcgaggtactgctcggcggcgcttcgacacgctctttggtggtaaagaagcagaaggccagcatcaggaaggcaatcaccgacagcaccgcgatgcccccctggaagccgagcgctttgtcttcgccgccgataaagttgaccagcggcatcatcagcacggtggagagcatgccccccgccgtcgccagcacgaagcgccaggactgcagcgaaatgcgctgcgtcgggttgtcggtgatcacgccgcccagcgcgcagtaagggatattcaccacggtgtagagcagggtcagcagcgtgtaggtcacggcggcgtagatcagcttgccgttgtggcttaaatccggcgagctgtaggccagcacgcagacgaggccgaacgggatagcgccgaagaggatccatgggcggaacttaccccagcggctgcgggtacggtcggcaagcagacccatacacgggtcggaaatcgcgtccagcgcgcgcgccagcaggaacatggtgccgacaaagccggcggggataccaaaaatatcggtgtaaaaaaacatcatgtacaacatgacgttatcaaaaataatgtggctggcggcatcacccatgccataaccaattttctctttgacggacaaaatgtgatctttcatatgcgcactattcccttagcggcaccgagggttggtaccggttacggtttttgtaaacctttgccgcactaagatgaattgcgatatctcgttatcagattacgtttcttgttttctgtgatcgcggtagggaatcagggagtgaaaaagtgtaactcacggattttgtgaggatttgtccaggactgttctgtaaagtccagttttaacagtaaaaaagtgcgtttaggtatgtggtaaacggctgaaagtagctataatgcgccccgcctccatgtagcaatcgaggcgcggaagatcgtcatctccggtgaggtggctggacttcaaatccagttggggccgccagcggtcccgggcaggttcaactcctgtgatcttccgccagtttgcccctgctcccccacagccactccctaccaacctgagccccccaaactcatcatcccagccaatcatttttatccaaaccctgcgttattttgtctctcgcaaacccgttacactggcgcggtggccgcgtgccgttaccaaccgaaacaggagagccataatgacccccgaactcagacactgtttttccattaccatccaggttgataaaccgataattgtctcccgcagcccgcagaccggtaagcgccagctgatcccgattgtcggcggcagcgtctcgggtcaacttcgcggccacgtattacccggcggcgtcgacagccagataatcgaacccgacggcacctgcaggctgtccgcccgctatgccctgcaggtggcggaaggcacggtctatgtggaaaacaatggcatccgccgggtgccggcccagtatcatgaccagcttttcgccgacgatatgcgcttttttagcgatattccgccagaagccatctattttcgcaccgtgcccacctttgaggtggatgctcccgcgctcagctggctaaccacctcgctgtttatctgcgccggtggccggacccaggatggggtgatgctcgacttctatcaggtgggctgattttcactttctgcatataactgttattgccgttagcccgtttttcccctcccggcagcggtctacgatggctccatcttttcattcacccgaatcacagaccggagcagttatgaaagctatcgccattactcaagccgccgctgacggcaacaacatcccttctttaaccgagatcgacctgccgatccccaccgcccacgggcgtgatctgctggtcgctgtgaaggctatctcggtcaatccggtagacaccaaagtgcgcgccggctttcagggcgacacgccgcgggtgctgggctgggacgccgttggcgtggtgcagtccgtcggtgaggaagtgacgctgttcgcgcccggggacgaggtctggtacgccggcgcgctgggccgggccggcagcaacagtgaatatcagctggtggatgagcgcctggtggcgcacaaaccgcgcaccctcgataatgcctccgccgccgcgctgccgctgacggcgatcaccgcctgggagctgctgtttcaccgtctcggcgttgaggaaggcggcaatgcgggcgacacgctgctaatcgtcggcgcggcgggcggcgtggggtctatcctgacccagctggccagtaaactgaccgccatgacggtgatcggcaccgcctcgcgtccggagagccagcagtgggtccgcgaggcgggcgcgcaccatgtgatcgatcacagcaagccgctcgccgacgagctggcgcgcattggtatcacgtcggtaacccatgtcgccagcctgaccaataccgagcagcacttcaacgcgctgatcgacgccctcgccccgcagggcaagctggcgctgattgatgacccggagaccctggacgtggtgccgttgaaagcgaaaagcctgtccctgcactgggaatttatgttcacccgttcaatgtttgagacggatgatatgatcgcccagcatcagctgctcacccgcgtggcggcgctgatcgacaaccacactatcgaaaccacccttggcgaacactacggcgccatcaccgccgccaatctgcagaaagcgcatcgccagctggaaaccggacgcgccgtcggcaagatcgtgctggaggggttttaagatgatatcgcttatcgccgtgctcaaggcgaaaccgggccaaacggacgccctgcgtcaggccctgcaggcgctgctcctgccgacgagacaggagccgggcaacctcgactatgccctgtttcagctgcgcgacgcgccggacaccttctatatgcgcgaggcgtggcagggacaggacgccctcgatgcccatgtcgcgatgccctattttcaggcgtttatggcgcagatggagtctctgctggctgagccgctgcggctggactttctgacgccggttgagccttagcccaccggctgacgaggggtgggaaaatcacgcccctccgccgcgcgggtttaaaagtgggcgggaagcgggtgggttatcttttccagcaccccgcgatggaccgtaatgtaaccacctttgcgcagctctgccagaatcgacataacacggctgcgcgacaggttggtgcggcgctgtataaagcttaacgcattaatttggcgacgatactcctccgggtagtccgccagctctgttagcagggttcgcaccatcggataagaatccacccccaccatctcctgcgaacgcatgctcaacaccatcagccgctgcgccagaacatgggccatctcctgccacaggttttgcgcattgaggatctcgaccgcggcctggtgtcctatccagcgtccgcgcaaatctgtctcagcaaacagagagcagtggtgtttttccggaataccgttaaagacgccgtaaccatcgattaatcccaatagcgaaggggcaaatatcgttgatatcaccatgttgttttccgcatggcatagcgaggcaatcccctcttcgagcagaattaatccggattcagcctgggtcggcggaaaacgataataggtcgatcgcggcagcgcaaagggtgagctggcgggcaggaacgcagataacagggattccaccgcgaataacggctttgtctgtcttccgtaataaaaagacggtaacgcctggtcagtagagaggctggctgcagggatcgacatggtttttatgccatcaggtcaggttgaaaaagtgattcgttgagaatcatagtatcaacaggtgaattaacgaataaaagacaagacgttacgaggataaaaagagtgtaagcatcattatctgcaataactatttatctctattttacaggaataaaaaatacgatgagccttaattacctataaggcttagcggcgataaagataaggccaccttattatttactgcgctggctaacgccgcgcctgagggtttctctaccgctttccccctcgcatctcggccagtccaggctacgcttatcgatgccactgaccacccgcattcccctcccgttctattgagtccattcatcaagaagaggtttcgctatgctgatcaacgctattggtacctactccgccagccagccgctggaatcaatggccatcacccgccgcgacccggggccgcaggatgtacagatcgccatcgcttactgcggcgtctgccactccgatctccaccaggcgcgatcggaatgggcgggaacgctgtatccctgcgtgccggggcatgaaattgtgggtcgggtgaccgcggtcggcaacgccgtctcgcgctacgccgtcggcgatctggtgggcgtcggctgtatggtcgatagctgtcaacagtgcgaagagtgcgctgaggggctggaaaactactgcgaccacatggtgctgacctataacgggccgacccaggacgcgccgggacacacgcttggcggttattcacagcagatcgtggtcaatgaacgctacgtgctgcggataacccatcccgaagcgcagctggccgccgtcgcgccgctgctgtgcgctgggatcacgacatactcgccgctgcgccactggcacgtcgggccgggtaaaaaagtcggcgtggtcggcatcggcggcctggggcatatggggatcaagttggcccacgccatgggggcccacgtggtggcctttaccacctccgaatccaagcgtaatgcggccagagcgctgggcgccgatgacgtggtggtgtcgcgcaacgacgacgagatggcggcccacgtcaaaagcttcgacttcatcctcaacaccgtggcggcgccgcacaatctcgatgccttcaccacgctgctgaaacgcgatggcaccatgacgctggttggcgccccggccacgccgcatccgtcgccggaagtgttcaatctgatcttccgccgccggtcaattgccggctcgatgatcggcggtattccggaaactcaggagatgctcgacttctgcgccgaacacggcatcgtcgccgatatcgagctgatccgcggcgatgagatcaacgaagcctgggaaagaatggtcaagggtgacgtgaaataccgcttcgtgatcgacagtgcgaccctcgccggctaagcgccgcgacgaaaggtacgccgccattccgtcgggctgacgccaaagcgcgctttaaactgctggcgccaggtgaccgctgaaagatagcccaccgcctccgccacctgctcgaccggcagatcgcccgcctcaagcagagtctggctgcggcgcagacgttcggcggtcagccagtcggtaatgctcatcccggttgcccgggcgaagtggcgggtcagggtacggcggctcatcgccaccacccgggccagcgaatcgagactgtgcggctcggcaatatgctgctgcagataatccagcaggcagttgattcgcgcatcgcgggtgtttttcggcaccggctgggcgataaactgcgcctggccgccctcgcggtgcggcgaaacaatcatccgccgggcgatctggttggccgcgaggctgccgaaacgctggcggatgatgtagaggcaacagtccagcgccgccgcggtgcccgccgaagtaatgatccgctggtcgtcgacgtacagggcgttgatatccagctgcacctgcggaaaccggcgctggaaatcctgctcgaactcccagtgagtcgccgctcgcctgccgtccagcagcccggcgtagccgaggacgaacgcgccgaggcacaggccgacaatctccgcgccgttatcccgggcccgcaccaggctatcaagcagcgcctgcggcggacgtcgatcgacctcgccccagtaaggcaccaccacgatatccgcctgttccagcgcggcataatcgccggtggcgtacagcgcaaaaccatcgcgggcgcgcagcagccccggccgctcggcgcaaatgtgcagattaaagcgtttgatttccgaaaccgaatcgccaaacagcatgcaggggacggcgtagtgaaacgggctaaagccctctacagcgacaatcgccacgtcggtgagtttcatcgtcccttccccttacgcatgttaataaaccacggtttctccatcctgcgggatagaaaccacatcggcaatctgattatccagcgcatactggcgcatctcttcccgactcaccaggcagtggttgaccgcctcgaggtggatagccatgatttttgcttccggcagggtgaagtgcacgttcaggagatcttccttgcccatgataatcgggccaaagccgatgacgtgggcgtagccggcgttgaggaccaccacgtccgggcgcagcttcagcaggtcggctgcaatgtcatcgcgccagatagtatcccccaccagccacagcgtcttctcctgcggatggcgaaacaccacgccgcaggcctcgcccaggcgttcagccatcgccggcaccgcgtaggtgcggtcgctgccatgctgcccggcggtggttttcagcagacgcacgccggcaaattcgctgtctgccgacagcaggcgcagatcctgaaatccctggctgcgcagcagcgcggcgtcggcctcatgctggacgaacaccggcagggttttcgggatcgcggcgatcgctgccgcgtcccagtgatcgtcatgggtatgggtgacgatcaccgcatcaacgtcgataattttatcgcgggaaaacggcagctcaaccagcggattacgcagttcgctgcgcgcggtgcccggaaaacccggccaggcgcctttgtccgccagcatcggatcgatgagaaatcttttcccggcgtagtgaataatctgggtcgcattacggatgtgggtgatgttcatgttggcgttcctctggggtcatctgacgaacatcgtactgagtccccgcctggctcaacaggggcgtttgggcaatgatcgatgaaatcgggccaacctgcggcggttgccatccgcctccggctatgttgttcttaaggctcaatttttgacaggagtggcaggatgaaaaagaaactgaccgccgccgatatgcacgacccgcaggtcatcgccgagacgccgtggttcagcatgcgtaaggtgggtattgatgtcgcccccggcgagcgccgcgacttttattccattcattacccgcgcccggcggtggggattgtggccatccaggatgagaaagtgctgctgattcgccactaccgctacctgatcgataaggtggtgtgggcgatcccttctggcggcgtcgatgaaggggaagacccggcggtcgccgcactgcgcgagctgcgggaagagaccggctggcaggcgcaacgcgttgaggagatcattcgctttaacccctcctacggcagcagcgatcagctgtttatcacctggctggccaccggtttacgctgggtggggatggatgcagagcaggatgaggtgatggagaccggctggtttaccttcgacgagataaaccagctgatcgcccacggcgagatgccggacgggctgtcgctggtgccgctgctgcagctgatggcgcagcggcgaagcggctcgcttacggcttaagcatccgccagcggaaccacagctgggccacgaggatcagcacgccgccgataatcttctgcagcggcagctgttcgccgtaccacagcgcggcggcaatgaccgtcagcagcggttcgagcaccatgatgatcgccgcgctggccaccgccgcgtacttctgccccttcatctgcagaccgaagcgcaggctggtagcgatgacaatgctggccaccaaccagccgagagtcggcagggtcatcggctggtcccagcgttcaacggcagcggagatggtcaacccgacgataccggtgatcgccagctgcacggtggtcagggggatcagcggtacttcacgcgcgcagcggctggtgtaacagaaccagatcgactgcaccagcgccgtcagcaaaaaccagccctgactggggtggaaggctatcggcatatgcagactgagcagccccaggcctaccaccgcgatcggcaggcactcccaccaggcgcgaggcgggcgcactttcatcatcacccatgcggtcagcgggacgaacatcatcgacaggctcatgataaacgccccttcgccgagcgacgccgtcgtggagaccgaatagatccacaggcagaggttgagcgcaaaccagagtccgctgatgatgagttttggccagtgctgcttttgcgggcgaaaaccgcggcagaacggcagcagaagcagcgcggcgaagaaaaaacgcagcccaagaaacgcgaacaccggcatgccggcgatcgcctcgcgggaaaatatccagccgcaggcggcaatcaccgtcgcggcaatcagcagcaggtcagcctgccgttggcgtaccatacgcgcctctccctgtgtgttggcttaccagccaggcaccgcgccgccgttgaagatagtctctgccgccttcgccacctccggcgactggtacgactgcataaactccttcacgttttccgcgtctttattgtcttctcgggtcacgatgatgttcacgtagggcgagtttttatcttcgataaagatgccgtcacgaaccggcgacagcccggtttgctgcaggtaggtggtgctgatgatagccacgtcgactttgggatcgtcgagtacgcgcggcagttgcgccccttccagctccatgatcttcaggttatgcgggttgtcggtgatatccaccgccgtcggcagcaggccggtcccggctttgagggtaatcagcttctctttttgcagcagcagtagcgcccgcccgaggttggtcgggtcgttgggaatagcgatcgtcgcgccgtctttcagttcggcgactgacttgatcttgcgcgaatagccggccatcgggaagacgaaggtattcccgaccgccaccagatgatagttatgcgctttgttgtcctgctcaaggaaaggccgatgctggaagacgttggcgtccagatccccggcgttggtcgactcgttgggcagcagcgagccgctgaaccccaccagctcgacctccagaccgtacttctctttggccaccttcttcgccacttccgctacatcctgctcggcgccgttaatcacaccgaccttaatgtgcttcgcttcattacccttttggtcgcagccgaccagcgccagacccgccagcattaccgcggcggcggcccgtaaacgtaatctcatcctcttcaccctgtctgtcctgaatgtcattgtttttttcgtacaaaactatagcgactttcgggtcgggtaataaacagcaaaccacgcaactggaaataaaatcatcttcgcgaaacgcgaggcgctagccccggcgccactcgcccggcgtcacgccatagcgcattttgaagcgcttcgagaaggacgccagcgactgaaagccgcagcgttcggcaatgacctcgaggttggtctgacgctccaggcgcagcagccgggcggccagcgccattcgcagctgcgacagccacgcctgcggcgtcaggtgataaacgcgggcaaaatgacgggcgaaggtggcccgcgacagaaaggcacgggcggccatactctccagcgtccacggttgctccggggtcgccatcaccgccagcaccgccggcatcaggcgttcatcgctcatcaggcgcagcagcccgccgggcggctgttgctcgccaagcagcatgcgcagcaggagcaccagcagcgtatcgccgaggctgcgcacgatagcgctgccgccgggacgctgcgccaggctctcgcgcaccagtatattaagcagcgcgtccagctccgggcagtcttcacgcgcatcggtatggagatggatcagcgtcgatgcttcactgaacagccagctgacgtgcggaccaaaatagaattcgccgcacagcatctccagcgccccctccgccgggccggcgcgcatttccgtcaccgtgccgttaaaccggtgcgccaccggcagcacctggccccactccaccaggctctccatcaggtgcggcgaaccgtggggcaggaggacgacatctcccgcgcgcaggtgatgggtctggccgccgacgttgagccgcccctcgccgcgcagcaccacgtgccagggcaccacgccgctgcgcatttgctggtgcccggcctgccagcggccgccgaagcgacagtgcaggttcacttcgcagcgcggcgccagcagcgccagcagatgactgagactgtccatgcttctcctgagacgataagacaaaaaggtgagacgaagaccgccagtctagcatgcggcaagcgcctaagatgaccccattgccaacacaccctcgataacaacaggagttaaccatgagccgtttagcagatatccgtgaacaagacgccaccggcaaagccgccgatattttcgccgggatcaaaaaagcgatgggcaaagtgccgaacgcctacctgaccatcggcggccactcgccggcggcgctgcagcaggcgctggcgcacaatgcgatgctccataaaggcagcctcagcgcccaacagctggaagcgattaacctgtcggtcagcgaagccaccggctgtgactactgtctggccgcgcataccctgatggcgaaaaaagccggcttcagcagcgaacaaatccatgccctgcgccgcggggagtatgcggaagaggcgcagcttgatgcgctggtgaaattcgcgcagaccctggtgaccaccaccggtacgctgccggaagccgacgtcgccgcgctgcgcaacgccggttttagcgaccagcaggtgattgagattatcagcgccatcagcgccatcctgttcaccaacatggtgaaccgggttaacgacacggtggtcgacttcccgaaagccgattaatccgtcgcgcagcgccggttttacagccccagatcgctgagccccggatgatcgtccgggcggcgcccctggggccagtggaacaggcgctcgctttcggcgatcggcagatcgttgatgcaggcgtagcgcgtctgcatcaatccgtgcttatcaaactcccagttctcattgccatacgagcgaaaccagttgccgctgtcgtcgcaccactcgtaggcgaagcgcacggcaatgcgattctcctgccatgcccacagctccttaatcagccggtattgctgctccttgcgccattttcgctgcaggaactcaacaatttgcccccgaccgtggacaaattcgctgcggttgcgccattcgctatccacggtgtaggccagggcgactttttccgcatcgcggctgttccagccatcttccgcggcgcggaccttctggatagcgctgtcgcgggtaaacggcggtaacgggggacgttgttcggtcatgcttactctcctctacgggctaattgctgctgcaggcgctgattctcctgctccaggtcatgaatacgttgctgcaggttctggctgtactccgccacctgctgcgcgctgtagcgcggcgtaatgtgctgcgggcagttccagtcaaacgcctgcaaatgaaaaagaaacagacgttcaatgcgggcgcgatagttggccggcgccacctgcgccagcagctgcgggtggtcctctgccgccaggacctcgacggcggcgtagattttcagcctggcacggcgcggataatccatcaaaaacaggcaggcccggtcgctgccgcgcagattgccggtagtaatgtactggcggttaccgccgaaatcggccatcgccagggtggtgtcatccagcagatgcagaaaccccggcgggccgccgcgatgctgaatgtagggccagccgctctgcgacaccgtcgccagataaaagctgtcgcgggtggcgatcatccccgcttcgctgtcgccgaagcggtcggcctggcggcgactgcgcggcgtttgccacagcgagtcgctgcccatttcatgctgcacatccatcacgtccggggtgatagcgatatcgagaaaggttgctgccatagcgcctcctgttgtctggcgccatcatggactgtactgtgaagaatgataatacgggtaaagtggcaatcatctttccgaaaaacgggagaataatggatcgattaagcgcgatggcgctgctggtgaaagtgaccgagctggggagcatgtcggcggcagcgcgggcgctgaatatgccgttgaccaccgtcagccgccatattggcgaactggagagcgcgctgggcgtacgcctgctggcgcgaaccacccgcaaactgacgctcaccgacgccggggtcgattatgttgccgccgcccggcggatccttgaggaggtggaaaacgccgaacgccaggcgacgggcgaatatcaggagccaaagggtgagctggtgatctccgcgccgacgatgtttggacgccagcacgttcttccggtaatcagtgaatttatcgcccgctacccgctaattcgcgtccgtttgctgctcagcgatcgcaatgccgacctggtgagcgaccatgtcgatctggcggtgcggattggcgacctggcggacagcagcatggtggccacccgcctcggcaccatgcggattgtggcctgcgcccatccggcgctgctggcgaaatacggcgagccgcagcggccgcgcgatctggcggcgctgccgatcatccgcattgaatcgccgatgccctatcgcggctggcgctttcgcgccgctgagcgcgaggaccagctgattaacctgccgccggtgctatccgtcaccacgccggagagcgccgccgatgccgcgcggctgggggtgggggtggcccgcttactgcattatcaggcgctggatggcctgcgccacggggagctccgtctgctgctggaaaacgtcgagccggatccggcgccggtccatttgctgtataccgctcgggatctggcgccgcttaagctgcgcaaatttatcgattttgccgcaccggcgctgcgtcaggcactgttgcgcatcgccggggccgcttaatgcgtcgcggtcttcagcggcgcctcctttaacagccatgagaggacaaacgccaccgccataatgccggccgccatcagaaacgccgcgtggatcgccgcgccgaaggcgtcgaggtagtcgaggcggatatccgcgggcaggtgctggaccgccaccggattcattcccggcggcagcaccgcgccttccggcagcagttgttgcagtttgctctgcagcacatgcgtgaacaccgcgccaaacagcgccacgccgatggagccgccaatcgagcggaacagggtcacgccggaggtggcgacgccgtacatctgcgccggcatcgcattctgcaccgccaggaccagcacctgcatcaccagccccagacccgctcccagcacgccggtaaacaggtacagctgccacagcggcgagtgaatggtgatgcgggtcagcagtaccatgccggtcacgccgagcagggtgccgaggatcggaaacaggcgatatttaccggtacggctgataatccgcccgctgataatcgaggtcagcagcaggccgcccatcagcgggattaactgtaacccggcctcggtgggcgtcgcctccttcaccacctgcagatagagcggcaggaaggtgactgacccgaacagcgacatgccgatgacgaagccgatcaggctgcacagcaggaagctgcggttgcggaacagcgccagcggaataatcggctcggcggccatccgttcttcgtaaataaagccgatgatccccacgatgccgaaggccagaatgcaccacagctgcgggtcattccacgcatggacgctgcccccttccgaggtaaacaggatgatgcacagcagcgccatgctgagataaatcgcccccagccagtcaatctgatgctggctgcgtttattgctgctgtggaataccgcgccgatcaccagcagcgcgaacaggccgagcggcaggttgatatagaagatccagcgccaggaggcgtgctgcaccagaaaaccgccgatcagcgggccgatcaccgtcgccaggccgaaaacgccgccgaacagcccctgatagcggccgcggttggcgggcgggatgacgtcggcgaccgccgccatgctgatcaccatcaggccgccgccgccgagcccctgcaggccgcgcatcagcaccagttgggtcatattctgcgccagcccgcagagcgcggagccgacgagaaacagcccaatcgccacctgcagcacgattttgcggccgaacagatcgccaaatttaccgtacagcggcaccgcgatggtggagctgaggatataggcggtgaccacccaggaaagcttgtccagcccgcccagttcgccgacaatcgtcggcagcgcggtggagacaatggtctgatccagcgctgaaagcagcatcaccagcagcaatgcgctgaacaggaggcgtatcgactgcaccggtgggttagcgacttgagaagtcattacaacgctcgcttgaaattaattaaatgcataattaatatttagtgaaagaatgagtcgggtcaagagatcgccatatcatgacagcacaaaaggatcaggatgctccccgccgcccgggtcggccgcgcggtaaaaaaccgggtaccgccaaccgcgaacagttgatggacatcgccctgacgctgtttgcccgcgacggggcgggccgcgtatcgttgaacgccatcgccaaagaggccggggtgacgccggcgatgctgcattactacttcagctcgcgggatgcgctggtgactcagctgattgaggagcgctttatgccgctgcgcaatcacatcagccgcatctttgtcgatcatccacaggacccggtactggcgctgacgatgatggtcgagacgctggcgcatatggcggagaaaaacgcctggttcgcgccgctgtggatgcaggagatcatcggcgaaatgccgattctgcgccagcatatggatgcccgcttcggcgaggagcgttttcaggtgatgctggggacggtgcgtcgctggcagcaggaaggcaagatcaatccggcgctggcgccggagctgctgtttaccacggtaattagcctggtgctggtgccattttcacgcatccacagcgatccgcgtttacaggcggtcaaccgtcagaccatcgtcagccacgcgctggcgttaatgggccacggcgttggaggttaaggcgtggttttgacgcttttgtagtccggataagacaccacgcgccgccatccgggattttccctgctcgcgctacgcttagcagggctacaacttctatgttaattcccggcagattgcgctcccggttgatcttctgcgttatgtctcttatgccgcagggagcgcacagcacgaaccgtaggccgggtaaggcgacagccgccacccggcaagaatacaggtgccgtgcctgatatcctgcccggcggcgttgcgcttgccggtcctgggtggggcgaaactacgggaggactgtgtaggccggataaggcatttatgccgccatccggcacaaccacaggtacggtacctgaccgcccggggataccaggatcgttacagcgccttcgacaaatagtggcgctgcatgcctgcgtgcgggaagtcgggcagcgacatctgcagctgatagcctaatttctgataaaacggcagcgcctggaagctaaaggtatccaccagcagatggctgcagccttgcgcctgcgcctgctgttccgcctcctgcatcagctcgctccccagcccgcgcccgcgcgtcgtctcgctaacccacagatactcaatgcacagccagttgcccttgcgtttggcaatcagcccgccctgcattaccccttgcgcatcgcgcgagtaaatccccagatcgccaaactgcgccgcatcgagatactgctgattatactgccgtagaccggcaaacaattcttgttgatcgtcgggattaatgctttttgtaatgattagtgtcattaactatctccagtatcgcgctgccgaatggttattttccctctccactttcacaaaatattcttattttctccatgattatttgccttaattttttgcgttctaaaagtaagcaaaaaaacctttccattatcgcgacggatcgtataatggggaaaaatgagaatgatcattctcactacaaaaccagaggagatgcgcttttcacctcctgaagaccgaagaggttggcttcagcgaagacacaataacaatcacgttcaggaacatctgtgttccttttttgtcattttcgctcacccgaaaatgcctcagcgcccaacctattccctcgtttttaaataaacggggcggacgtcttatatcttgagaaaatataatgaaatacatcatagctcccatcgcgacagcattatttctccttagcggatgcgataatgcgcagacatctgctccgcagcaacccacgccggaagtgggcgtggtcaccctgcaaagccagccggtgccggtagtcagccagctcaccggccgcaccaccgcctcgctcagcgccgaagttcgcccgcaggtgggcggcatcattcagaaacgcctgtttaccgaaggcgatatggtgaaggccgggcaggccctttaccagatcgatccctccagctatcgcgcgacctggaacgaagcggcggcggcgctgaaacaggcccaggcgctggtggtctccgattgccagaaggcccagcgctacgcgtcgctggtcagggataacggcgtttcccgccaggatgccgacgacgccgcctccacctgcgcccaggacaaggccagtgtggaatcgaagaaagcggcgctggagagcgcgcgcatcaacctgaactggaccaccgtcaccgcgccgattgccgggcgcatcggcatctcgtcggttacgccgggggcgctggtctccgccgatcaggataccgcgctggcgacgatccgcgggctcgacaccatgtatgttgatctgacgcgatccagcgtcgatctcctgcgtttacgcaagcaaagcctggccagcaacagcgacaccctcagcgtgacgttaaccctggaagatggcagtacctatcccgaaaaagggcgtctggcgctcaccgaagtcgccgtcgatgaatctaccggctcggtgaccctgcgcgctatcttccccaacccgcagcacgtcctgctgccggggatgttcgtccgcgcgcgcatcgatgaaggcatcatgaacgacgcgatcctcgccccgcagcaggggatcacccgcgatgccaaaggcgacgccacggcgctggtggtcgatgccgccaacaaagttgagcagcgtaccgtggaaaccggcgacacctacggcgataaatggctggtgctgagcggcctgaaagcgggcgacaaactgattgtcgaaggcaccggtaaagtggccccaggacagacagtgaaggccgtcgccgtcaacaataacggaggcaacgcctgatgttctcccgtttcttcgtgcgtcgcccggtctttgcctgggtgatcgccattctgattatgctcgccggggtgctggcgatccgcacgctgccggtaggccagtacccggacgtcgccccgccggcggtgaaaatctccgccacctataccggggcgtccgccgaaaccctggagaacagcgtcacccaggtgatcgagcagcagctcaccggcctcgaccatcggctctacttcagctccaccagcagctccgacggctcggtcagcatcaccgtcacctttgagcaggggaccgacccggacaccgcccaggtgcaggtacaaaacaaagtgcagcaggcggaatcgcggctgccgagcgaagtccagcagtccggcgtaacggtggaaaaatcgcagagcagctttctgctgatccttgcggtgtatgacaaaaccaaccgcgccaccagctccgatatctccgactggctggtcagcaatatgcaggacccgctggcgcgcgtggagggcgtcggcagcctgcaggtattcggcgccgaatacgcgatgcgcgtctggatggacccgaccaaactcgcctcctactcgctgatgccttccgacgtccagtcggcgattgaggcgcagaacgtgcaggtttccgccggtaaaatcggcgcgctaccgtcgtccaatgcccagcaattaaccgccaccgtgcgcgcgcagtcccggctgcaaacccctgaccagttcaaagcgatcatcgtgaaaagccagggcgacggctcggtagtgcgcctgagcgatgtcgcgcgggtggagatgggtagcgaggattacaccgccaccgccaatctgaacggccacccggccgccgggatcgcggtgatgatggcccccggcgccaacgcgctggacaccgcgacgctggtgaaaagcaaaatcgccgaattccagcgtcagatgccgcagggttacgatattgcctatccgaaggacagcaccgagttcatcaaaatctcggtcgaggacgtgattcagaccctgttcgaagcgattatcctcgtcgtctgcgtgatgtatctgttcctgcagaacttccgcgcgacgctcattccggcggtggcggtgccggtggtgctgcttggcaccttcggcgtgctggccctgttcggctactcgattaacaccctgacgctgttcgccatggtgctggcgatcggcctgctggtggatgacgccatcgtggtggtggagaacgtcgagcgcattatgcgcgacgaagggctccccgctcgcgaagccaccgaaaaatcgatgggcgaaatctccggcgcgctggtggcgattgccctggtgctgtcggcggtgttcctgccgatggccttcttcggcggttcgaccggggtcatctatcgccagttctcggtaaccattatctcggcgatgatgctgtcggtggtggtagcgctgaccctccccccggcgctgtgcggcgcgctgctcagccactccaaaccgcacaccaaagggtttttcggcgcctttaaccgcctgtgggggcgcacggaggcaggctaccagcgccgggtgctcggcggcctgcgccggggcgcagtgatgatgggcgcttacgcgctgatttgcggggcgatggcgctggcgatgtggaagctgccgggcagcttcctgccggtggaggaccagggggagatcatggtccagtacaccctgcccgccggggcgacggcggtgcgtaccgccgaggtgcgccgccaggtcaccgactggttcctcaccaaagagaaagccaataccgatgtcattttcaccgtcgacggcttcagctttagcggcagcgggcagaacgccgggatggccttcgtgtcgctgaaaaactgggcgcagcgcaaaggggacgacaacaccgcccaggccattgccctgcgcgccaccaaagagctggggacgatccgcgacgccaccctcttcgccatgaccccgccgtcggtggacggcctcggacagagcaacggcttcaccttcgagctgatggccagcggcggtaccgaccgcgacagcctgatgaagctgcgcagccagctgctggcggcggccaaccagagcagcgagctgcagtcggtgcgcgctaacgatctgccgcagatgccgcagctgcaggtggatatcgataacaacaaagccgtctcgctggggctgtcgctgagcgacgtgaccgatacgctctccagcgcctggggcggtacctacgtgaatgactttatcgatcgcggccgggtgaaaaaggtctatatccagggcgaaagcgacgcgcgcgcggtgccgtcggaccttggcaaatggttcgttcgcggcagcgataacagcatgacgccgttctccgccttcgccaccacccactggcaatacggcccggaaagcctggtgcgctacaacggctccgccgcctttgagatccagggcgaaaacgccgccggcttcagctccggcgcggcgatgaacaagatggaaaagctggccgacagcctgccggcgggctccacctgggcgtggagcggcatttcgctgcaggaaaagctggccagcggccaggcgatgagcctgtacgccatctcgattctggtggtgttcctgtgcctggcggcgctgtatgagagctggtcggtgccgttctcggtgatcatggtcatcccgctcggcctgcttggcgcggcgctggcggcgacgctgcgcggcttaagcaacgacgtctacttccaggtggcgctgctgaccaccatcggcctgtcgtcgaaaaacgccatcctgatcgtggagttcgctgaatccgccgtggatgaggggtattcgctctcccgggcggcgatccgcgccgcgcagactcgcctgcgcccgattgtcatgacctcgctggcgtttatcgccggggtgctgccgctggccatcgccaccggcgccggagccaacagccgcgtggcgatcggcaccgggattatcggcggcaccctgacggccaccctgctggcggtgttcttcgtaccgctgttcttcgtgctggtgaagcgtctcttcacccgccaacgtccttctcaggagtaaggtatgtttcgtttaagttttatgtttatcgcgctcctgaccgcgggctgcgtctcgcttgacccgcattatgatcgcccggccgcgccggtgccggccaccctgcccggggcgcacggcgaatcgacggcggtggtcggcgactggcagaaagtggtcaatgatgcgcggttaaaaaaagtggtcagcatcgcgctgaacagcaaccgcgatgtgcaaaaggcattggccgatattgaagccgctcgcgcccagtatggcgaaacgcgggcatcgctgtttcccaccgttgatgccgaactgagccacacccgcagcaaaacggtggccagtggcctgagctccgcttcacaggccgacggcgcggtctccagcttcgaactggacttgttcggcaagaaccagagcctgtcgcgcgcggcgcgcgaaacctggcttgccagcgaattcaccgcgcagaatacccggctgacgatgattgccgatttgaccaccgcctgggtgacgctggcgacggataacagcaatctggcgctggcgcagcagaccatggacagcgcggcaaactcgcgcaacatcgtcgcccgccagatggcggttggcaccgcctccgcgggtgatttaagctcggcggaaagcgtctatcagcaggcgcgcgccagcgtcgccagctatcgcacgctggtggcgcaggataaaaacgccattaacctgctggcgggggaaaccgtgccggagagcctgctgcccggcactctcgagagtctcggggataacagcatcgcgctggtgccggcgggcgtgtcgtcgtcggtgctgctgcgtcggccggacattcaggaagcggagcacaatctgaagagcgccaatgccgatatcggcgcggcgcgggcgaacttcttcccgtcgatttccctgaccgccagcgccggggtcggcagcgactcgctgtcgtcgctattcagccacgggatgcaggtgtggtcgttcgccccctccatcagcctgccgctgttcaccggcggcagcaacctggcgcagctgcgctatgcggaagcggagaaaaaggggctgatcgccacctacgagaaatcgattcagagcgcgtttaaggacgttgccgatgcgctggcgcgccgggaaacgctgagcgaagagcttgatgctcagcggcagtatgtcgccgccgagcagacatcgctggatatcgccatgaagagctatcaggccggggtcggcgattatctgtcggtgctcaccgctcagcgcacgctgtggtcggcgaaaacgacgctgctgtccctgcagcagaccgacctcaataaccggatcaccctctggcagtcgctgggcggcggcgccagttaaacttacccgccgggcgaccgagcccggcctctacaaggaatcgttatggcacgtgtttccctctcctgggcgctgatcctcggcctgctgtcgggtatcggcccgctgtgcacggatttttatctaccggcgctgccggagatcactcagcagctgcaggccaccagcactcagacccagctgtcgctgaccgccgcgctgattggtctcggcctgggtcagctgtttttcggcccgctgagcgaccgcattggccgcctgaaaccgctggcgctgtctctgctgctgtttatcttctcttcggcaatgtgcgccctgacccgcgatatcaacatgctgattgtctggcgctttttacaaggcttcgccggcgccggcggctcggtgctgtcgcgatccatcgcccgcgataaataccagggcaccctgctgacccagtttttcgccctgctgatgaccgtgaacggcattgcgccggtgctgtccccggtgctgggcggctacgttatcaccgccttcgactggcgaattctcttctggacgatggccgccattggcggcgtgctgctggtgatgagcctggcgatcctgcgggaaacgcgcccggccacagcggcgcatgccagccgccaacggcccggccagccggtgctgaaaaatcgccgctttctgcgcttctgcctgatccaggcctttatgatggccgggctgttctcctacatcggctcttcttccttcgtgctgcagagcgaatacggcatgagcgccatgcagttcagtctgctgttcggtctgaacggtatcgggctgatcatcgccgcgatgatcttttcccgtctggcgcgccgctttagcgccgaaagcctgctgcgcggcggcctgacgctggccgtgagctgtgcggcgatcatgctgctgtttgcctggctgcatctgccggtgctggcgctggtcggcctgttctttaccgtgtcgctgatgagcggcatcagcaccgtcgccggcgcggaggcgatgagcgccgtcgacgccgcgcagtccgggaccgcgtccgcgctgatgggcaccctgatgtttgtcttcggcggcatcgccgcgccgctggcgggtctcggcggcgaaacaatgctgaaaatgagcctcgcaatggccatctgctacctgctggcgctgctgctgggcctcagcaaaccgcgcgacgcacgctaatctcctgctgcggtaataaaatattccagatttattaccgcactatttcccgccatatctaccattctcgtattattttccgcgtactaatcgtgatactcttcacaggaaaggaataaataattccttatactgcgcgccactgagaataacgaggtttctatgagtatcgacctgagcaaactgctgaccgagcgacgtaacgccaacagcgccaacattgacaccctctccaccctcgagatgctgacggtgataaaccaggaagaccagcaggtagcccaggcgataacgccctatctgccgcagattgccgaggtggtggataaggtcgcggcggcgctgcaggccggtggccgcttgatttacattggcgcgggtacctcagggcgtctggggatcctcgatgccagcgaatgcccgccaaccttcggcacccgcccggagcaggtggtggggatcatcgccggcggacataaagcgattctcagcgccgtggaaaacgtggaagacaacaaagcgcagggggcgatggatctgcagaacctgaacttcagcaaccgcgatgtgctggtgggactggcggccagcggacgcacgccgtacgtcattggcgccatggaatacgcccatagtcagaatgcctttgtcgccatcgtcagctgtaacccgcatggcgaaatggcccagctggcggacgtggcgatcaccccggtagtcggcccggaagtggtcactggctctacccgcctgaaagccggcaccgcgcagaagctggtgctgaacatgatctccaccggggcgatgatccgcgtcggcaaggtgtacagcaacctgatggtcgacgttgaagcgaccaacgccaagctgattgagcgccaggtctctatcgtgatggaggccaccgactgcgatcgcgccaccgcccagaaggcgctggaggcctgcggccgccactgtaaaacggcgatcgtgatggtgctggcggacttaagcgccgcagaggcgcagtcgctgctggcgaaaaacaacggctatatccgcaaggcgctcagcaacacctgagcgccgacagacaggtaacgggcaatggcaaaaataacgaaagagatgatagcgcggatcctcgcccacgtgggcggcgccgcaaacgtcgcgcaggcgggcaactgcatgacgcgcctgcgcttgaccctgcgcgatgaaagtctggccgacagcgccgccatccgccagattgacggcgtgatgggggtgatcgtcagcgacgagcagttccaggtggtgctcggccccggcaaggcgcaaaccgccgccgaaatgatgaacggcctgctggaggcggcgcccgccgccgcgccgacgctggccgacgtcgcggcggagaaaaagcaggcgctgaagggcaggcagaccagcgcggtgcagaagtttctcgccaaattcgccactatctttacgccgctgatccccggctttatcgccgtcgggctgctgctgggcttcgccaccctggcggaacaggttttcgtgctggagaacgcccatccgaacgccagcctggtggcgctgattggctatatgaaggtcttcagcaaagggatgttcacctttctgagtatcctgattggctataacgcgcagaaggcgttcggcggctccggcgtgaacggcgcgattatcgcctcgctgttcgtgctgggctacaacccggaggcaactagcggcttctacgccggcatttccaccttcttcggccatggcatcgatccgcgcggcaatatcatcggcgtactgatcgccgctatccttggcgcgtgggttgaacgccaggtgcggcgggtgatgccggccaacctcgatatgatcctcacttcggcggtgacgctgctgatcatgggcgcggtgacctttacggtgatcatgccgattggcggctggttgtttaccggcatgtcgtggctgttcctgcatcttaacggcaacccgtttggctcggcggtgctggccggcctgttcctgctggcggtgatgttcggcgtccatcaggggtttgtcccggtctattttgcgctggtggacgcccagggctttaactcgctgttcccgatcctggcgatggccggggccgggcaggtgggggcggcgctggcgctgttctggcgggcgaagcgcgattcgctgctgcgaacccagattaaaggggcgattattccgggcttcctcgggattggcgagccgctgatctacggcgtcaccctgccgcggatgaagccgtttgtcaccgcctgcctcggcggcgcctgcggcgggttcttcgtcggactgatcgcctggctggggctgccggtcggcctgaacacggtgttcggtccgtccggtctggtggcgctgccgctgatgacctccggcagcggaatttacgccgggatggcggtctacgccggcgggctggcggtctcctacctgtgcggttttgtcctcacctggctgttcggcagtaaaaatgtcgatttaagctagaacgcgactatcggttaatgcccggcggcggcttcgccttaccgggcctgcaaaatagttacgccgccgcgcccgactaccatttcctgccccgccgcccgggcgcgcgcatgctatgattcccctttgtcatatttcgcttgaggaaaagatgggctccagcaaaaaagggatgctgaacgtactgattgccgccgtgctgtggggcagttccggggtgtgtgcgcaatttattatgcaggaaagccagatgtcgtcgccgtttctgaccatgacgcgtctgctgttcgccgggctgatcctgctgatgctcggctttgttcacggcgaccgcattttccgcgtgctgcaaaaccgccgcgacgccctaagcctgctgtttttctcgctgtttggcgcgctaaccgtgcagttcacctttctgatgaccattgaaaaatccaatgccgccacggccacggtgctgcagtttctgtcgccgacgatcatcgtcgcctggttcgccctcgcccgcaaagcgcgtcccactccgctggtgctgggggctatctgcacctcgctggcgggcacctttctgctggtgacccacggcaacccaacgacgctgtcgatttcgccggcggcgctgttctgggggatcgcctcggcgtttgccgccgccttttataccacctatccttcaacgctgattgcccgctacgggacgctgcccatcgtcggctggagcatgctgttcggcggcgcgatgctattgccgttttacggcggccagggcaccgattttgtggttaacggcagcctgctgttagcttttttctacctggtggtgatcggtacttcgctgaccttcagcctctatctcaacggcgcgcagaagattggcggcgcaaaggccgggatcctcagctgcgccgaaccgctgagcagcgccctgctgtcgctcctgctgctggggatcaccttcacgctgccggactggctgggcactctgctgatcctcgcgtcggtggtgctgatcgccatcgactcgcggcggcgggtgagagccgcctgagcaggcgataaaaattgcattttcaataagttaaactgaccactatttgcgtgttttcccgcctgcgcatatagttgacggaagcgattacggaaggagaagcctgatgaaagcatgttggatggtatgcctggtcaccgccctgagcgccacgtcggcgtgggccgaatcaccgctgcaaagcctgcagttcgagcagcaaaaacagcaggtgctcaaagcggtgaaggaaaaatgcgcgccagcaagccacctcagcgacaacgattttgccaataaagtgctggcgaccgacggtaacaagaacgcggtccgcgaagcaacgctggcgaaggagcgcaataaccagaaaagctaccaggccgcaatcgacaaaatcgtctgtccggccaaatagcggttatttcagcctcgcgaccagcgttttccagtcaaacggcgtcagctgcctgtagctcaggctacgggcggccatctgctccggcagctggcgctggcttttcgcgatcgcctcgctcattatcccggcgctccccacgtcacgcagggttttcaccacctcttccatctcttcgctgcgccgaatgccatgttccgccacccggctgatcagatagtcggggaacgcgcctgtccagcccagagagggaaaactatgatgcaaggagctaagcacctcctcctcaacgccgtattcacgagccgcgaacaggcattctgtggtaagcgcttcaagacctttgatcatcacgctacggcacatttttatcgccgacacctggcccaccgtactggcgccatagcgggcattcagccccagcccccgcagacgcggcgcgatcgcctccgcctgcggcccgccgatcaataacggtgtctgcaatcgggccggcggtaccggcgccatcaccgcgacatcgatgtaggcgcccggcagaaaatgttcagccgcctgccgtttcgtctccggcgccacggagttgagatcgaggaaatattgtcccggctgcagcagcgcggccgcctgctgcgccacctttagcgcctcaccggcggtcacagtagaaaaaaccagcgtggccccctccagcgcctgcgccagcgaatttcccacctgaacgcgcgaatcacgggcttttttgcccatcgcctctcgctccgggccattgagcttgcaatcccaaatggtcaccgcatgctcacgggccagatccgccgccagaatgccacccgcctcgccaaaaccaataaacgcgattgtcatcatcactcctcacgcggccagacgcgggccggaataaaaacctcgccagcaaacagcagtcgcgccgtgcgtaacaggccgcagccagccagggcgccgtcagcatcaagctgaagcgtcacgctaaattcgcctgtcggatgctcgacgctgagcagcggcgtatcgcctggcgctacctgcgccaggccctgcgcgacagagccggggagcagacaagcgctggccacgctcaccgcgccaaatacgccgatcgacgcgtggcagcggtgggggataaaggtgcggctgctgatggcgccgccgtgtcgcggctcggcgatcagggtcatcttgggcaccgtgcgctggctgacgtcgccaagctgcatcagcggcccggcctgcaggcgaatcgactccaggcgacgtttaagcgcgtcgtcattatccagctgttcgcgcgtctcatagccggtgcaaccgaggtcgcacgcgcgcagcaggatcaccggcattccgttatcgatgcaggtcacctcgacgccgtcaaaacggtcacgaacccggccggtcggcagcagcgccccgcagctggagccggcgacatcaagaaaatggagcaggatcgggctggcgctgcccggcacgccatcgatacggctctcgccgacgtagttgaccccgtcggcgtcacaggggatctctgccaccgccagttgccccgtgttctccataaaaatacgcacccgagtgagcggcgcatcgtggcgaaccagaccgcgctcgatggcgaaagggccaacggcggcaagaatattgccgcagttttggccataatccacggtagccgccgccacgttcacctgggcaaatagatagtccacatcggcgtcaggtcgtgcggagcggcggataatcgccactttgctggtcagcggatcggcgccgccgatcccgtcaatttgccggggatcaggcgagcccatcaccgccagcagcaccgcatcacgtcgcaccggatcggcaggcagatcgtcggccagaaaacaggccgctttagaggtgccgccgcgcatccatagacaggggattccgcgttgcgccctttattcctccacctcgtctgcgcggtcgtaataccgcaggcccttttccgccagacgcggacgcatagcgtaaatatccagccccaactcgccattgcgcatccgctcacgtttcgcaagctcattgctcatgcgggcttccgctttatggagcacatcacggacccgggcgtgaggcagcaccacgacgccatcgtcgtcggccactacgacatcgcccggctgtacaagctgacctgcgcatatcaccgggacgttaaccgaaccgaggctctctttcaccgtcccctgggcataaacctgacgggaccagacggcgaatcccatttcccgcaacgtttgcgaatcacgaatgccgatatcgcccaccagcccgaccacgccgcgcgattggagagacgtcgccagtagatcgccgaagaagccatcgccgcacggcgaggtcggggccaccaccagaatatcgccggcgcggcactgctcgaccgccacatgaaacatccagttgtcgccaggcgtcaccagcacggttaccgcgttgcccgcccggctgacgccctgctgaatcggacggattgccggccccatcagcccctgacgatcccaggcttcatggagcgtcgccaccccggccgcctcacagcggcgcaaaaccgcctcgtcatggcgcggcaggtggcggatcacaaggccttttttatttaacaggttcatgccaggttctccgttacgcgggggaagatgctctggaaggcttcgccgtgaacgatatcgcgcgcggccgtgatgccgatattgcgcttggcctgcaccccgcgctgcagcgccacgcgggtgtagtattcccacagatgctcctgaccctgcatgcactgaatggcctgatactttttctcccagacagcggtgatgtccagcaacacatcgggtttccagttgcactgctccggctggtgcggttcgaaacagtaaaccgggggagcagcgacaattttctcaccggggcgatagccctctgcctgggcgataatccgcgcttcctgcgccagatgggaggccagggggtgatcgtagttatagggatcctgcagggagtgcgtcaggacaaagtggggctggatacggcgatacacatccgccagacgaaatagcgtctctttatcggcgcgcagcggatagtcgccgatatcaaagaattcgacgctggcgcccaggatcgcggcggcggcctgcgcctcttcgcgacgcacctgcttcaccgcctcctcggtcatgttgcctttacgccacagtttggcggactcgccgcgctcgccaaaggataaacagaccacatggacctgatagccctgcagggcatgcagcgctatcgcaccgcccgcgcgccagacgaaatcggccgagtgggcgctgacgacaagggcacttttttcgctaaccggatgagacatgatggcttcctctgttgtttttttcagcttgtcatgtcccgtcgtggggaggtaattcgttaacttgcgaaggctatgatttttatttatgttgtcgtctcactcactttttcaggcctgacgaacaatgctaaagagaaagcacgataaaattataaatatcatgcagctgcgctttttctgtcaggtcgcgctgcgcggtagcgtctcacgcgcggccgatgacttattccgcacgcagtcagcgataacccgggctattcgcgatcttgaagccgcgttgaacgtcacgctgttcgaacgccattacagcggcatggtgcccaccgagtatggcaagtgcatcctgccgcgcgcccggcgggcgattgacgacctgcaggccatcccggcgctgctgcagaagcaccatacccgcagcagcggcccgctggcggacgccggctggctgttcaatacccgccgcttagccatttttattcagctctatcacgtcaaccatacccaaaccgtcgcgcaacagttggggatcactcagccggcggtcagtgccgcgctgaaggtcctggaaaaaggagcggattcggcgctatttcgccggacgccagagggggtgcgtcccacgcctgccgcggagctactctatcccccggtgagcagagcgctcaacgagctggaaaacatctggagcgatctcgctgcccgtcgcggggtgctggagggcaccgtgcgcattggcgccctgccgctgagccggacccggctactgccctccgccatcgccgcctttctggcccagcacccgggcatcaccctcatgaccaatgaaagcccgtatgagtcgctggtcgccgatatgcgggcaggtaatatcgattttattatcggcgccctgcgccaggatgaagatctcccggacctctgtagcgaagcgttattcgaagaggatatgttgattttactgcgtaataaccacccgctgcttcgccatccggacccacgcagccagctggcgacagcgcaatgggtgctgccgcgcgccaacgcgccggcgcgcaatttgctggataaggcgtttgtcaccctggggctgccgctgccccagccgacggtggagaccggggatgcggcgatggtgcgaggattgctgcagggctccgacatgctggcggcggtctccgccagccagatgcgttttgaaactgacaatgggctgcttagcgtgttgccggttcccctgcccgataccacccggcgtatcgggctgacgtttcgcgccggcagcctgccctccccggcgacgcaggcgctgttgcgttttatttatcagcaggttcaggacggggccgtttaacgtttacccgccaccgaataggttacctgctggttgcgcgtttgctgaaacgcctccagcgtctgcccgcgcatcgcggcgtaaatatgcaggttggatacgccgaccaccgcgcccattttctccagcaggaagaagctggcgccatactgaattaatccccgccagtcgcgcgcgttgagcaactgctgttcctcctcactcagtccggcttcggcataaagcgactgaggcgactgcagaaaacgttcacgccaggcaggctcaatcagccgatgcaggaaacggttaagccgcaagccattcaggctgcgctcgtgggtaaaaggataggttcccggcagtttctccaccccggccagctgctgcgccatatgctggcgatggcgcgtcagggtatcgacggggggcaggcgcgcattgttctcaaggatcagcgtggcgataccggtcatcgagggcaggtaatagtcgcgccaggtttcggtgacattggctgatagcgcgccgcgcatcaccagccacatgattacttcggacccctccatcccccccagctcggcatattcgccaagggtcatttcggtaagcttttccgggtcattaaccagcatatcaacaaactgggcatcccagtcgggattattaaatccgcagcgctcgccatgaacctgatgcgagagcccgccggtcgcgacaatcgccacattgatatcttccgggaagctttcaatcgcccggcgcagcgcctggccgagtttgtaacaacggcgcgcgcttggtaccggaaattgcagcacgccgatctgtaacgggatcaccgccgtcggccacccctgcgcttcatcccagggcaacagcgccgaaagcggcgagaaaaggccgtggtcgagctttttatccataaagaacgacatatcaaactcgtcggccatcaggctggcgccaatgtgccttgagagcgccgcgttgccctggaccggcggcaggcagcgcggtccgcctccctcatcggcaacgtcatattgactatcgattcccagcgtaaaagtcgaatagtgatcgaagaaaaaggcggtcacatggtcattaaagatgtataccagcgcatccggttttttctcctccagccagcgctgcagcggttcgaagctctggaagatcggcgcccacgccggatcctgctgtttatgatgatcgaccgcgaagccgatagtcggggtatgagagacggcgataccgccgagaatgttagccatcagataactccacttatcggtgttcgaggggggatgacaaagcgtcaagttctgcctctgtgagtcgaggcttagcgtgattcatacggtgcaacaaaatacagatccccgccaggcaggccggcagcgcaagcaccaaaaagatcgacgagtgtcccggcacggccagcatcagcatcccgcccagcgtggagctgaggatagccccggtacggccgataccatgcatccagctgacgccggtagcgcggatctcggtttgataataggcgggcgaataggcctgcagaccgttctgcgcgccgttaatgcacatcccgctgataaaaatcagcaccgacagcgccgccgaaccgaaatccatcaccccctgggacaacaggcacagacagccgaggaaataggttgccgcaatcacggctttcgccgaagcgcgatccatcagcataccgacaaggatcccgcccagcgggccgccgagctggaacaagccggtcatcatcgccgcctgctgcagcgacagcccgccggagcggagaatggttggcagccagccgttcagcaggtaaatcacgaacagccccataaaataggttaaccacagcgctatcgtgccgcgggcatagccatgccggaacagctgcgccactttgctgctccgcgtgatgggcggcgcattcagctggaaaacggtttcagccgtaaactggcccccaagccggttaagcgccctggcaatctgctcgcccggtagtcggcgcgccaccatgttcatcgccgactccggcaacatcacgatcataaaggggagcaccacgagcggcagcacgccgccaaaaaccagcgccgagtgccagctgtaatgcgataacaaaccggcggcgataaagccgccgaggccggaacccacgttaaaaccgctgtacatcagggtgatcatcacccctttacgccgctccggcatatattccgccaccagcgtgacgcagttgggcattacggcgccaaggccaaggccggtgagaaaacgcatcagcgccagttgcgtcgggctttgcgccacggcgccggccaggctgaacagcgcaaacagcgccaccgaccagagtaaaattcgctttcggccgtagcggtcagaaagcggacccgctaccagggcgccaatggcgacgccgaacatggccgccccaagaatcggccccatttcggcccggctgatgccccagtcttcgatgagcgccggggcgacaaagcccatcaccgcggcgtcatacccatccagcataatgatgatgaaacagagcagcagcacgttccattgaaagcgcgagaccgggcgggtatctatccacgctttcacatcgacaacgttcgtgtgattcatagggtgacttcctcaagcaggcggtacgaatgttctggttagtgttttttgagtggaactttcgtactcaacttaaggcaggtcacgcaggctgtccggttcgaaaatccggcgtcagatatgagttttatttataatgtgagggatacgacaaaaaccagccagcaaaaaacccgcagccaacggcggcgggtcagggcaagagcagcgtttagtgcttcggaataattaaatcgccgcgcagcgggctgccgcccgggttgtccgttttctcggtcagccagttgacgatccgcgacgccatcgcgtccatggaatattcaatcgccgggatagtcgggataccgggcagctgtaacgatccggcgaggctaaacaccatgacattttgcggaacggcgcggttaaacgcctgtagctgcggcaccacgcgctgcgcctgctgttcatcgctcaccagcagcgcgttaaagttcagcgtcgtggcgttattgaccagctcctgcaccgccaccgacggcgaggtgttatccagaaacaccaggttgcgattaaacggcaaaaagtttttttccagcgcgtgcttgtagcccagcagcacctggtcggcaaagccgctgctctgcggatgaatcagcgcaatctgccgtctcccctggctaatcagatagtgacaggcggtttcggcggcgaaagcatgatcgaactgaatactgttgtcgccttcgctatcgaggcagtccaccagcaccacgtccgggcggttaatattcagaggaaaacgcgcgccgatgattagcacgttatcgcacagcccgcaggtcaactcctccagagagttcatcacgccgtggctggtgttggcgaagcgcagcagcaggtgtttctggtgctggctgagctgtttttccagggcgtagagatagctggtggtttggttgatgttgtcctgggcgcagatgacgccgatgcagccggtggactggctgagcaacgactgggctatcatgtttggccggtaattgagcgcttccgccgcctgcagcaccgcctgacgactggcttccttcacgccacgtgagccgctcaacactcgcgacaccgtggctttggaaaccccggcaagtcgtgaaacatcattgattgtcgacatcattttcccctgcgcgggcgccgcgtcccgccaaaatcctgtaaacctgaatcgcttcaattatgaccagcgcagtatatccatttcgccatttgtttggaaaccgattttccatttcagcgcaaaacatcgccaaatcgacagaataatgtgagcgaaatccaataaatccgccctataagcaggagatcttgaccactatcacagttctgctttttataaatggaaaccggtttccgtctgatatcaaatcacccacgcaataactttttacattttgaggatggtcgtcgatgtacaagattatgctgtgctgctctgccgggatgtccaccagtctgctggtcagaaagatggttgaggcggcgaatgaacgtgacctgccggtgcagattgacgcctatggcgtttccgaatttgacatgcagtttccgcagtatcaggtggtgttgcttggcccccaggtgaaatacatgttgaaaaccctgtctgacaaagcggcttccctgaacattcccgttcagcccatcgatacgatggactacggtatgcagcggggagacaacgtcctgaattatgctctgtcgctgatcccagcggcgcactgagaggtgttgaaatgagttctctgtatcagtccatgattgccgtgatcgagcaatctattactccgctggcaggacgccttgggcagcagaaatacgttatcgctatccgcgatggcttcactgccgccttgccgtttatgatcatcggctctttcatgctggtatttatctttccgccgttttcacccgataccaccaacggctttgcccgcggctggcttgatttctcccagcactaccgcgaacagctgatgctgccgtttaacctcagcatgggcgtgatgaccttctttatctcggtcggcattggcgccagcctcggtcgtcagtttcagctcgatccggtgatgtccggtctgctggcgtttatggctttcctgctggtcgccgcaccctatgccgatggcaaaatttccactcagtatctgtccggtcagggcattttcaccgcgctgatcaccgccatctactccacccgcgtttacgcgtggctgaagcaaaacaacattacgattcgtctgccgaaagaggtccccaccggcgtcgcccgttcgtttgaaatcttgatcccggtgctggtggttattgcgactctgcatccgctgaatctgtttatcgaagcgcagaccgggatgatcctgccgcaggcgatcatgcatctgctggagccgctggtttccgcctccgactcgctgccggcgattttgctctctgttctgatgtgccagattttctggttcgccggtatccacggctcgctgattgttaccggcattatgaacccgttctggatggccaacctgtcggcaaaccaggcggcgctggcggctggcacggtactgccgcacgtctacctgcagggcttctgggatcactatctgctgattggcggcgtcggttctaccctgccgctggccttcctgctgctgcgtagccgggccacccatctgcgcaccatcggcaagatgggcatcgtgccgagcttctttaatatcaacgagccgattctgttcggggcgccgatcatcatgaacccgatgatgtttatccccttcgtctgtgtaccgatggtcaacgcggtgctggcttacggcgcgacgcgtcttggctggctgagccaggtggtgtcgctgacgccgtggactacgccggccccaattggcgcgtcgtgggcggctaactggaccctgagcccggtggtgatgtgtctcatctgcatggtgatgtcggcggtcatttatctgccgttcctgcgcgcttatgaacgttccttaatgaaaaccgaagttgagaaagccaaaaatagcgttccggtagcagaaaccgttagctaatccctctccttccggagagataataagatgatagcgtaataatgcagaaaatggactttcactgcattattaaataataaatacctcaggaatacacatgattgaattagaagatgcggtaatggaaattatcgttaatgcgggacagtcacgctcattatgttttgaagcgctgcatgcggcccgaatcggaaatatcgacgaagcgcgcttactcttaaacgaggccgacggctacgcccgccgggcgcatcagatgcaaacccagctcatcgggcaggatgccggtgaagcgcgtcagcccatgacgctgattatggtacatgcccaggatcatttgatgaattcgctgctggcccgcgagttctcagaagaattaatccatctgtaccagcgttaattaatatggaataacgttagcgagaatattattctccggcgtcgctgtaccctaaaaaacaaatcagcttattttggctatttattctagccagaatgggatggttattatctgaaatatattaattattaaagcgagataaccatgaatactgtaaaaaaactgcctttagccatggcggtggtcgccgcgctgtgcccaatttctgtcatggcgcaagaatttacgcaggaacagatcgacgccatcgtcgccaaagccgttgataaagcgctggccgaccgccaggcaaaaatcgacgccgcggccaacaaaaaggtcgacgtgattactaacccggaaaccaccgccgcctcgccggatatggccattccgttcggcctcaagttcagcggctacgcccgctatggcgcccacttccagaccggcgaccagaaatatgtcggcgtcgacggctcctataacggcgcctcggcgatcggccgtctgggcaacgaaagcaacg

SEQ ID NO: 128 - DNA, 295122 bp, Unknown
  source: /note="Description of Unknown: MKP2_2161_1 Mutant Bacteria sequence"
cagcccaggccggattgttcgggttatggttcaggaaatcacgccacagcacttcggcaatgtcagccatacccatcggggcccccgggtggccggatttggctttctgtacagcgtccatgctcagcgcacgaatagcgttagcaagctctttacgtgaggacattttgactccagttcggactgttgaaggccatgcccttaacgacttgacgagagcgcgttttgggctacgccggaaaaaagtgtgaacaatgtaacccaagcgacaagtcatgtacatggagcatccttttgccctttaagaaatctctggaacaggttgtgctacgccggaatccgctcgcccgcatcctgcgatactctttataatttacgcagaatacggttccctgccgtcgccgtattttcggataaacaaccataagattgtggaagataaaaatgaaaattcgctcaaccgtacttgctcttgggatcgcagcaaccctcaccggatgtcagaacatggactccaacggtctgctcagctcaggcgccgaagccttccaggcatactctctcagcgacgcgcaggtgaaaaccttaagcgaccaggcctgtaaagagatggacgccaaagcgaaaatcgccccggccaacagtgaatacagccagcggctgaacaaaatcgcggctgcgctgggcgataacatcaatggtcagcccgtgaactacaaggtctatgagaccaaggatgtcaacgccttcgccatggccaacggctgcatccgcgtctacagcgggctgatggatctgatgaacgataatgaagtcgaggcggtgatcggccacgaaatgggccacgtcgcgctgggccacgtgaagaaaggcatgcaggtcgccctgggtaccaacgccgtgcgtgcggcggcggcctccgcgggcggtatcgtcggtagcctgtcgcagtctcagttgggcgatctgggcgaaaaactggtgaactcgcagttctcccagcgtcaggaatcggaagcggatgattactcttacgacctgctgcgtaagcgcggtatcaatccgtcgggactggccaccagcttcgagaaactggccaagctggaagccggtcgtcagagttcgatgtttgacgatcacccggcctcagaagcgcgcgcccagcatattcgcgatcgcatgaaggccgacggcattaaataagcgacagcgggaggcgctagcgcctcctcaccaatctttgccagccaacaatcaaatagccagggctttattgaagacagccacttggaactctttttacgtaacgcttatacccgtcatacttcaagctgcatgtgcgttggcaataactcggcctatccctgggcctcgcccctacggggccagcgcaagcgctgttcaaaacggctagccgttttgtccggcaactcgaaatatttagggtatataccaaacgtgattatcgcgatgggttgccggataaagccgaatggggccaggggattatcgccaccttcaaatcggggtttacccagggaccggtcggcttcggtgtggactgtatcgcccagtatgcggtgcgccttgacggcggtcgcgggcccagcggcctgcgccttgattaaccccctgtaccgtacggcacagggggttaccggggttattcgcccttcttcgccgcctggatgtacagcatctccagcgccagggtcgccgccgccagagcggtaatttcggactgatcgtaggccggggcgacttccaccacgtccatcccgacgatgttcaggtccttcaggccgcgcaccagcttgatcgcgcggtcggaggtcagcccaccgataaccggggtaccggtgcctggcgcaaacgccggatccagacagtcgatatcaaaggtcaggtacaccggcatgtcgccgacgatctgcttcacctgggcaatcacgtcatcaacgctgcggtcgttaacctggccggcgtcgagcaccgtaaagccattgtctttgtcgaattcggtgcggatcccgatctgtacggagtggttcggatcgataagcccttcattcggcgcggtatagaacatggtgccgtggtcgaactcgcagccgttggcgtaggtatcggtgtgagcatcgaagtgcaccagcgccattttaccaaagtgcttggcatgggcgcgcagcagcggcagggtaacgaagtggtcgccgccaaaggagagcatacgtttgccggccgccagcagcttctcggcgtgagcctgcagcttctcgctcatttcgcgcgcgtcgccgaaggcgtacaccagatccccgcagtccaccacgttcaggcgctcgcgcatatcgaagttccacgggaaacggttgtgctcccaggcaaggttagtagaaacctgacggatcgccgccgggccatgacggccgcccgcgcgcccggaggtcgccatatcgaacggcacgccggtgatgacccagtccgcatcgctttcatacggcataaagttcattggcaaacgcagaaagccaaaggcattggataccagggagttatcgtattgatgacctaaagtgctcatggatatgacctcttttgacagtcgtggaacgtaaaaaataagtataaaaaaacccctccgcgtcgttaggcccgacgaggaagggtttgatagataaatcgcttattggcgtgaattatcgccggtaatgcatacgggttcaagtgagtatcgcatgctgccggatgacggcttcgccttatccggccgacatacgcaggcccggtcagcgcagcgccaccgggcatcagcagctactcgtcttccagataagtatagccgtacagtcccgcctcgaactcctcgaggaactgctgctgcagcgcgtcgtccagaccggtatttttcacctgatcgcggaactgggtcagcagcgtattcggatccagctgcacatactgcagcatatccgccacggtatcgccctcgtcggacagctcaacctcaacgctgccgtcagggaagacgaacacgtccaccgcctcggtatcgccgaacaggttatgcatgttgccgaggatctcctgataggcgccaaccatgaagaagcccagcatcggcgggttctccgggtcgtattctggcatcggcatggtggtggcgatcccgtcgccgtccacgtagtgatcgatggcgccatcggaatcgcaggtgatgtccagcagcaccgcgcggcgctccggcgacttgttcagcccttccagcggcatcaccgggaacagctgatcgatcccccaggcatccggcatcgactggaacaacgagaagttgacgtagattttatccgccattcgctcctgcagctcatcgatgatgggacgatgggcgcggttgctcgggtcgagctgcttctgcacctcatggcacatgttcagatacagctgttccgcccacgcgcgctcctgcaggttgaaggtgcctgaggagtagccgatgtggatatcgtgcaggtccatctggctgtcgtgcagccattcgcgcagcgagcggcggttgccggtctcgtgcatctcaagccaggtttcccacatgctctgcagcggacgcgcagcgtcttccgccggcggggtcgcctcggtgtattcgttacgctcaacgccgatgatgttggaaaccagcacggtatggtgcgcggtcaccgcgcggccggactcggtgatcaccgtcgggtgcggcaggccattctcttcgcaggcatcgccgatcgcccagatgatattgttggcgtattcgttcagaccgtagttcaccgagcaatcggactgcgagcgggtgccttcatagtccacgcccaggccgccgccgacgtcgaagcactgaatgttgacacccagcttatgtagttcgacgtagaaacgcgccgattcacgcacgccggtggcgatatcgcgaatgttagccatctgcgaaccgaggtggaagtgcagcagttgcaggctctcaagatggcctgcctcgcgcagaatttcgaccagttgcagcacctgggtcgctgcgaggccgaacttggacttctcgccgccggaggactgccatttaccggagccctgcgaggccagacgcgcacgtacgccaaggcgcggcaccacgttcaggcgctcggcctcttccagtacgatagcgatctcggacatcttctcaatgaccagatagaccttgtggcccatcttctcgcccaccagcgccagacggatatattcgcggtctttataaccattacagacgatgacgctgcgggtcatcccggcgtgcgccagcacggccatcagttccgctttcgaaccggcttccaggcccagcggctcgccggaatggatcagcgattcaatcacgcgacggtgctggttaaccttgatcgggtagacgaggaagtaatcgccgttatagccatacgattcacgcgcgcgtttgaaggcggcgttgatcgagcgcaggcggtgctgcaggatctgcgggaagcagaacagcgccggcaagcgctgcccttgcgcttcacgcgctttgactaattccgcgaggtcaacgcgcgcttccggaacgtccggatccgggcaaacgctgatgtggcccagttcgttgacgtcataatagttattgccccaccaggcaatattataagtacgcagcatcttgctggcttcctgggagctcatcgctacctcctgcatggaacgtagtacaccgtgttcgcctgctgacgaaggcgaaaccatagacatgtcgtcagacatagcgaacctcaatttttaataataagtgtaagacagttaactactatcgcagtccaaagatgcgataacaacccatgaacagtcctaaagcccagcactatctgctggttttgcgactgcgcgaccggtttcttattcatatcatcgtaaaacacgtagccgaacagagtatgacagtccggagaaaccacgagaaaactcttgccaggcaagagcgcccttgttcagttttctgacggccgaccggccctggaatcctgagaagcgccgagatggggtgaacatcggctggtttgcatgagagagatgcaggttgcggagtgctgacgcgcgacagaacgacgcgacgaatcaaacgaaaaacattggttcattatctggtatcacctccacaccgccctgcgacagggtcggcgacaagccaaagctatacataccgggcaacaggcgctacgccgctgcgagattctgtaaatacagactgcttaacccggctggaagtggcaccacagggccatgccccgtgcgcttttttaatgagccgcgcgcggcggtttataccgagaagcggggtaaaaagcaaaataaaaatgtgcctgtttgcgcggttgtcaggaaattttgccaggcgggttttcccataaatgcgaccgccatcaaaaaaggctggaaatgggctcaagatttgacctaaaatggccgtccagaagttaatccgtctatactgattaacactcagactgctcgtgtcgctacctgcgcggctttgcgctgattatccaccaaagccacattacacaacagtatgagctatccgaatcgtccacaggtgaaataaaatatggcaaaacacctttttacgtctgagtccgtatcagaagggcatcctgacaaaattgctgaccaaatctccgatgccgtgctggatgcgatcctcgagcaggatccgaaagcgcgtgtcgcatgtgaaacctatgtcaaaaccggcatggtgctggtaggcggcgaaatcaccaccagcgcatgggttgatatcgaagagatcacccgcaacaccgtccgcgaaattggctacgtgcattccgatatgggctttgacgccaactcgtgcgccgtactgagcgccattggcaaacagtctccggacattaaccagggcgttgaccgtgccgatccgctggaacagggcgccggcgaccaggggctgatgtttggctacgccactaacgaaaccgacgtgctgatgccggcgccggtgacttacgctcaccgtctggtgcagcgtcaggctgaagtgcgtaaaaacggcaccctgccgtggctgcgcccggatgcgaaaagccaggtgaccttccagtatgacgacggcaaaatcgtcggcatcgacgcggtcgttctgtcgactcagcacgcggaagatatcaatcagaaatccctgcaggaagcagtgatggaagagatcatcaagccgattctgccgaccgaatggctcaacgcgtccaccaaattcttcatcaacccgaccggccgtttcgttattggcggcccgatgggcgactgcggcctgaccggtcgtaagatcatcgttgatacctacggcggcatggctcgccacggcggcggcgcgttctccggtaaagatccatctaaagttgaccgttccgcagcctacgcggcgcgctatgtggcgaagaacatcgttgccgcaggcctggccgatcgttgcgaaattcaggtttcctacgctatcggcgttgcagaaccgacgtccatcatggtggaaacctttggcaccgagaaagtgccttctgaacagctgaccctgctggtgcgcgagttcttcgacctgcgtccatacggtctgattcagatgctggatctgctgcacccgatctacaaagaaaccgcagcctacggtcactttggtcgcgaacatttcccatgggaaaaaaccgacaaagcggcgctgctgcgggaagcggccggtctgaaataatctccgcgcttcctctcttcaaggccagcctcgcgctggcctttttatttacgcctccccccttttctgcgcccccatttcaacgcgcggccgccaaaaaatgaaagcgattacatagtaaagactgtcaccttctgcccaaagacgctatctcctgtactcatttttcacaatgttacatattgtttcggtcaactctgattaccgtttttcaaaatgtcgtctatccttgtttatattgctgatttaaaaagcatttaatgaattacgtttctttacctttgtggaaacgattacacagccgtgattatagtcacgtttttttaccgacgagtgtcctaccctaaccatcgacagaatcaataactcaactggagggcgttatgcctgacaacaaaaaacaagggcgttcgaacaagactatgacgttcttcgtctgtttcctcgccgcgctggctggcctgctgttcggccttgatatcggtgttattgcgggtgccttaccctttattgccaatgagttccagatttccgcccacacccaggagtgggtggtcagctccatgatgttcggagctgccgtcggcgcggtcggcagcggctggctctctttcaaactgggccggaaaaagagcctgatgatcggcgcaatcctcttcgtcgccggttcgctgttctctgccgccgcgccaaacgtcgagatcctgctggtttcccgtgtgctgctcggcctggcggtgggcgtcgcctcatatacggctccgctgtatctgtcggaaatcgccccagaaaaaattcgcggcagtatgatttccatgtaccagctgatgatcaccatcgggatccttggcgcctatctctctgacaccgctttcagctacagcggcgcatggcgctggatgctcggggttatcatcattccggcggtattgctgctgatcggcgttatcttcctgccggacagcccgcgctggttcgccgccaaacgtcgctttgtcgatgcggaacgcgtgctgctgcgcctgcgcgatactagcgccgaagcgaaacgcgagctcgatgaaatccgtgaaagcctgaaggtaaaacagtccggctggtcgctgtttaaagacaacagcaacttccgccgcgcggtgttcctcggcatcctgctgcaggtgatgcaacagttcaccgggatgaacgtcatcatgtactacgcgccgaagatttttgagctggcgggttatgccaacaccactgagcaaatgtgggggacagtgatcgtcggtctgactaacgtgctggccacctttatcgccatcggtctggtcgaccgctggggccgtaaaccgacgctgatccttggctttatcgtgatggccgcgggtatgggcgtcctgggtaccatgatgcacatcggcattcactcctctaccgcgcagtacctcgccgtcctgatgctgctgatgttcatcgtcggtttcgccatgagcgccggcccgctgatttgggtactgtgctccgaaatccagccgctgaaaggccgcgacttcggtatcacctgctccacagcgaccaactggattgccaacatgattgtcggcgccaccttcctgaccatgcccaactcgctgggcagcgccaataccttctgggtgtacggcggtctgaacgtgctgtttatcctgctgacgctgtggctgatcccggaaaccaaaaacgtctcgctggaacatattgaacgtaacctgatgcagggtcgtccactgcgcgagatcggtgcccgcgattaaccttcctgagcttcctcccatcccgggaggaagcttcctcttgctctcccccctccgccgcactatcctctggcgctatgaaaacgccccgtattcccatcgctattcagcaggccgtcatgcgcagcctgcgggagcatctcgccaatgcgaatcgcaagctggaacgccgctatgcggaaccgacgctggtctaccagcagcgtggtacttccgctggcaccgcctggctggagaaaaacgaaattcgtttaaacccggtgctgctgctggaaaatcagcgggagtttatcgatgaagtggtgccgcatgagctggcgcacctgctggtctggcagcatttcggccgcgtcgcgccgcacgggaaagagtggaaatggatgatggagagcgtccttggcgttcccgcgcgtcgcacccaccgctttgaactcgcttcggtccgccagaacaccttcccctatcgctgtcgctgtcagcagcaccagctcaccgtccgtcgccataaccgggtggtacgcggcgaggccacctaccgctgcgttcgctgcggcgatctgctggtggctgaaaaataaccatcggaattaattagaaactttctgatctgactgattgcatccggcaccctcattcgctacgttgcgggctcgttttgacacggagttaacgatgtcccgtatgcatgttttagccgtagcggtattgagcgcggcagtcagtggtccgcttgcggccgctggtattaatagtttttcccaggccaaagccgctggcgtcaaagtgaatgccgacgttccgggcgatttttattgcggctgtaaaatcgactggcaggggaaaaaaggcgttatcgatttggaatcctgcggctataaagtgcgtaaaaatgagaaccgcgccagccgggttgaatgggagcacgtagtgccggcatggcagttcggccatcagcgtcagtgctggcaggagggtggacgtaaaaactgcgccaaagatccggaataccgcaagatggaaagcgatatgcacaacctgcagccggcggtgggagaagtgaatggcgatcgcggcaactttatgtacagccagtggaacggcggtgaaggccagtacggccagtgcaccatgaaggtcgattttaaagataaaatcgccgagccccctgcccgcgctcgcggcgccatcgcccgcacctacttctatatgcgcgaccgctatcagctgaatctttcccgccagcaaactcagctgtttaccgcctggaataaacagtacccggtcaccgcctgggaatgtgaacgtgatgagcgcatcgcgaaagtgcagggctaccataatccgtatgtccagcaggcttgccaggcgcaaaagagctaacctacactagcggcaattgttaatttgcagccctgtgcttcccgcccgatggcgggaagctggcatctgcgcaacgaacggaatatcaagcatgcgcattcctcgcatccatcatccagaacgcctcattgtcggcagccagatcgcgctgagcgatgacgcggccaaccacgtcggccgcgtcctgcgcatgaccgccggtcagcacctacagctttttgacggcagtaaccaggtgtttgacgcggtcatcaccgaggccggtaagaaaaacgttacggttgaggtgctcagtggcgaacctgacgatcgggaatcgccgctgcatatccatttaggccaggtgatgtcccgcggcgaaaaaatggaattcaccatccagaaatcgatcgaactcggggtaagcctcataacgccactgttttccgagcgctgcggcgttaaactggatgccgaacgtttgcagaaaaagatccagcagtggcagaaaatcgctattgccgcctgcgaacagagcggtcgtaacgtggtaccggaaatacgtccggcgatgcagctggaggcgtggtgcgccgagcaggacagcgggctgaagctcaacctgcacccgcgcgccagcgccagcattaacacgctgccgctgccggttgaacgcgtccgtctgctgattggcccggaaggcgggctgtcggctgaagagatagcgatgaccgcgcaataccagtttactgatatcctgttgggaccgcgcgttctgcgtacagagactactgcgctcaccgccatcaccgccctacaggtgcgttttggcgacttaggttgaggcgttaacggagaagaaccatgatcaagctcggcatcgtgatggatcccatcgcaaccatcaacatcaagaaagacaccagcttcgctatgttgctggaggcgcagcgtcgcggctatgaactccattatatggagatgaacgacctctatttgatcaacggcgaagcccgcgcccggacgcgcacgctgagcgtcgaacagaactacgataaatggtatgacttcaccggcgagcaggatctgccgctggcggaccttgacgtcatcctgatgcgtaaggatccgccgtttgataccgaatttatttatgccacctacatcctggagcgagcggaagagaaaggcacgcttatcgtcaacaagccgcagagtctgcgcgactgtaacgagaagctgttcaccgcctggttctctgaactgaccccggaaacgttggtcacccgcaataaagcccagctgaaagccttctgggaaaagcacggcgatatcatcatgaaaccgctcgacggcatgggcggcgcctctattttccgtgttaaagccggcgatccaaaccttggggtgattgccgagacgctgaccgaactgggcagccgctactgcatggcgcagaactatctgccggccattaaagatggcgacaagcgcgtgttggtagtggatggagagcccgtgccttactgcctggcgcgaattccgcagggtggcgagacccgcggcaatctggccgccggcggccgcggcgaagcccgcccgttgaccgaaagcgactgggaaatcgcccgccgcgtcggcccgacgctgaaggccaaaggccttatcttcgtcggcctggatatcatcggcgaccgtctgacggaaattaacgtcaccagccccacctgcgtacgcgaaatcgaagccgccttcccggatatttcgatcaccggtatgctgatggacgctatcgaaagacgtatcgataaataagcacgacggcggaccaacgtccgcttttggcgcagcgagcgcggattaccgcgctcgtgaaacgttgccagcctgacgccactcgggcgccagccagataaagtgcatcgacaccattctactttgcccgcatactgggtgttgcttttttgaaccaggaacgaacctctgacaatgaatttacagcatcactttctgattgccatgcccgcgcttcaggaccccattttccgccgctccgtagtctatatctgcgagtacaacgacgagggtgccatgggcattattatcaataagccgctggaaaatctgcaggtggaagggatccttgagaagctcaaaattgtcccggagccgcgcaatccagagatccgtctggataaaccggtgatgctgggaggcccgctggcggaagaccgcggcttcattttgcataccccgccctctgacttttcctcgagcattcgcatctcggataacacggtgattaccacctcgcgggatgttcttgaaaccttaggaaccgatcggcagccgggcaacgtgctggttgcgttgggctactcttcgtgggagaaagggcagctggagcaggagattttagataatgcctggctcaccgccccggcggatcagaatattcttttccgtacgccgatcgccgatcgctggcgcgaggcggctaaactgattggtatcgacattgtgacgatgccaggcgtcgcggggcatgcgtgatgagcggaacctttctcggctttgactttggcaccaaaagcatcggcgtggcggtgggacaacgcatcaccgcgaccgcacgaccattaccggcgctgaaggcgcaggatggtaaaccggactggaacgtcatcgaaaaactgcttaaagagtggcagcctgaggcggtaatcgtcggcctgccgctcaatatggacggcaccgagcaaccgctgacggcgcgcgcgcgtaatttcgccaataaaattcatggccgctttggcgtcgcgatccttctccacgatgaacggctgagtacggttgaggcccgcgcgggcctgtttgaacacggcggctaccgggcgctgaataaaggcagcgtcgattcagcctctgccgtagtcatactggaaagctacttcgagcagagcttttaaactctgccctcctgcgccgccggcggaccgctgacggcgcacgtttacccgcttagtggcgcagatgttcgttagcccagctcaccgcctgggtgcgatttttcacgctcagtttacgaaacacattgtacaggtgcgtccgcaccgtgttctcgctgataaacagcgcgcgggcgatatccaggttcgttgcgccgcagcgcagttcgttgaggatctcgcattcccgctcggtcagcggcgagttctctactggagtcgatgcatggtccgcagcgtacatcgccgggtgcatcacgctcaattcagccgtctgctcgccgttcagcacggccttaacgccctcaattaagcgcgattcatcatcgtcatgacggaacacgccatataaagccggccactgcgccatttcgtatagctcatacttttgtgcgctattaataatcaacaaacgaggattatctgcctgcaggcgaataatatcccgccacaccccgtttaatttcttatttgacactgcaatatcaaataatattacagaatcttttgccaaacgctgcgccagcggtttattaatattttgtaaaaccacctgtgccatcagggtttcgctcagatagctggcaaaggctttgctttgaatagacgggtgggtaataaaggttacctgacgagaagatgatgaatttccatttaaattaatcacttaaaactctccttagctgttacccaccgccatggtggttaaatgaataaaaaaagatacaaacagtcgtgaatttataaatcaccaaggtaatttacaaactgaaacgttattccatgagaatcatcctattcccacaaacagcataaatcgaatgactcaaagctgtcaaaagataatcaaacttttttcctggaaatgcgtattcactgtcgacatatctaatctgaatgtgttatttgaatttataatcaaaagttatttgtattaccaaataatattaataaacaacaaataaacattcatctaacatatcatttaacctgtcatatcaatctctttctcatcttatagcgcgcctgcagcgacacgttgctgaaaactctgggtaaaggtcaacattccggcctgcatcccggtctgcatcacaccaggcaattgatgtacttttccttcacggatcaaattcgccaccgctggcgtgttgaccagaagctcgtatagcgcaactctcccgccctgacgtgcaggtaacaatttttgcgccagcaccgcgcacaggcttccggcaagctggctacgaacctgatctttctcctccgccggaaagacatcgatcaatctctccaccgccggcgccgcgccgcgggtatgtaatgtcgccattaccaggtgcccggtctccgccgcggttaacgccaggcgaatggtttcgctgtcgcgtagctctccgagcaggatcacatccggatcctggcgcagcgccacgcggagcgccgcggcgaacgaaggacagtgacggccaacttcccgctgctggatcagacagcgctcgctgtgatgaataaattccaccggatcttcaagcgtcagaatatggccatcaagatgctgattgaggtgccccaccattgccgccagggtggtcgacttgccgctgcccgtcgctccggtgaccaacagcaaaccactctcttccgccagcagttcgctcagcgcaggcggggcgccgagcatatccagacgcgggcactgttcaggaaggaggcgcagcaccagcgatatcccacgcgtatgggcgaaggcgctggcgcgcagccgcgcaccgcaggccaggttcagcgcaaagtcaatctggccgtgttcctgccagtgcagtaactgtgcggcatcgagccagtcgttgagtaaattcgcaatatccggcgcgggaaagggcgcgggctccagcctgccctgccgccgccagcgcggtgcggcggaattgcacaggtgtagatcggagacattatgctttacactaagggctacgatttcttccagcttcataactcatcctcggaatatgaacgatattgcgcataacctggcacaggtccgggacaaaatctccggtgctgccgcccgatgcgggcgtgcgccagaagaagtgacattgcttgcagtgagtaaaacgaaacctgcgagcgcgatcgaagaagccattgcggcaggccagcgggcatttggtgaaaactacggccaggagggcgtggagaagattaaccatttccagcaggctggcgtcagcgggctgcagtggcactttattggccccctgcagtccaacaaaagccggttggtggcagagcattttgactggtgccacaccgtcgatcggctgaaaatcgccacccgcctgaacgagcagcgcccggcgcatttaccgccgctgaaggtgctgattcaaattaacatcagcgatgagcagagcaaatccggcctcccgctggaagcgctcgacggcttagcggcggagatcgctgagttacctcatctggaactgcgcggcctgatggccattcccgcgcctgagtcagaatatgtaaggcagtttgccgtcgcccggcaaatggcggtagcatttgcgcgattaaaaacgcggtaccccacggtcgatacgttgtctctgggaatgtcggacgatatggaagccgcaatcgcggcgggaagcacgatggtgcgcatcggtactgccatttttggtgcgcgcgactacagcaaataataaggaatctgaggaacgccatgaagacgttgactttcctgctttcaacggtcattgagctttacacgatggtcgtgttgttacgcgtctggatgcagtgggcgcgctgcgacttttacaacccgttttcgcagtttgtggtgaaagccacgcagccgattgtcggaccgctgcgccggattatcccggcaatggggccgattgacagcgcctcgctgctggtggcatttattctctgcgtcatcaaagcgatcgtgctgtttatggtgatcaccttccagccgatcatctggatctccgctctgcttattctgctgaaaaccatcggctcgttgatcttctgggtactgctgttgatggcgatcatgagctgggtcagccagggccgtagcccggtggagtatgtgctgatgcagctggcggacccgctgctgcgccctatccgcaacctgctgccgtcgatgggcggtatcgatttctcgccgatggtgctggtattgctgttgtacgtaatcaatatgggcatcgccgaagtgctgcaggccaccggtaatgtactgctgccggggctgtggatggcgctatgagtgccgttgaaacctgcgctgacgggctggtgctgaggctgtacattcagcctaaggccagccgggatagcatcgtgggcgtacatggcgacgagcttaaagtcgccattaccgccccgcccgttgatggccaggccaatgcccacctggtgaaatttctcgccaaacagttccgcgtcgccaaaagccaggtactgattgaaaaaggtgagctgggccgccataagcaagttaaaatcatcgccccacaacagatcccgactgcggtcgcggcgctaactgaataaacaggattcatcatgcaaaaagtcgtcctcgctaccggcaacgccggcaaagtgcgcgaactggcctcgctgctggaagattttggtctcgatatcgtcgctcagaccgagcttggcgtggactctgcggaagagaccggcctgaccttcattgaaaacgcgattctgaaagcgcgccacgcggcgcagatcaccggcctgccggccatcgccgacgattccggtctggccgtcgatgctcttggcggcgcgccgggtatttactccgcacgctattccggcgtcgatgccagcgaccagcagaatcttgagaagctgctcgacgcgttaaaagacgtgccggacgaccagcgtcaggcccagttccactgcgtgctggtctatctgcgccatgccgaggatcccacgccgctggtgtgccacggcagctggcctggggtaatcacccgacaagccgccggtcatggcggcttcggttacgacccgatcttcttcgtcccgtcagaagggaaaaccgcggccgaactgagccgtgaagaaaagagcgccatttcccatcgcgggcaggcgctgaaactgttactggaagcattacgtaatggctaatttgccgccgctgagtctctatatccatattccctggtgcgtgcagaaatgcccgtactgtgattttaattcgcatgcgctgaaaggcgaggtgccgcatgatgactacgtccagcatctgctgaacgatctgcaggctgatgcgcactatgcccagggacgggaaataggcactatttttatcggcggcggaacgccgagcctgctgtccggcccggccatgcaaacccttctggatggcgtccgcgcctgcctgccgctggccgccggggcggaaatcaccatggaagccaacccgggtaccgtggaggccgatcgcttcgttgattatcagcgcgccggggtgaaccgcatctccatcggcgtacaaagctttagcgaaccgaagctgcagcgcctggggcggatccacggcccggaggaagccaagcgcgcagcacgtctcgccagcggcctcggcttgcgcagcttcaacctcgacctgatgcacggtctgccggaccagtcgctggaggaggcgctggacgatctgcgtcaggcgattgccctcaacccgccgcacctgtcgtggtaccagctgaccattgagccgaacaccttgttcggctcccggccgccggtgctgccggatgacgacgcgctatgggatattttcgagcaggggcatcagctgctgagcgccgccggctatcagcagtacgagacgtccgcctatgctaagccaggcttccagtgtcagcataatctcaactactggcgctttggcgactacctcggcatcggctgcggcgcgcacggcaagatcaccttccctgacggacgcattctgcgaaccgccaaaacccgccacccgcgcgggtatatggaaggccgttaccttgagcgtcagcatgatgtggaagaagcggataaaccgtttgagttctttatgaaccgttttcgcctgctggaggccgcgccgcgcgcggagttcagcttgtataccggccttgatgagcaggttatccgtcagcaaatcgatgccgctatcgccgaaggctatctgctggaagatgcgcaaaactggcaaattaccgagcacggtaaactgtttttaaattcgctgctggagctgttcctcagcgaagagtaatccctgcgggcggcacgtcgtcgcccgtatctttccccttacatcctctcccgctacggtcaaatcgactggcgtttttttgttcacttatttgcagcgaatcacaaaatccgatcgacttttttccttttcttgactcattttttgcgcagtggtaatcctgcttcatcggttgagcaaatgtaaaaccgacgtatcctacatgtgaattattggtaactctgattaaaaaagtctctgtaacgtcggcgcaacccggcgggcttaagcctataaaaaagagggtaacacaatgaattaccgtaatatttttatcacactcgccgcactatccggcaccgtcacggcttcagcctggtctgcagagtccgccaccgtggcctttttaatgcccgatcaggcctctacccgctatgaacagcacgacttccccggttttaaggcggaaatgagcaagctttgcgcggattgtaaggtcatctatcagaatgccaacgccaacgcgtcgctccagcagcagcagttcaactcggttatcgcccagggggcgaaagtgatcgtcctggatccggttgattcttccgccgccgccgcgctggtcgaaaacgcccaagcgcagggggtcaaggtcattgcctatgatcgcccggtaccagacaaaccggctgatttctacgtctcatttgataacgagggcattggctacgccatcgcaaaatctcttaccgaccatctgaaagcgagcggcgtgccgcaggatgccggcgtgctgcaaattaacggttcgccaaccgatgccgccgcagggctgatccgcgacggtatccatcgcggattgaaagagtccggttacaaaacgttggccgaattcgacaccccggagtgggcgccgccgaaagcccaggagtggaccgccgggcaggttacccgctttggcgacaaaattaagggcgtggtcgcggcaaacgacggtaccggcggcggcgcaattgccgcctttaaggctgccggcgtccagccgctgccgccggtcaccggcaatgacgccactatcgccgcgctgcagctgatcatcgctggcgatcagtacaacaccatctccaagccatcggagatcgtcgccgcggcggcggccaaagtggcggttgattttatccagggcaaaaaaccgcaggccagcaccaccctgtacaacaccccttcccagctatttaccccggaagtggtgacggccaaaaacatcaaagcggaaatcttcgataaaaaaatccagacctgggatcaggtgtgtagcggcgagtacgccgccgcctgccagaagttaggcatcagcaagtaacttttgcccctgcgcccgccgcggcgggcgcgatttcgccattattgaggtcgttttgtatgccgcaacaacaacacaactccgccgccgggcggccaatactgcaactgcgcaacgtctctaaacattttggcgcggtgtccgcgctgacggatatcgaattagaagtccacgccggcgaggtggtcgcgctggtcggcgacaacggcgcgggcaaatccacgctggtgaagatcctcgccggcgtccaccagccgacctccggcaccattgagtttgacggcaaccctgtcaccctcgatagccccggcaaggcgctggaatacggtattgccacggtgtttcaggatctggcgctgtgtgaaaaccttgatgtggtggcaaacctgtttctgggtcatgaaatttcgccgttccagctcgatgaagtggcgatggaagtgaaagcctggacgctgctgcaggagctggcggcacgtattccgtcggtacgcgaaccggtggcatcgctttccggcggccagcggccgaccgtcgccatcgcccgttcgctgctgctgaaccctaaaatcattatgctcgatgaacccaccgcggcgcggggcgtcgcgcagaccgcggaagtgctcaacctgattgagcgcgttcgcgagcgcgggcttggcgtcatcatcatcagtcacaacatggaagacgttcgcgccgtcgccgaccgtatcgtggtgctgcgtctcgggcgcaacaaagggatcttcacgcccgatgcttctaatcaggatctggtcgccgcgatcaccggcgcgacggaaaacgccgtctcacgccgggttgaacgtaaatcacagccaacgacttccggagcgatgtaattttatgaacagtaagaccgcatcccacaccgcgctggatcgcagcgatgagcgcgttcgtcacgacgaggggctgttcggcgccctacgcgcgcagataacccgcatcaaaaccggcgatctcggcaccgcgccggtgatagccgggctgattgtgatttccctggttttcaccttcctcaacccggtctatatcgcgccgaataacctggtgaacctgctgtttgactgcgcgacggtcgggtttatctcgctcggcatcgtctgcgtgctaatgcttggtgagatagacctgtcggtcggctccatgagcggcctggcatcggctatcgtcggcgtgctgtgggtgaacgcaggatggccgctggcgggagccatcgccgtggcgctggcctgcggcgtggccgtcgggttggtctatgcgctgctgtatacccgcgtcggaatgccgagtttcgtcgccactctcgccggcctgctggcgctgctgggtatgcagctgtatatcctcgggccgagcggcagcatcaacctgccctatacttcgccgctggtgcgctttggccaactgctggtgatgcccggctggttctcacacctgatggcattgctgccagggctggcgatccttatttttggcctgaaaaaacgctcgcggcgcctggcggccaatctttccgccgagggagtcagctcgctagtggcgcgcgcgatcgcgctgacgattatcttcgaggccgcggtgctttacctcaatcaggggcgcggtattccatggattttcggtctctttgtcgcctgcgtgatgatcctcagctacgcgctgaaacggacaaaatggggtcgctcgatgttcgcggttggcggcaaccgtgaagcggcgcgccgttcgggcattaacgtgcgggcgatttatgtgagcgctttcgtcctgtgtaccacgcttgcgaccttcggcggcattctcgcggcgtcgcgactggcttccgccagccagcaggccggcaccggcgacgtcaacctcaacgccatcgccgcggcggtgatcggcggcaccagcctgttcggcggacgcggcagcgcctggtccgcgctattggggatcatcgtgattcagtcgatttcaaatgggctgacgctgttgaacctgccgtcttcgctgcgctatatcattaccggcgcggtactggcgattgcggtaatcattgattctctggctcgccgttcacgcgtgtcgcacggccgcgcctgagtggagaagtgcgcggcccaaaggtatgcgggccgcgaaattttgattattttaacgagccaaccagcgctttgcggctgtcctccagcgatacctcccggctgcaaacatctttgccgaactgctggaaatcggcctcctggtttttccattcctcctgaatcgccgtttgcaggccgccgaggctgccgagaatgccctgtagcggattaccgccgcctttgagcaccgctttcgcccccatctcgttaatgctgtcctgcagaatgccgcccatcgcctgattcaccagctgctggccatcggcgcgtacctggtcgatagctttatagtggaaggtcaggccatcgctgcgacgttcgataatgcggttcatctgttctttcagctgcgcgtccagtttggtcaggcgaccgtgcatgctgctgttggcgccaacctgttcggtaatgattttatccagcgccttgcggcttttttcgactcgcgaccgcgcgccttggtcaatccacggcaggctgctgcgcaggctggcctgataatcctgcgcctgttcgcgctgggcggcgctgagcgcataggccttgccgttaaaggtcagattgccgtccggctttatcaccagatcgccgttttcccctttcacctgcacctgctgcgggctgaggatcacatcgtcccgcggcgtgacgctacactggtagtccgcatgggcagacaaagcggtgatggagagcgccaccgccagcagcgttttacgcatcataaaactcccttaagacaaaacgggccggcaattgccgacccttgtcaaacttagtcccaccagacgtcaaaaagttcgctggtgcgcacatcctctaacttacgcgcttccagccatttgcgtacgatagcctgatgctcttcagtgcacttaccaatctcctgcatgcagatgagcccttcccaggagagataaccgctgccgtcgaaggccagcttgttcggctctatcacctcttcgatcagatcgttgaccgtctggtcgatctgctcttcgctggtcccttccgggaaacgccaggcgacggagaagcctaactcctgaaactcatcgatatgcatttttttacgcagacgacggctacgattcttggccattatttcaccctctcgaacattaagtcccatacgccgtggccgagacgatggccacgctgttcaaatttggttaccgggcgcgattccgggcgcggtacgtaatcgttgcttgccgactggttacgatagccttccagcgaggacatgacttccagcatatgcacggcataagcttcccagtcggtcgccatatggaagacgccgccgagcttcagcttgcttttcaccagctcagcgaaaggcggctgcacgatacgacgtttattatgacgcgctttatgccacggatcagggaaaaacagttgcaccatattcagcgagttatccgggatcatggtatgcagcacttccaccgcatcgtgacacattacgcgcaggttttgtacgccttcttcttccgcggaagccagacaagcgccaacgcccggggagtgtacttcaatgccgaggaaattctgttccggtttggctttcgccatcgccaccagcgaggcgcccatcccgaagccaatttctaaggtgaccggcgcgtcacggccaaacagggcggcgaaatcgagcggcgcatcgttgaattcaacgcccatcaccggccaaatgttatccagcgcatgctgctgccctttcgtcaggcggccctggcgacggacgaagctacgaatacggcgcagcgggcgaccgttttcatcgaattccggagagatgacgtcgtttttcataaaagtttggtctgcttgtgaatgtgttcggaaaacgggcattatccaaagttacccggcggatgcaagggtttacagccactcgcccttatgctgcaatctgcccccctgtaatcgcgatcccggagccgtagctttgacttttctcgccacgcaattttcagcccaggttctggactggtacgacaaatacgggcgtaaaaccctgccctggcaaatcgccaagacgccctacaaagtatggctctccgaagtgatgttgcaacaaacccaggtgaccacggtaatcccctattttgaacgctttatggcgcgtttccccacggtggttgatttagccaacgcgccgctggatgaggtgctgcatctgtggaccggtctgggctactacgcgcgggcgcgcaacttacataaagccgcacagcaaggcgccacactgcacggcggggaattcccccggacctttgacgaagtggcggcgctgcccggcgtcgggcgctcaccggcgggggcgattttatccctttcgctcggtcagcattatccgattctcgacggcaacgtgaagcgcgtgcccgcccgctgctatgctgtcagcggctggccggggaaaaaagaggtggaaaaacggctgtgggacatcagcgaagaggtcaccccggcagagggcgtcgagcgcttcaaccaggcgatgatggatctcggggcaatggtttgtacccgctcgaagccgaagtgcgagctgtgtccgctgagcaacggctgcgtggcctacgcgaaccattcatgggcggaatatccgggcaaaaaaccgaagcagaccctcccggaacgcaccggctacttcctgctgatgcagcacggcgacgaggtgtttctttcccagcgtccgccggtgggtctgtggggcgggttgttctgttttccgcagtttgcagacgaagcggagctacgcgagtggctggcgcagcgccagataaaggccgataatctgacgcaattaaccgcttttcgccacactttcagccatttccacctggatattgtgccgatgtggcttacagtgcactcatctggcgcatgcatggatgaaggcaacgcactctggtataacttagcgcagccgccgtcggtcggtctggcggcccccgtggagcgcttgttgcaacagctaaaagccggagcgccggtataaatttttcggctatcaaagaggattaattatgagcagaaccattttttgtaccttcctgcagcgtgaagcggacggccaggatttccagctgtatccgggcgagctcggaaagcgtatttacaacgaaatctccaaagaagcctgggcgcagtggcagcacaagcagaccatgctgatcaacgagaaaaagctcagcatgatgaacccggagcaccgcaaactgcttgagcaggagatggtgcagttcctgtttgaagggaaagacgtgcacatcgaaggctacacgccgccggaaaaacagtaagggccctgcggcctttaaaaaaacaaacacaacacgcacgcccggaatgatgaaaaaatacttagcgctcgcgctgattgcgccgttgctcgtttcgtgttccagctccaataaaaaaggcgccgaatacaacgaggcctgggtcaaggacacgaacggattcgatattttgatgggccagttcgcccacaacatcgagaacatttgggggtacaacgaagtcctgctcgccgggccaaaggactacgtcaagtacaccgaccagtatcaaacccgcagccacatcaacttcgatgaagggacgatcaccgtcgagaccattgccggcaccgaccctcgcggacgactgcgccaggcgatcgtcaaaaccctgttgatgggcgatgaccccaactccattgacctctattccgatgtcgatgacatccagatctccaaagagccgttcctctatggccaggtggtggataacaccggggcgtcgattcgctgggagtggcgcgccgcgcgctttgccgactatctgctgcaaacccgtctgaagagccgcaacaacggcctgcgcgtggtctacagcatcaccattaacctggtgccgaaccacctcgacaaacgtgcgcataaatacctcggcatggtgcgtcaggcctcgcgtaagtatggggttgatgagtcgctgatcctcgcgattatgcagaccgaatcctcctttaacccctatgcggtcagccatgccgacgccatggggctgatgcaggtggtccagcacagcgccggcagagacgtcttccgctcccagggtaaatccggcctgccaagccgcagctatctgtttgacccggcgaataacatcgacaccggtaccgcctacctggcgatgctgaacaatgtttacctcgccggcatcgataaccccacctcgcgtcgctacgcggtgatcactgcctataacggcggcgccggcagcgtactgcgggtcttctccagcgataaagtgcaggcggccaatattatcaacagcatggcgccaggggacgtctaccagacgctgaccacccgccatccgtcggcggaatcgcgccgctatctgtacaaagttaatacggcgcagaaaagctaccgccgtaaatagccctcctcccgactccggcctcagccccgcgctgaggccgcgcttattctccgccatactctgtaatatctttcggttttctgcggcagttaacagaagcattaagctagtgaatgatagaatcgcatcaaaataacgggattaatgttattttaaaaacataacaagcccacatttgtgaggataactacatgaatcttaagctgcagctcaaaatactgtcgttcctgcagttctgcctttgggggagctggctcaccacgcttggctcgtacatgtttgtcacgctgaagtttgacggcgcggcaatcggcgcagtgtatagctcgctcggtatcgccgcggtgttgatgccgacgctgctcggcatcgtcgccgataagtggatcagcgccaaatgggtatacgccatctgccacctggtcggcgcgttaacgctgtacctcgcggcgcaggtcaccacgccgggcgagatgttcctcgtgatcctgcttaactcgctggcctatatgccgacgcttggcttgatcaataccatctcctactaccgcctgcagtcggcggggctggatattgtcaccgatttcccgccaattcgtatctggggcaccatcggctttatcctcgccatgtggggcgtgagcttctccggctttgaactgagccatatgcagctgtacattggcgcgacgctgtcggtcctgctgactctgttcaccctgacgctgccgcatattccggtcgccaacgcccagcgcaatcaaagctggacggagatgctcggcctgaacgcttttgcgctgtttaaaaacaagcgtatggctatcttctttatcttctcgatgatgctcggcgccgagctgcaaatcactaacatgttcggtaacaccttcctgcacagcttcgataaagatccgctgtttgccggcagctttatcgtcgagcacgcgtcagtgctgatgtcgatttcgcagatttccgaaacgctgtttatcctgaccatcccattcttccttagccgctacggcattaagaacgtgatgcttatcagtattgtggcgtggatgctgcgcttcggcctgttcgcctttggcgacccgacgccgttcggcactgtactgctggtgctgtcgatgatcgtctacggctgcgccttcgacttctttaacatctccggttcggtgttcgttgagaaagaggtgcgcccggaaatccgcgccagcgctcaggggatgttcctgatgatgaccaacggcttcggctgtattctcggcgggatggtgagcggcaaagtcgtcgaacactttaccgtcgaggggatcactgactggcagagcgtgtggctgattttcgccggctattcgctggtgctggcctttgccttcgtggcgctgttcaaatacaaacacgtcagacaaccgaccgccgcccagcagagcgtgtgatcggcaaaagtaaaacgccccgcctgttcggcggggcgtttttttatcccttcagcacgtagccatacagccgcttaatgccgtccggatccgtctcgctgtaaaccccctgcagctccggcgagaagccaggcagcatattgaccccctcctccagcgcgaggaaatagcgcagcacggcaccgccccagacctcgccgggcaccacgcacagcacgcccggcggatacggcagcgccccctccgccgcgacgcggccttccgcctcgctcagacgcaccagctcaacgttgccgcgaataaactcgtggttggcatcctggggattcatcaccacccttgggaagctccgtttacggaacatctctttttgcaggctcttcacgtcaaagctaacgtacagatcgtgcatctcctggcacagctcgcgcagggtatagtcgcgataacgcaccggatatttgttatagatggtcggcaacacatcggccagcggcgtatccgcttcaatatgctgttcaaactgccccagcatcgccaccagctgcgccattttttcggcgctctccgccggcgtcagcaggaacagaatcgagttgagatcgcacttctccggcacgatgccgttttcacgcagataatgcgccagaatggttgccgggatgccaaactcactgtactccccactttcagcgtcaatgcccggggtggtcagcaacagtttgcacgggtcgacaaaatactggtcgtccgcgtagccttcaaaaccatgccagcgcgcgtcgggttcgaagctgaagaagcggcgctcccgggcgatcgcctcggtcgggtgatcctgccacgggcgccccgccaccatcggcggaataaagggctggatcatcttgcagttggcgatgatcgctttgcgcgcctcaatgcccagcgccacacactcggcccacaggcggcggccgctctcaccttcatgaattttggcgttgacgtccagcgcggcaaacagcggatagaacgggctggtggaggcatgcagcataaaggcgttattcagccgcttgtgcggacagaaacgcgcctggccgcgcagatggttatcctttttatggatctgcgacgtctgtgagaagccggcctgctgcttgtgcacggactgggtgacaaaaatacccggatcgtcgggggtcagctccagcagcagcggcgagcagtcggccatcattgggataaactgctcatagcccacccacgccgagtcgaacaggatgtaatcgcagaggtggccgatcttatccaccacctggcgggcgttatagaccgtgccgtcgtaggtccccagctggatcaccgccagacgaaacgggcgggaggcattggctttctcaggcgccgcttcgcggatgagatcccgcaggtaatgctcatcaaagcagcgctcgtcaatgccgccgataaagccgaacggattgcgcgcggcttccaggtaaacaggcgtcgcccccgcctggatcagcgccccgtgatggtttgacttgtggttgttgcgatcgaacagcaccagatcgccgcgggtcaacagcgcgttggtcacgactttgttggccgccgaggtgccgttgaggacgaagtaggttttatccgcgttgaacaccttcgcagcgaacttctgcgcgtgcttggccgatccttcgtggatcagcagatcgcctaatttcacatcggcgttgcacatgtcggcgcgaaagacattttcgccaaaaaagtcatagaactgacggcctgcagggtgctttttgaaaaacgccccgtgctgatgccccggacaggcaaaggtgctgttatccatctcgacgtactgggtcagggtattgaaaaacggcggcagcagacgcgcttcataatcacaggccgccgcctccagctccagccactcctgatctttaccggcgatcaccgcctgcaccccctccggcttgtcgaccgccgtctcactcagcaggtagaccggcaggttaaatccgctacgcctgaggagagtaaggatgccgctgcgactgtcggccacggagatgacgactgccgccacatcggtaaaatcggtactgtccagcgccacaacgcgacggtgggtggacaagcgggtgaccagctcgcagctggcggcaatgtgcatggatttcataagcgcaaatgcccgtatcgggagtgtaaaaacctcagacaagggagaccttgcccaacgatgtgtccgggtctgacggattcagctccgaccgccggacatcagtaaaagcagacgcgtccgatcttactgttgccctacagtgagcatacgtgtccttcaccgcatggtgaacagaggggtaagcgtagcaagatgaggcagcccgcgcatctgggcgcggcgtcgctggcgagataatggctgtgtcgtcatcggcggcctcatatcagggaggagaaaattcgcgcaatcatggcacctttcccgaacaggcgcaagatgaaaaccgtatgcacttatatcacggatacacaagctttcccggtaagttaacgccataataatgcggttatcagggatttttaacaggagtcagcgtggttacaggaccttttattaacgccagcgcggtgctggtcggcggtgtgctgggcgccttactcagccaacggttgccggaacggatccgcaccgcaatgacctctatttttggcctggcgtcattgggcatcggcattttactggtcattaagtgcgccaatctgccggtgatggtgctgtcgaccctggtggggacgctgctcggcgaaatatgcaatatggaaaaaggcatcaatacgctggtcagtaaactccagcagttgatgtcagcgaaaggcaagaaaaaggcttcggctcatgagtcttatattcagagctatgtggcgattatcgtcctgttctgcgccagcggcaccggcgtcttcggcgccatgcgcgaagggatgaccggcgacgccagcattctgattgccaaagcgtttctcgactttttcaccgccaccatcttcgcctgcaccctgggcattgccgtcgccgccatcagcgtaccgatgctgcttatccagctgactcttgcagcctgcgcggcgatcattatgccgcttaccacgccgatgatgctggcggatttcagcgccgtcggcggcatgctgctggtggccaccgggctgcgcatctgcgggataaaaatgtttgccgtagtgaatatgctgcctgcgctggtgctggcgatgccaatttccgcggcctggacgctgttttttgcctgaagacgcgtgcttttagcgcaatgtggtgatagattgttcagtctgctgtaaaacagataaatttcgttgacgaggcgcggcgattacggtttaatgcgccccgttgcccggatagctcagtcggtagagcaggggattgaaaatccccgtgtccttggttcgattccgagtccgggcaccactatttaaagaacccgcccacaaggcgggtttttgcttttctgcatccggactctccatcgaactgcgttaacccatgatttccctgctgcgtttttctcctggccagcccgctgctagttaacgacaagcgcaggcctattctccatagaatcttttcgcaaatacattttcagatatcagataacgcactgattaaaatcgccattttcccgctaaaagcggctagaaacgcccttttctggaaatcgatccgcccaggtggctgccctgctttccctccagatggccaaatagcatcttatattccattttgcgctaaatgacagagaaatattctttaaataaccgttttcacagttctagcatgcaaaaatatcttaaacgagtgggtaaatggttatgtcactgtttcattccgtgagcgacctgatcggtcatactcccctgctccagttgcacaaactggataccgggccctgcagtctgtttttaaaactcgaaaatcagaaccccggcgggtcaattaaagatcgggttgcgctgtcgatgattaatgaagccgagcgccagggaaaactggcgcccgggggaacgattatcgaagccaccgccggcaataccggcctcggtctggcgctgattgcggcgcagaaaaattaccgcctgatcctggtggtgccggacaaaatgagccgcgagaaaatctttcaccttcgggcgctgggcgcgacggtgctgctcacccgctccgacgtcaataaaggccacccggcctactaccaggattatgcccgccgccttgccgatgaaacgccgggcgccttttatatcgaccagtttaataacgacgccaatccgcaggcccatgccacctccactgcgccggagctttatcagcagctggagggcgacatcgacgccatcgtcgtcggcgtcggctccggcggcacgctgggtgggcttcaggcctggtttgctgagcactcgccgagaacggaatttattctcgccgatccggcgggttccatccttgccgatcaggtcgataccggacgctacggcgaaacgggatcctggctggtcgaagggatcggcgaagattttatcccgccgctggccaggctggagggggtacataccgcgtatcgcgtcagcgaccgcgaagcgttccacaccgcgcgccagctgctgcaggtcgaaggagtgctggccggctcttccaccggcaccctgctcagcgccgcgctgcgctactgccggacgcaaagccgtccgaagcgggtggtgaccttcgcctgcgacagcggcaataaatacctgtccaaaatgttcaacgacgactggatgcgccagcaaggactgatcgcccgccccgaacagggcgatctcagtgattttatcgccctgcgccatgacgaaggcgctaccgtcacggccgcgccggacgacaccctggccgcggtctttacccgcatgcggctgtatgacatctcccaactgccggttctggaggatggccgcgtggtcggcatcgtcgatgagtgggatttgatccgccacgtacagggcgatcgccaacgcttctccctaccggttagcgaagcgatgagtcgccatgttgaaaccctcgataagcatgcgcccgagagcgaactgcaggccattctcgatcgcggtctggtggcggtgatcgctgacaacgcgctttttcttggcctggtcacccgcagcgatgtattgaccgcctggcgtaaccgagtcgcacaataaggaattttttatgtcatctatccacaccctgagtgtacatagcggaaccttcaccgacagccacggcgcagtgatgccgccgatttatgccacctccacttttgctcagccagcgccggggcagcataccggttatgaatattcccgcagcgggaatcccacccgccacgcgctggagacggcgatcgccgacctggaaaacggcacgcgcggctacgcgttcgcctccgggctggccgccatctccaccgtgctggagctgctggataaggacagtcacctggtggcggtcgatgatgtgtatggcggcacttaccgcctgctggaaaacgttcgccgccgtagcgcgggtctgcaggtgagctgggtgaaacccgacgacctggcgggaattgaagcggcgatccgccccgacacccgcatgatctgggtggaaacgcccaccaacccgctgctgaagctcgcggatctcagcgccatcgccgccatcgcgcgccgccataacctgatcagcgtcgccgataacacctttgcttcgccggcgatccatcgcccgctggagcatgggtttgatattgtggtgcactccgcgaccaagtacctcaacggccattccgatgtcgtcgccggcctggcggtggttggcgataactccgggctcgcggaaaagcttggctatctgcagaatgcggtaggcggcgtgcttgacccgttcagcagcttcctgacgctgcgcggcatccgtaccctggcgctgcggatggagcgccacagcgcgaacgcgctgcagctcgccgaatggctggaacagcagccggaagtggagcgagtctggtttccctggctggcctcgcacccgcatcatcagctggcgcgccagcaaatggccctgcccggcggcatgatttcggtggtggtgaagggcgatgaaggttacgccgagcgcatcatcagcaagctgcgctggtttacgcttgcggagagcctgggcggcgtggagagtctggtgagccagcccttcagcatgacccatgcctcgatcccgctggagaaacgcctggcgaacggtatcacaccgcagctgatccgcctgtcggtggggatcgaagatcccaacgatctgattgccgactggcagcaggcgctgcgggcggagtgattattccgacgcgcggatcgttgtcagcgcgtcggccattccctgctgaaggtgggcgataaactgcgtcagcttcggcaggggccgacgatcctggcgccagagcagatgcacaggccgcggctgcggagtccacgcctccagcacgcgcaccaggctgccgctggccagcgcatcggccagcagtacctccggctgcatcagcagcccggccccggcgatcgccgcctggcgcagcgcgtagccatcgttgcagcgcaaaaccgcatcgcgtttccagcgcacttctccctctacgcccggcagccgccactcgttgcgggcggtccagaccgtatgggacaggcagagatgatcggtgagatcttccggcgtcccgggcgttccgtaacgcgccagataagccggcgcggcgcagatcaccatccgatacggcgccaggtagcgagccaccagatcctcctgatggatctcgccgatacggatcgccagatcgaccccctcatccaccagatcgaccatccggttagtcagatccagttccacccggaccgcaggccaggcctgcaggaaggtggcggtcaggggcgcgatcacgctggcgccgaacgaggtgggagcgctcacccgcagggtgccggccggcgccagccgcagccgctcgaccgcgctttcggcgatggagacctgctccatcacccgtttcgcttcgtcaaaatagactcgcccggcgtcggtgaggctctggcgtcgggtgttacgctccagcagacgcgtcgccagcaggctttccaactgggcgatatatttcccaaccatcaccgccgacagccccaggcgcgacgccgccccggtaaagctgccgcactccaccacggcaataaacgtctccatccctcgtaatttgtccatattgctaacctctggttagtaatgttctaacttttagccagtttatccgagattacttttattaaaaaatagcctctcacctcatcaggagtctgccatgaaaattatcgttatcggtgccagcggcaccatcggtcgcgcggtcagcgaagaactgagtcagagacatgaggttatccgcgtcggccgcacccggggagattatcaggtggatatcacctcgcaggagagcgtcgaggcgctatttgcccaaacgggtgaagtagatgccatcgtctccaccaccggcaatctgcactttgggccgttaagcaccatgaccgacagccagttcaacctcggactgcaggacaagctgctgggacaaattcgcctggcgctggtcggccagcattttctgcgcgacgggggggcgattaccctggtcagcggtattgtcgcgcaggaacccattgctcagggggtcaatgccacgacggtcaacgccggtctggaaggctttgtccgcgccgccgcctgcgaactgccgcgcgggatccgcatcaatctcatcagccccaccgtgctcagcgagtcgctggcggcctacggcgactttttcccgggcttccccagcgttcccgccgccgccgtggcgcaggcctatcgccgcagcattgaaggcgttcagaccggccgcatctacccggtcggctactagcctgtgccggcccgccggggccggcgcttacatcaggccgtcgttgcaggtacactgacggctgattgtctccggccgaaaaactgatgttgaaaaaattatccttaattatcccgctactggcgcttatcgcgctgctggtctggtggttcaccccgcattacaccgaggaagatgaagcttactaccgggcggtattttgcataatcgatcatgacgacagccgccagttcctccacgatatgcagaatatcgtcgaggggggaaattctgactacgcgctgcataaaacccattaccttccggcgctggggcagcggatgctggatacctggcgccagctcagcccgcaggaacagcaggcgctgcgtcaggacaagcagcgctgcggcgagatattgcgcgaaaaacaacaggggaaatcatcctgacgagttggcaaaattgcagcatatcgccagcgtcgaataagattgtgctgttgatgaccggatcgctgtcacaaaatatccggtcgtcgtcgcgtcacagtacgacgttttttctgcggcggaatacgataaaaagtagttgatctggtacgaactaactcttattttgcttcacagttttcaaaatgagataaaactgatgcctgtcattattgccagtagtgttaaagaagccaaagcgttaattaacggtggaaaatacagggaaattattcttaacttcgatattgatgccgatgactttttctctctcgccagccattccgccggaactaaaatctccatcgccgaccgcaacgatcgctctccgggagaatcagcaaaataattaacccgcgagggacgtctatgtggttgtttattggaacctttgcgctggcttttctcgcagcgctgatgctggtctggctcgatgaccggatcgccgaaacggattgaccctgcgctggacgttaacgtcacgcagggctgcgcgccgccgaaaagcggcgcacagcagagacgttacagggaggccgccagccgctcaacggccgtcagcaatccggcttctgacaccgtggagtaagaaagacgcagggtacgggtatccggcttatcgtgatagaacgcttcacccgggacgtacaccacgccgttttccagcgttttcttcatccattccatggtatcgaacggatagcggaaacgcgcccacaggaacatccccccctgcgggcggctgaattccaggtgctcgccaaggcggctttccagcgcatcggccagcgccacgcacttcttgcggtagtcttcgcgaatcaacgcaatctggttatccagccggttcagactgaggtattccgcagtgatcacctgcgacagcatattggtatgcagatccgccgcctgcttcacaatcaccgtctgctgcgccagccagtccggcatgacgatccagccgatacgcatccctggcgcgaggattttcgaaaaagtcgaggtgtaaaccacctgatcttcacagcccagctcgacagcatgctgatagagcgggcgccgaacggcgtcagtaaagctaatttcgccgtagggatcgtcttccagaatgacgaaatcatattgtttcgccagctcaaccaaccggcgacgacgcgcctcgctcagcgttttgccgccgggattgccgaacgtcggcaccaggtaaacagctttgacgcgggtggtctccagcaggtcggccagctgctccaccagcatcccgtcatcgtcggtgtcaacgctgagaatattggcctgcgccagctgaaatacctgcagcgccgccagataagtgggacgctcaacgacgatagtatcgcccggatcgagcagcgtacgggcaacgatatccagcgattgctgggagccggaggtgatatagacctgggcggctgaacaggcgacgccacgggagtggcaaatttcactcaccgcctggcgcagcggcgggtagccttccgtcagaccgtactggaatgcgtcattaaaacgctcgctcatcaccttctgcaccgccagctccaggccttcggtatcaaacagttccggggccggaatgccgccgccaagcgaaatcacgccgggcagtttactgtgcttgagaagttcgcggacggcggagggcttgagttcacccgcgcgggcggcgagacgccgatcgtgcatactattttccttttctgtcttgttgttgtgttaattatcttggcttcgttgcaggtgctccccggcggcgcttaccatgccggggctatccttttcagtacgttgtcacccggacaggggtatgccgctacccgggtttcgtacgtcatgctttgtctttcaaaacgattaacggctcgatatcgctctcttttttcaccaccagcgacgaatcgccgcgcaggcaggtaccgccgtagttaccgccgacggtaaatgtgcacacctgaatgtacttaccgtccactttcggcaggcaccacagctgctggtagatattcttgcgatcgacaaactggccgctggtcttatccagaagttcatcctgagggccgatcaggtcgatattgttgccgcagcgcccggaaataggcttcaccgcatagccggttttcgccagctcgtcgttaacctcaaaatcggtatccagcagatagcgatgatgcgggaacagcgaccacagcaccggcagaatggctttgttgccggggatcaccgtccacaggggttcgaataccaatacttcaggacgcagcaggacgtcaatcagccgcacctcattctgcggatgtccggtacgaatcggtaccgccgcgtactcctcggcgctgacttcgcgcacctgctcaatggcggtttcccatgcccaggttttccagacgcagttgaccagccgcccgtcggcgtcgatcagctgaccggcagcgtcccagcgcagctcatcaaggccaaagagaattttgctctcaaaaccggcctgggtcagcgaacgctgaataaactgcgcgtggtagttctcttccagatccttgtcctgcatgatgtggacgaagggccgcgcccggctgtgtttccacgcccccgccagctcatcgagcagaccttccgccggattgtggccggtgccgtagtagccctgcttcagccactgttcgaggatcagcccgccttcggtatggcaggaagcggaatcggcattgtactcgtacaccttcagcccgcgctcgtccatgcaaaaatccatgcgcccggtgatcatatgatgacggcggcgctgccacgagaggcgcagacgaggccagagaattttcggaatatcgaacagcgccagcaggttgtcatccttcatcaccttatcggtggcgtgcagatacatcaggtgcagctcgttggtggctttgatcagctcctgttcggcactttcgctgatggtgaaatactgatagggatcctggttgatgaaatgaccgttggctgccacgtaggctttctgcagcgggtctttctcgttcagccatttaccgcgaaactggccgttgtttggcagccgcgcgcctttgatggccatcgcctcgcccggcagcaccggctgcggcaggctgtgttcggtatcggcggtctggatcatccagcctaaaatttcggtatcggtaaaggtatctttgatggtgtaccggccgtcgttgacctcgagggtcagctcgcgggtccactgctggccctgcggcagcggcgagtgaatcacgttctgctcggcgatacgcaccttattgtcgacaagctgggtgatcaccgccacatggccggtgtgcttaaactcgccccccttctgccagatcagcagcgaaccagcgataggcggacggcgggagccgttggcgaaggcctgcagcggcagaatattgtcattgaccacttcgcgcaggaaacgcagggagaagatttcataagccatccccacatcggtgaagacaaagccataggtcaggaacagaaagcggcgcgcaaactccacgcactgccatttatgccccatatactcattaccgatgtagctgcgaaacgtcgcgtcatccgggtagtcctgcggatttaagctactgtaattcgatgaataaatcgctacgccaccgggtgcatagcctaacaatgtcccaaacggggcgtcactgcttgtcgatcctttgctcatttagcctgacctcaaattaatgcagcccgggcagttggcgaaacaaaactccctcttcttatcctgccgcaggcacttaccagacagaggtgtaacgatgataccactcattcgtttcgctaatcgtgccgttaaggaaaataaccctgcagccggaaacaaaagtgatatcgttatcggtgatataacaaaaaaacaacgcaacatcaggagtcgacaatgagcacaccctcgcatctgaatgcccaaccgctggtctggggacacggcccgcggacgtttgaggtgttccttgagcccacctgcccctactctgtccgcgcgtttaataaactcgacgatctgctcgatgaggtcggcgccgataacgtgaccatcaagatacgcctgcagtcgcagccgtggcatctgttctccggggttatcgtccgctgcatcctcgccgcgtccaccctgccgcacggcagagagcaggcgcataaggtgatgcaggccgtggccgaccatcgggaagagtttgagtttaccgatcactgcagcgggccgaatatgaacgccacgccgcagcaaatcattgagcgcattgaacgctacagtcacgtgctgctgggggccgcctttgcccgcccggagctgcaggacgtgatcaagtggcacagtaaatacgcccgtcagaacggcatccatgtctcgccgacctttatggtcaacggcctggtgcagccggatctgggcagcggcgatgatgtcagcgtgtgggccgcgcggattatggcctgaggtcacctgctacactttttgtacatccacgaaaaaggcaaaccagcatgtcagagcaaaactaccagccaccaaaagtgtgggaatggaagcaaaacagcggcggcgcgttcgccaacatcaaccgtcccgtttccggcgcgactcatgaacgcgtcctgccggtaggaacccatccgctccagctatactcactcggtacacccaacggccagaaggtgacgatcatgcttgaagagctgctggcgctgggcgtcagcggcgcggagtacgacgcctggctgatacgcattggcgaaggggatcagttttccagcggctttgtcgagatcaacccgaactcgaagatcccggccctcagcgaccattccaccacgccgccgacccgggtatttgagtccggcaacattcttctctatctggcggaaaaatttggtttcttcctgccgaaagatcctgccggtcgcaccgaaaccctcaactggctgttctggctgcagggcgcggcgccgttcctcggcggcggcttcggccacttctataactatgcgccagtgaagatcgagtacgcgatcgaccgctttacgatggaagccaaacgccagctcgacgtgctggacaaacagctcgcccgcggtcgctatgtggccggcgaggagtacaccatcgccgatatggctgtctggccgtggtatggcaacgtagtgctgggcaatgtctataacgcggcggagttcctcgacgccgggagctataaaaacgtgctgcgctgggcgcaggatgtcggcaaccgcccggccgtcaagcgcggacgcatcgtcaaccgcaccaacggcccgctcaatgagcagctgcatgagcgccatgatgcccgagactttgacacccaaacggaagataagcgccaggcgtaaggtcttcaccctttcccgtggacgggaaagggttcccaccacaggacggttccgcctgcgaagccgtcctgtttagctttccagccgatagcccgccagaaaatagcgcatcgccatacccgacccaccttctttgaagaaatccatcaccatatctctgtcaaggccatagcgacgggtgaggatccccgcctcccacgcgctgagctgacggtcaccggttttttcaaacatgcggtgcgagtagccgagcacaaacccgcgtttatagtcggcgcaaaaattcgccgcatgcgcggcggtgtcagcataggatgcctgtagccccgccattaagcctttgccaaaatgattttccatcgcgccctcccaatcgttatataataaattatatagcgtttttttgagcgagcggtagcgctatttatgacggttgcgctagcgtaaatacttctcaaaccatgccagcgtgcgttgccaggccagatcagccgcagtccgatcgtagcgcggcgtggaatcattatgaaagccgtgattcacgccctgatagaaataggcctcgtagactttatggtgttccttcaacgcctgttcataggcaggccagccttcattaatgccgctatcgaggccggcatagtgcagcagcagcggtgctttaattttatcaacctccttcagcggcggctggcgaccgtaaaacggcaccgcgcaggccagctccgggatcgccaccgccgccgcgttgctgacgccgccgccgtagcaaaaaccggtgataccgaccttccccgtcacctgtggatagttcgccataaacgcgaccgccgcaaaaaaatcattcatcagcttcacgggatcgactttctgctgtagggcgcggccttcatcatcattccccggatagccgccgacggcgctcaggccatccggcgccagcgcgatgtaccccgctttcgctacccgccgggctacatcttcaatataggggttcaggccgcggttctcatgcaccaccaccacagcgggcgctttgtcggctatttttgtcggcgtcaccaggtaagcccgcacttcgccgtgaccgtcaggagagggataatgaatatactccgggcggatatccgggtcggtgaacggtacctgctctgccagggcatagtcgggcttcagcagattaaacagcgccagcgcggtcatcccgccgacagtatatttccccgccagctggagaaactcgcgtttactgattttgccgtgggcatagtagtcataatactcgagcaactgctgcgggaaatctttggccgttaatcgcgtcatcaccctgcctccgttgttaagcgctctttaagcaaagcagaagcccggacatacgccagcccagaaaagcataaaacggggaggaacagcccagcggctaacaccgccgggagagaagggatcagtgtttcactttggtcagacgatcaaggtagcccatcacaaaggccgaaagcacgaaggtcaggtggataatcacgtaccacatcagcttattgtccgggacgtttttcgcatccataaacacacgcaacaggtgaatagaggagatcgccacgatggaggcggcaaccttatttttcagcgaagtcgcgtccattttgcccagccagctgagtttttctttaccctcgttaatatccagctgcgagacaaaattttcatacccggagaacatcaccatcaccagcaaaccgcccaccagggtcatatccaccagcgacagcagggtcagaatcatatccgactcactgacgctaaaaatatgcggcagtatgtggaagatctcctgaaaaaatttgatggtcagcgcaatcagaccgagcgagaggccaaaataaaccggcgccagcagccagcgcgaggcgtacatagcattttccagaaagcgttccataagatcctgtcagttaacataaacggccgccattatatcgcaacagggtaacgcttatgcaacatcagccgcccgcgtcatccgcaggcggccagaaacggtttctttaaagtatgacctcaaagtcctgcaaagcggagtagccctcgctttgtaggccaaccattgaagcagccagcaggccaaatttcgcaccgacccattttcccttcccggcagcaaaacaaagaggaaccttccgccactcctcctcggctcgccaggaaaattgacacaggccgccttcgcctacggccacctgcagctgacacttgccgcacttaagctcagcaagaacctgacgagtttcgcgcaccacgcccgcatcgctcatccaaccgtgtcgccacacgagccggtaacccccttgcccaaactccaccagcaaagcggcgtagcgttcgccgtatacgatcaggcctccggcatcaccgtcctgagcggcatataacgttacgcttgttttcgcgctaaaagttagcgccgggaatttctgcagcaacagctgcggcgcccagtataacgctctctgtccatcgacttcggataatgggacgcggcgtaatcgaagttcgccttccgccggcagcagccactcagggctggggttagcctgccactgccactgtattcccggttggccttgcgcaaaatagtcgctggtttgcggcgccattgccggtgaaggcgttaaccctttaggacgcggccaacgtaaaaccggctgtccgacgccgccgttgccaatctgctcaccgatacgcggccagccatcgttaccccaggacatcggctggaggtgaaccacgcggccatagaggtgtaagtcctggaaatgaacaaaccagcattcgccctcctcaccctccacccagccgccctgatgtggtccgtttatcgaggtgtttccctggaaaagcacgtttttggcttcccaggcccccgtcatctggcgcgcgcgcagtaccgtctgccagccattttcaaccccgcccgcaggagcaaagatgtagtaccaaccggcgcgttgataaacctttggcccctcaagggtaggtaaatcgcagcagccgtcatagataatctgcccttcgcccagcaattcgctggcgtccggcgccatcgcaaacaactgcagtttatgcttgatgccgctgcggctatgggcgaaggcatgtaccaaccaggcctgaccattgtcgtcccagaacgggcagggatctatccaacctctggcctcgcgcaggcagtgcggagcgctccattccccccacggatcctcggtatggcagataaaaataccttcatctggcgtgctgaagcagacccacagcttgccatcgtgccagcgaatcgacggcgcccatacgcccttacccggctgataccggtcataaccaggtagcggcagttcatccataacgtggttgatgatagtccaattaaccaggtccgttgaatgcaggatcggtaaagcgggcacatggttaaaactggaagagaccataaagaaatcatcgcctacgcgcacgatatccgggtcggaataatcggcgcataagataggattctggtattcagaaggggtcatatttcgcatctcctcaggccttttccggaacggcgtttagcggcaaatgcgtctctgaatgcccctgctgctgacgcatggacagctcgcgctgaattgtctgcatcattttgtcatccagcttatagaaacgcgccagccaccacaggagcaggtaagatagtgatggaccgagggttaacagccccacaattcccattgtcgccagcggagtctgcgccgttacgcccgcctgatagccaaatagcccaagcgaaaaacctacggcggcgccagcaaccgccatgcccattttcaaagcaaacagattaccggaataggataatcccgtgatgcgacggccaaacttccattcgccataatcggcagcgttggccatcatgttccatttaaacggctggtacatctgatggaagaagccgaccaggaagtataaagggaacaccaccggcagccaggtcggcggcacaaagaacattacgacgccaaccaggaccagcaggaggttgatatttttaaacagcgataccgcgcgatagcgcttggccagccatccggcggcgatgctgccgataatcgtgccaacgacactggtggaaacaaatgctgatttcatggccgttcccgccgctgactccacaccgcctaacatcaggtaggttgcataatagagcgtggcggcgctgcgcataaccccggccatactggagaaaaaagtaattatcgccacaatacgccactggtcattcgccagcagctgacggaggtcttcgcgtatgctcccctgctgttcaacagctggagccacgcgttctttggtagagaagaagcaaaaagccagcattacaatagcgatcgcgcccatgattcccattgtcgcctgaaaaccaaactgcttattttctttaccgaaaaaatccaccaggaacagggttgcgacagaaaccatcagaccggccagagatgagatcgtaaaacgatatgactgggctgaaaggcgatccttctcatcacgcgtaatgactccgcccaatgcgcagtagggaatattgataaaggtgtaacacagcatgagtaaggtgtaggtcaggtaggcataaaccagtttacccgatgcgccaaattccggagtcgtgaaggtcattaccgccagcacggcataaggtacggcaaaccagataagccacgggcgaaaatggccccagcgggtctttacacggtctgcaacaatgccggttagcggatcggtaatcgcatccagaacccgcgtcaccaggaacatcactccgactgcggcagcagaaagcccgtaaatatccgtataaaaccatgtcagaaacatggttaccgaagagtaaacgataccgcaggctgcatcccccatgccatatcccagcttctccgcaaatgacagtttattatcgtgattcacaatataatccctctcagatgaagtggtattcactgtagaggcaggataaaaactatcctattgtcatttttcgcatcgggtttatgttttctgttaactgagaaagttgtcacacatctataagattggtcttacaagttattgcgtcacctattaaaaagctggcgcaaggccagcctgaggagaaaagtggaaagggggaggttacttcgctttgacggtctcttcgcccaccagcccgatcttgagatagcccgcctgatgcagggtatccatcactttcatcatcgtctcgtaatcgacggttttatccgcgcggaagaagacggtggtatcttttttgccggcggtcaggctatccagggcgttaatcatattcgcttcggtaaccgggtcgttgccgaggaacatgctcttatccgccttcaccgacaggtagatgggtttttccggtcgcggttgcggctggctggaggaggctggcagattgaccttcacgtcgaccgtcgccagcggcgcggccaccataaagataatcagcagaaccagcatgacgtcgataaacggcgtcacgttgatctcatgcatttcgccgttatcgtccaggttttcattaagacgcatcgccatagccgatcaacctacccgtaatttctgcgcgctgcgcaccggcttcacgccgctggcgctgaggtccagatcgcggctttgcagcaggagtacctgagcggcgacgtcgccgagcgaggccttgtagctgccgatcatgcgggcgaagatgttatagatgaccaccgccgggatggcggcgaacaggccgatggccgtcgccagcagcgcttctgcgatgcccggcgctaccaccgcaagattggtggtctgggtctgggcgatgccgataaagctgttcatgatgccccagacggtaccaaacaggcccacaaacggggaaatggcgccgatggtcgccaggtagccgttaccgcgccccatatggcgaccgaccgccgcaacgcggcgctcaaggcgaaaaccggttcgttccttgatgccttcattgtcttcggcaccggcagagagttcgagttcgttctgcgcttcattgataagctgggtggtgaggcttttcgcctcaaaggcgctggcgatatcactggcctgatcgagagagcgggcttccgccagctgctgctgttcacgtttgaggcgacgcttgctggcgaggatttccgcccctttaccgaagaagatggcccatgtgacgaccgacgccagaatcaggccaatcatcaccaccttaacgacaatatcggcatgatgatacataccccaaacggagagatccgcctgcatcaaattattacccacgctctatctccacgacgataatcacaaaatctgcccacaataatatcaaaacgacatcgaattgatagtggttctcattagtatttacactgtgcagcaaatcacgtttattttccttgcgcttacgcagtaaaaaagcggctaaccgcgggcctggtaaaattttcgcctgtatcggcggtgcgctggtacagaaaagcagattcatgttagtttagacgtccagacgtataaaaacaggttcgtcaacatggctgataaacatcttgataccgcgctggtcaacgccgggcggagcaaaaagtacacccagggctcagtgaacagcgttatccagcgcgcgtcatcgctggttttcgacaccgtcgaggccaaaaagcacgccacccgcaatcgggccaacggcgagctgttctacggtcgtcgcggcaccctgacccatttctcgctgcaggaagcgatgtgcgagctggaaggcggcgccggctgcgccctcttcccctgcggcgccgcggcggtggctaacactatcctggcgtttgtcgagcaaggcgaccatgtgctgatgaccaataccgcctatgagccaagccaggacttttgtaccaaaattctcgccaaactcggcgtcaccaccagctggttcgatcccttaatcggtgccgatatcgcccgtctggttcgccctgagacccgcgtggtgttcctcgaatcgcccggctcgatcaccatggaagtgcacgatgtgccggcgatagtcgccgccgtgcgtcaggtcgccccggaagcgattatcatgatcgataacacctgggcggcggggatcctgtttaaagccctggattttggcattgatatttccattcaggcaggcaccaaatacctgatcggccattccgacgccatggtgggcaccgcggtggcgaacgcgcgctgctggccgcagctgcgtgaaaatgcctacctgatggggcaaatgctggacgccgatactgcctatatgaccagccgcggcctgcgcaccctgggcgtgcgcctgcgtcagcatcatgaaagcagcctgcgcatcgccgagtggctggcgcagcacccgcaggtggcgcgggtaaaccaccccgccctgcccggcagtaaaggtcatgagttctggaaacgtgatttcaccggcagcagcgggctattctcgtttgtgctcagcaagcgcctcaatgatgccgaactggcggagtatctcgacaatttcagcctgttcagtatggcctattcgtggggcggctttgagtcgctgattctcgccaaccagccggagcaaatcgcccacattcgaccggatgctgaagtcgacttcagcggcacgctgatccgcctgcacattggtctcgaaaatgttgacgatctgcaggcggatttagcagcgggcttcgcgcgtatcgtgtaaagtgacagtcagtggcaacaatagcggacgctttttagcaaagcggccgcttttgttgcgcccgggatcaaggtgctcgggcctcttcaggagtacactagtcaacaatacggtaccacttaggaaagtccatggttgtcattcaagagattgtcgccgcgctgtggcaacatgattttgccgcattggcgaaccctcacgttgtgggcgttgtatatctggttatgttcgcgaccctgtttctggaaaacgggctgctgcccgcctcctttttaccgggagacagcctgctgctgctcgccggcgcgctgattgctaaaggcgtcatggactttgtgcccactatcgccattctgaccgccgccgccagcctcggctgctggctgagctatgtgcaagggcgctggctgggcaatacgcaaacggtgaaaggctggctggcgcatctgccgcataagtaccatcagcgcgccacctgcatgtttgaccgccacggcctgctggcgctgctcgcgggccgttttctggcgtttgtccgcaccctgctgccaaccatggccgggatttctggcctgccgaaccgccgcttccagttcttcaactggctgagcgccctgctgtgggtctgtgtggtgacgggtcttggctatgcgctgagcatgatcccgtttgtgaagcgccatgaagatcaggtgatgacctgtctgatgatcctgccgattgccctgctgctggctggcctgctcggcacgctgttcgtggtcattaaaaagaaatattgcagcgcctgacgcttacctgccggggggcctgcgcccgcccggccgccctttcccggtattacatcccctgcatcgtgcgaatacgcgcggcgtcttctcccggcgtcaaaccgaagtagcgcttaaactcgcggctgaactgcgaagggctttcatatcccacgcgcatcgccgccgcgctggccttcatgccgtcatggatcatcagcattcgtgctttgtgcaaacggtagtttttcagatactgcaaaggagaagtgctggtcaccgctttaaaattatggtgaaacgctgacacactcatattcgcttccgccgccagccgatcgacgctgaggttttcggtgtactggctttcgatatgcttgagcacgcgacttatcaggctgaagtgggtctgccggctgaccagcgccaacagcgcgccgccgcagggccccgtcagcacataatacagaatttcgcggacgatttgcttgccaaggatccgtgcgtccagcggccgctccatcacgtcaagcagccgttcggcagcgcacagaatatcctccgagagtaccgcggagtttatcccgctggaggcgaccgcgggctgaaacagcggatcttcgccaatatccatcagcagctcttgcagttgcaggatatcgacgttcaggcgcatcccggcgaggggcacctccggggtggcaaaggtttcgcactcgaaaggtagcggcacggtcagcagtaaatattcgtttgtatcgtagcgaaaagtccgttcattgatataaccaattttatggcccgaaaagagaaaaacgatccccggctgatacatcaccggcgtccggggccccggttgcgttccgtacagcaaacggacgtcaggcagcaacgaacttaacatttcgtgcttatctttcagcaggttaatcttctccgttaatgtccgacatatctctgcgtgttgcattgccaccgtctctcccgatgtttcttcacctgtacattgtgcgcaggccgctacaaattctccagccatatggagaaataggcaagacatcggcaggaatgtgcattgagggtcaacggcgccaggaccacaataaccttcatcgggcagcggtatcgtccctgtcgacggttttactctttggaggacttaagcaatgaataatttcgacctgcataccccaacccgcattctgtttggcaaaggcgcgattgaaaagctgcgtgaacagatcccggcggaagcccgcgtactgatcacctacggcggcggcagcgtcaaaaaaacaggcgtcctggatcaggtcctcaccgctctgaatggcctggatgtccttgaatttggcggcatcgagccgaacccgtcttacgaaaccctgatgaatgcggtgaaactcgcccgggaagagaaagtgaccttcctgctggcggtcggcggcggttcggtgctggatggcaccaagtttatcgctgcagcagcccactacgacgcggatatcgatccgtgggaaattctggaaacctatggcagcaaaattgccagcgccattccaatgggctcggtactgactctgccggcgaccggttctgaatccaacaaaggcgcggtcatatcgcggcaaaccaccggcgacaaacgcgcgtttatgtcttcgcacgtccagccgcagttcgcgatcctcgatccggtttatacctataccctgccgccgcgccaggtcgcgaacggcgtggttgacgccttcgtccataccgtcgagcagtacgtgacctacccggttgacggcaaaatccaggaccgcttcgccgaaggcattctcctgaccctgatcgaggatggcccgaaagccctgcaggaaccggagaactataacgtgcgcgccaatattatgtgggcggcgacgcaggcgctgaacggcctgatcggcgcaggcgtgccacaggactgggcgacgcatatgctcggccacgagctgacggcgatgcacggcctggatcacgcccagacgctggctatcgtgctgccggcgctgtggcatgagaaacgcgatgccaagcgcgagaagctgctgcagtatgccgagcgcgtgtggaatattaccgaaggctctgacgaccaacgtatcgatgccgccatcgccgcaacgcgtcagttcttcgagcagatgggcgtgccgacccgcctttccgattacggtctcgacggtagctccatcccggcgctgctggcgaaactggaagagcacggcatgactaaacttggcgaacatcaggatatcaccctggacgtcagccgccgtatttacgaggctgcacgctaagcgctccccgcctgattcacctctccttacgttaaacaaacgccggggagaggtgtttttactaccgtttttagctatttcgtccagacttaatgctacccctcggcggatcctgcttcgccgagttcattaacaggaggaaggcatgacacatccaaccgttataaaactgcacgacggcaacctgatgccgcagctgggtctcggcgtgtggaaagctggcaacgaggaagtcgtctccgccattcataaggcgctggaagtcggttatcgctcttttgacaccgccgccgcgtaccaaaatgagaccggcgtcggcaatgcgctgcacagcgctggcgtcaaccgcgatgagctcttcatcaccactaagctgtggaacgacgatcaaaaacggccgcacgaggcgctgaaagagagcctcagcaaactgaagctggactatgtggatctctatttaatccactggccggtaccggctatcggccattacgtcgaggcctggcaggcgctgatcgagctgcagcagcaggggctgaccaaaagcattggcgtgtgtaatttccaggtaccgcatctgcagaagctgattgatgaaaccggcgtcgccccggtgatcaatcagatagaactccatccacttatgcagcagcgtcagctgcacgcgtggaacgccacccacaagatccagaccgaatcctggagcccgctggcccagggcggcgaaggcgtcttcgatcaaaaagtcatccaccagctcgccgataagtacggcaaaacgccggcgcaaatcgtcatccgctggcatctcgacagcggtctggtggtgatcccgaaatccgtcacgccgtcgcgtatcgcggaaaactttgacgtctgggacttccgtctcgacaaagatgagctgggagcgatcgcgaagctggaccagggtaaacgtctcggtcctgacccggatcagttcggcggataatgctctctcttgccatcgcctttagcgcctcggcgttaaaggcgatcgcagaccagatgaatatcctctggctccagcgcaaacagcgccgggtcgggcttatccgctaagcgacatccctgagccagataaaaatcgacggtgtttttgttggggatcgacgagatatagaggccggacgcccccatttctggcagctggtgcagggcatactgaaacagtcgccgcccccagccctggccgcgctttcccgccccgacataaaagaataatagctggcgcagctcgccattcatgccgcgaggcagcgtatccagcgccgctgcggcaatcatctgctcatcgtcaaaaaaggcgaaaaaaataccgccgcgatcgtaacaggcctcgtgaatcggagtataaacctgacgatcgtgagggtcccagccacgcacgtcataatattcccgataagcccgcagctgaccgttatcgagacggtagagcgtatcgataatttcgctgcggtctatctcccagagctggtccagttgttgtcgcgacaggatgaccggcgtcatcacctctctccttttttcacagatgttcccggcgagcgatcccgccgggccagccgcttagcgtgatacggccttcggcttaacgcgttttttcgcgcccgcagcggcaggcgtctggcgctgatgggcgatcggcgtgtgcttggtcagcgccggacgagtatggcggttctggcgacgcgcttcacgcatttcgtccagggttggcgctggcaccaggcagtcgcgacgggagccaatcaggtgcttcttgcccatcgcctccagcgcctgacggatcagcggccagtttgccggatcgtggtagcggagcagcgctttgtgcagacggcgctgtttatcgcccttcggcaccaccacctcttcgctcttattaccaattttacccagcgggttcttgccggtgtaatacatggtggtcgagttcgccagcggcgacggatagaagttctgcacctggtcgagacggaagcgatgcttcttcagccacagcgccaggttcaccatatcttcatcacgggtccccggatgagcggagataaagtacgggatcagatactgctctttacccgcctgcttcgaataggtgtcgaacagctctttaaagcggtcgtagctgcccattcccggcttcatcatcttcgacagcggtccctcttcggtatgctccggggcgatcttcagatagccgccgacgtggtgggtcgccagctctttgatatagcgcggatcttcgaccgcgatgtcatagcgtaccccggaggcgataaggatcttcttgatgcccttcagctcgcgagcgcggcgataaagattgatcgtcggttcatggttggtatccatgtgtgggcaaatatccggatagacgcaggagagacggcggcaggtctgctcagcacgcggcgatttacagcgcagcatatacatgttggccgttggcccgccgagatcggagatcaccccggtaaagccgggcacggtgtcgcgaatggcttcgatctcattaatgatcgaatcctcagaacggctctggattatgcgtccttcgtgctcggtgatcgagcagaacgaacagccgccgaagcagccgcgcatgatgttgattgagaagcggatcatctcatacgccggaatacgcgcatcgccataggaaggatgcggcacccgcttgtacggcagcgcgaagacgctgtccatctcttcggtggagagcgggattgccggcggattgatccagatgtagcgctcgccgtgcttttgcatcagcgcccgggcgcagccggggttggtttcgtggtgcaaaatgcgcgaggcgtgagcgtacaggaccttatcgcctttcaccttctcgaaggaaggcagcagcacataggtgttttcccacggtttgggccgcggcggttgcacagtaatgcttttcgcttcctgttttttcggcgcgcccggtttgttatcggcgcacggcagatcttcaccgtacggatgcgggatggggtcaattttaccgggcgtatccagacgggtggagtccacgccgctccagcccggcagcgcctctttcaccatgatggcggtattgcgcacatcgcggatctggtcgatggtttcgcccatcgccaggcgatgagccacttccaccagcggacgctcgccgttgccgaacatcagcatatcggccttggagtccaccagcactgagcggcgcacggtgtcggaccagtaatcatagtgggcggtacgacgcaggctggcttcgatgccgccgaggatcaccggcacatctttccacgcctctttacagcgctgggtatagacgagggtagcgcggtccggacgtttgcccgccacgttacccgccgtataggcatcgtcatgacgtagtttacggtcggcggtgtaacggttgatcattgagtccatgttgccggcggtcacgccgaagaacaggttcggttttcccagacgcataaagtcgtctttgctgttccagtccggctgggagatgatcccaacccggaaaccctgcgcttccagcatgcggccgcagatagccatcccgaagctcgggtggtcgacataggcgtcgccggtaaccagaataatgtcgcagctatcccagccaagttgatccatctcttcacgcgacatcggtaaaaaaggcgcagggccaaaacaggcagcccagtattgcggccaggaaaaaaggtcacgatccggttggatcagggatattgcgctcatattgcttccggggaaaatgataaaaaaataaccaaaagggcgtggattataagccggaatgatagtggaaatgaaggaggattttctcaaaccctgaccgtgcgccggccagggtcaaagagattacggcgcgggattcaccagcatctggccgatcgagccgcgatcggcaagctccagcgtctggctcagatactggaacgggaagtgcggccacgacggttgagcgtaatagaccagcagctcaacctgcccgtcgacccacacggtgtccttccagccgcgatcttccgggaaaggagacgagccgttgacattacggatctggaacatcaccccttcaatatggaacgactgcgggcggtcggcgcgcaccgtccagcgctcccaggtcccctgctgcgccgtgatatcgatacgctgcggatcccacagctggccgttgatgcccggatcgtcgccaagggtgatatcccggctgcggatcggcgtaccggagagcagctcggtcggcagcaggcgcaccggcagactgtcggtcaccagcggcagcagcccggtcggacgcagcgtcagcaccagcgtggagaccaggatgcttgacggttcaaaaaaaccgcggatacggtcgacgatgctcgccgcttcgccgcaggtaatggatacttcatcgccgttagtcatatcgaccagaatttcacgccgctcccccggggccagcgatagctgcttgagcgaaaccggcgccggcaggaatccctgatcgccggaaatcacatgcagcagtcggccatcgctcatctgcagctgatagcgccgggagttggaagcgttcagcaggcgcaggcgcacccagccgcgcgacacttcaacatacgggctctgcacgccgttaaccagcagcgtgtcgcccacaaagccgccgctgcccggttcgctatattccggcgtgccgaagttatccagccgtttatcctgaataatcaccgggaagtcatcgactccatagtggttagggatcggcaggttcttgctgacctcgtcttccaccagccacatgccggccagaccgttgtaaacctgtttcgccatccggttcggcgtgttggcctgataccacagcgtcgccgcgctctggcggataggcagcaccggcgcccagtcggcgttcggcgacatcatgcgcgccgcgccgccaatcagcgggccaggcacctgcagaccgcggatggtcatcgccacgttctccgtcaggcggttgctgtagataagcttgacgtcgtctccgttccagacgcggatcgtcggccccatatagcggccattgatcccccagacgggggcgcgggtgccgggggtaaacgaccagtgggaacgctgcagcgtcagaaacagcggctggccgcgacgagattccagcagcggcggaaccggcagcgcaggctgctggccggcggcatgggccttcagcggcgcggcgccagcgcacagcgctacgccggaagccttaataaactgacgccgactgagtgacatattaactccatgacatactgacaaatgaaaaagggaattcgtttcccgccagcaatacgcgcgcgttggcggcgtttcctgtcttattgctttccagccgcttcgcgctcggccacttcgttgtccagatcagcgattttggcggccatcagctcgcggcaatgcgtcgccagcgcacgcacgttgtctttaccaaactgagtggtatctaccggcggcagcatttccacaatcaccagaccgttgttccagcgattgagctttattttattcgatgtattcgagacacacaccggaataatcggcaccccagcggcaatagccgcgtgaaaagccccggttttaaacggcagcaggccgcggccgcggctacgggtcccttccgggaacatccagaacgaaattttacgctttttaaaagcgttgacgacttcggcaatagtgccgtgcgctttggttcggttattacggtcaatcagcaaattgcccgtcagccagtacagttggccaaagaacgggatccacagcaggctctttttacctacggtgaccgtcggagcctgcacgatattcgacgccgtcaccatatcatagttgttctggtggttagcgatgtagatcgcgttgccatagctttccgcgtcggcgggtttgcgtagctctaccttgaggccaaataccggagataaacggccaaacagatggccgaaagtggcaacgtgttttggattacgtgggctgaacaagcagtacagacagccaagtacgcacactacgatgcaataaatgaccacgaaaattactcgaaaaatgaatagcatagctacctctaaaacccaaaccgcttagaattattcgctgctggcagaaggcaggctcacaagttctgcgcaggccgggaccgttcttcctgggtccctgatgatggacattgttaatcgcaacgcctgaataaacaacgattttgcggcattttttcgtctcctcccgtcaaagacgggaggagacgcgcttactcttcgctatcgcctgccgcggcacgacgcggcgagtcaatttccacgcggtcaattttctgcagcccgcgcatcagcgaaccgcggcggccgcgctcgccggtgactttttgcagctcttccggacgcagtttgatcttccgtttgccgacgtgaatggtcagcgtactctgcggcggcagaacaaacagatgtgccagaccgtcctggccggctgcggcttccgccgccggaatgctgataattttgttgcccttgcctttcgacagctgcggcagatcgctgaccgggaacatcagcatccgcccggcggcggtgatggccagcagcatatcggactcatcctcaatcaccagcggcggcatcacgtgcgcgttgtcaggcagggtgattagcgctttcccggcacggttgcgcgccaccagatcgttgaaggtacagacgaaaccgtagcccgcgtcggaagccatcagcagtttctgatcgtcgctttccattagcatatgctccacggtcgcgcccggcggcagggtcagtttgccggtaagcggttcaccctggccacgcgcggaaggcagagtaatcggatcgatggcatagctgcgtccggtggtatcgataaacaccaccggctggttgctcttgcccttcgccgaggctttccagctgtcgcccgccttatagctcaagccctgggcgtcaatgtcgtgtcctttggcgctgcgcacccagcccatctgcgacagaacgatagtcaccggctcagacggcagcatgtcatgttcgctcatcgctttcgcttcttcacgctcgtgaagcggcgagcgacggtcgtcgccgaaggcatcggcatcggcctgcagctcttttttcagcaggttgttcatcttacgttcagacgccagaatcgcctgcagctggtcgcgctctttttccagctcgctctgctcgccgcggatcttcatctcttccagtttggcgaggtggcgcagttttaattccagaatcgcttccgcctgggtttcgctgatgccaaagcgcgacatcagggccggcttcggttcatcttcagtgcggatgatctcaatcacttcatcgatattaagaaacgccaccagcaaaccttcgaggatatgcaggcgcttcagcactttctctaaccgatggtttagacggcgacgcacggtatcgcgacggaacaccagccactcgctgaggatctccagcaggtttttcaccgccgggcggccgtcaaggccgatcatattgaggttgatgcggtagctcttctccagatcggtggtggcgaacaggtggttcatcacctgttccatatccacccggctggagcgcgggacaatcaccagacgggtcgggttttcgtggtccgattcgtcgcgcagatcgtcaaccatcggcagctttttattgcgcatctgcgccgcaatctgctccagcactttggcgccggagacctgatgcggcagcgcgctgatcaccaccgcgccgtcctctttactccacaccgcgcgcatgcgcactgagccgcgcccgttctggtagattttgcgaatttccgcccgcgaggtgatgatctccgcctcggtcgggaaatccggcccctgtacgatatccagcagttcgtcgagggtggttttcggctgctcaatcagcgtaatcgccgctttggccacttcccgcaggttgtgcggaggaatatcggtcgccatgcctaccgcgatgccggtggtgccgttcagcaggatgttcggcagacgcgctggcagcattttcggctcctgcagcgtgccgtcaaagtttggcacccagtcgaccgtcccctgccccagctcgctgagcagcagctcggcatacttcgacaggcgggattcggtgtaacgcatggcggcgaaagatttgggatcgtccggcgccccccagtttccctgaccatccaccagcggatagcggtaagagaacggctgcgccatcagcaccatcgcttcatagcaggcgctgtcgccgtgcgggtgatatttacccaacacgtcgccgacggtgcgggcggactttttgaatttcgcgctggcgttcagccccagctcggacatcgcatagacgatgcgacgctggaccggttttaagccatcgccaataaacggtaatgccctgtccatgatcacgtacatggagtagttcaggtaagcattttccgtaaattcatgcagcgcaaggcgctctgccatatcgctcattaatcgtggatcctcaatctgggtaccgaccgttcggacggcaaaactacccgcgataatacccgatctcacgccctgagtcacaggccgtgagatcggctgaggattccgtcacgcttaatcaggccagcggcagataaatatcggtttgcagttcatgctcagccacctcatggacaaaattgaggtaacggaagtacaccggaaaatcccgtaacgtctcgcctgaagcgggtaaccagtcgcgatagagaaaccaaacgctgttcgccagcgtgtccagcgagccgtgatggcgcacgacggcgcagcgtcctccggggatttcgccgttaatcacgccaaaggcgttttcaccaaccggccaatcgaccgtaccgcagatatcaaaacgaaatgcctcctgcggggtggtctgcggatcgtcccaggcgatcccccaggtatagctggtggcgacgggcgataatccgctcgtcttacgccaggcgataaaacgcgcggcggtggcgttgacaaggtccgggctaccgcgatgttgcagtacggctatccgggtggaggggcacgaaataatgttgacgtccatcgacgtttgctcctgtagcgtatgtttcggtacgcgtcgatgccactcggcccagtccggttgttgacggaattgggtcgggctttggtcaaacgcggtacggaaggcacgactgaacgactccgcattctgaaatccggcatcaagggcaatatcgatgactttatcgcgggggttgaacgccaggcgccaacaggcgcgtcgcagacgcaaccactgaatataccggtacaatggaatgccggtataggcgctaaattgccggtgaaaatggtaaggcgaactgtgcgctatcgcgctcagcgtctccagcgacagcggctcatcaagatggcgcgcaatgtacctacagacacgctggaagcgcccgacatacgccgggctggccttaatatcgttcatcgtctcctcctcgcgacatactctgacagagcgaggatcgcgattcctgaccgatcttgcgcttatccgacggagacttatggcgcgattttacggatctgtttaacgtcgatttctaccgagttccagtccttatcgacttccccctgaatttctactgtgtcctgcgggccgacggtcacgccgttccagcgcttgtggtcgatatcgacattgatcaccccggaagcatcctggaatttatacaggtcatcagagatgcgctcgacgattttaccgcgcagggtcacccaggtgtcatcacgcagcgacttggcgttcgccacggtggtcaccgcgccgctcggcccggtgaagccgccagcctgggtggtagtggtagtagacggtccggtgaatcctccctgcccggcggccagtaccggcatggaaaccaaagcaataatcgcggtcatcgcagcaatttttttcatcttatattctcccttttgtggtggtatggctcctattacgcccgacaaaacttaacgacttcttaagcggaaaaaagaaattttaatgctgtacatcacccgcttcaacgcggtttactgcgcaaagaaacgggatcgtcggagggaaacatgcgcatattactggtggaagatgacaagcttatcggcgacggcatcaaagccgggctgagcaaaatgggctttagcattgactggtttaccgccgggctggagggcaaaaatgccttatacagcgccccctacgacgccgcaatccttgacctcaccctacccggcatcgatggcctcgatattctgcgcgaatggcgcgataaaggccgccatgagccggtgctgatcctcaccgcccgcgatgccctcaaccagcgggtggagggcctgcgcctgggcgccgatgactacctgtgcaaacctttcgccctgattgaggtggcagcgcgcctcgaagcgttgatccgccgcgcgcacggccagagcagcagcgaactgcgccacggcaaggtgatcctcgatccgaaccgcttaaccgccagcctcgacggcgaaagcctggcgctgaagccgaaggagttcgccctgctggaactgcttatgcgcaacgccgggcgcgtattgccgcgtaagcttatcgaggaaaagctctacacctgggacgacgaggtctccagcaacgccgtggaagttcacgtccatcatctgcgccgcaagctcggcagcgactttatccgtaccgtccacggcatcggctataccctgggtgacgcatgaaacgacttgcccgcctgagcctgcgcctgcgcctgacgctgctgtttgccgtactgaccgccgccgcctgggggatggccagcgttatcgcctggcagcagaccagcaaaaagctggataagctgttcgatacccagcagctgctgttcgctcgccgcctgagcgtcatgcatttcgatgaactgcgcgccccgcccgcctcgctcggggaaaagaaaaaggtacgccacgggcacatcgacgacgacgcgctggcgttcgccatcttcacccgcgacggcaaaatggtgcttaatgacggcgagaacggagaggatattcagtggaattcgcagcgcgagggattcagcgatggctatctgcgtgacgacgatgacgagtggcgtttcctgtggttaaccaccgccgacggccgctaccgcatcgccgtcggccaggagtgggattaccggcgcgaaatggcgatggatatcgtgacctcgcagctcaccccgtggatggttgccctgccgctgatgttcgtgctgctcatcgtgctgttaagccgcgagctggcgccattgaaaaatctggcgcgcacgctgcgcctgcgcgcgccggactcggcggattcgcttagcgtggagaagatccccgccgaagttcgcccgctggtcgaagcgctgaatcagctgttccgacgcactcacgacgccatgctgcgcgagcgtcggtttacctctgatgccgcccatgagctacgcagcccgctggcggcgctgaaggtgcagaccgaagtcgcccaactctccctggacgatcccgaagggcgtgagaaagcgttggatcagctccaccaggggatcgatcgcgccacccgactggtggatcagctgctgacgctgtcgcggctggactcgctcgcccaactggatgatgtgcagcaggtcgctatcgccgatctgctgcagtcggcagtgatggagatgtatcacccggcgcagcagtccgggattgagctgcgcctgcatcttaatgccagccatatcgtccgcaccggccagccgctgctgctcagtctgctggtgcgcaatctgctggataacgcggtgcgctatagcccgcgcggcagtcaggtcgatatcacgctcaacgcccgcgagttccgggtgcgcgataacggcccaggcattagcccgcaggcgctctcgcgcattggtgagcgtttttatcgtccgccggggcaggaggcgccgggcagcggcctgggcttgtcgatcgtccggcgcatcgcctcgctgcacggcatgcaggttgattttgccaacgcgcgcgacggcggcttcgaggcccgcgtgtactggtagcgagattattgctcatttggcaaaagactttgcacattttgctcattttactgccccgcttcgcggggtaagatcgtcggcaaattttcatatatgagggtaaaaaatgagcaacatcctgattatcaatggggcgaaaaagttcgcgcactctaatggtcaactgaacgacaccctgaccgaggtcgcggagagttatctgcgcgacgccgggcacgatgttaaaagcgttcgcgccgaaagcgagtacgacgtaaaagaagaagtacagaatttcctgtgggccgatgtggtgatctggcagatgccgggctggtggatgggcgctccgtggacggtgaaaaaatatatggatgacgtctttaccgaaggccacggctcgctgtacgccagcgatggccgtacccgctccgacgccagcaaaaaatatggctccggcggcctggtgcaggggaaaaaatatatgctttctctgacctggaacgcgccgatggaagccttcaccgacaaagaccagttcttccacggcgtcggcgttgacggcgtttacctgccgttccataaagccaatcagttcctcggcatggaggcattgccaacctttatcgccaacgacgtgattaaaatgcctgatgtcccacggtatatcgcagaatatcgcaagcatctggcggaaatttttggttaactagaggtctagctctacatatttcgagttattcgaacctggagtatgacgagatccacacagaaggagttgagttaaccatgttaacagtgattgcagaaatccgtacccgcccgggccagcaccaccgccaggcggttctcgatcagttcgcgaaaattattccgaccgttttgcaggaggccggctgccacggctatgccccgctggtggatcatgccgccggcgtcagcttccagaccacagcgcccgactctatcgtcatggtcgagcagtgggaaagcgtcgcgcatcttgaagcacacctgcaaaccccgcacatgaaagcctggtcggaagcggtcaaaggcgatgtgctggagaccagcatccgtattctgcagcctggcgtttaagtccgccgactcagtaatgccatgaaaaagggagcctgaggctcccttttacgtctggcgcagcgtacagacttacacttccagatccgccatatcgcccttctcctgcagccagttgcgacgatcttccgaacgctttttggccagcagcatatccattatcgccgtggtctgctgctcgtcctcatcgcttatcaccagctgcaccaggcggcgggtattcgggtcaagggtggtttcgcgcagctgcatcgggttcatctcaccgagccctttaaagcgctggacgtttggcttgcccttcttgcgctttagctgctccagcacgccggttttttcttcttccgtcagtgcgtagtaaacctctttaccgaggtcgatacggtacagcggcggtagcgccacatagacgtgcccctctttcacgagggtacggaaatgtcttacgaacagcgcgcacagcagggtggcaatgtgcagaccatcggagtccgcatccgccagaatacaaattttaccgtagcgcagctggcttaaatcatcgctatccgggtcaataccaatcgccaccgaaatgtcgtgcacttcttgcgaagctaacacttcatcggaagagacttcccaggtattaaggatcttgcccttcagcggcatgatcgcctgatattcgcgatcgcgcgcctgcttggctgagccgcccgccgaatccccctcgacaaggaacagctcggtacggttcggatcctgggcggtacagtccgccagcttacccggcagcgccggaccgctggtcagctttttgcgcaccacttttttggccgcgcgcagacggcgctgggcgctggagatggccatctccgccagcagctccgcggcctgcacgttctgattcagccacaggctgaaggcgtccttcaccactccggagacgaacgccgcgcactggcgcgacgacaggcgctctttggtttgcccggcgaactgcggatcctgcatcttcaccgacagcacgtaggcgcagcgatcccagatatcttccgctgacagcttcacgccgcgcggcaggatattacggtactcgcagaactcacgcatcgcgtcgagcagcccctgacgcaggccattaacgtgcgtcccgccctgcatagtcgggatcaggttcacgtagctctcggtcagcagctcgccgccttccggcagccacagcagcgcccagtccaccgcctccgtctcgccggagaaggcgccgacgaatggtttttccggcagcagcggcaggccgttcaccgcttcgctcaggtaatcgttcaggccatcggcatagcaccagctctgctcgctgttgttcacctggtcgcggaaaacaatttccacgcccgggcacagcaccgctttcgcttttaacaggtgggtcagacgtgaaacggaaaagcgcgggctgtcgaagaagctttcgtccggccagaaatggacgctggtcccggtattgcgtttgccgcaggtgccggtgacgtgcaggtcttccactttttcaccattttcaaaggcgatgctgtagacctgaccgtcgcgacgcacgttgacctccacgcgttttgacagggcgttgaccaccgagatccccaccccgtgcaggccgccggaaaactgatagtttttattggaaaacttaccgcccgcatgcagccggcagaggatcagctcaaccgccggcacgccctcttccgggtggatgtcgaccggcatcccgcggccatcgtcaatgacctccagggactggtcggcatgaaggataacttccacacgtttggcgtggcctgccagcgcttcatccacactgttatcaataacttcctgaccaagatggttaggacgagtggtgtcggtatacatgcccggacggcggcgcaccggctctagcccggtgagtacctcaatggcatcagcattatatgaagattgcgtcatggtgtgtattcgtaggtcgttcagggccgtttagcgcaggccgagaaattcgataatctgagtgaaatgatcgtcaaagccgacaaatgcgtgattaccgccctcctctaccgtctgccggcaagaggcgtagtaatgcacggcctggcggtaatcaagcacttcatccccggtctgctgcagcagccagagtaaatccggcgcttcgagcgggtcgatttgcatgactttgagatcgtaaatatggcgagactctagcacatattgctgcccggtgtatggattctcattgtggccgagaaaattgtttagtagttcaaacggccgcaccgccgggttaaccaccaccgccggcagcataaagcactgcgaaagccaggtcgcgtagtagccgcccagcgacgaccctacgacccccagcggctcgccgccgtgctccagcacgatggactccaacagctccgccgtttccgccgggtaaggcggcaactccggcaccaccatggtgatctcaggatagtgctgcgccagccaggtctttaacgccgtcgccttcgccgagcgcggagagctgttaaagccatgcagataaaggagcgtcgccatcagtagccttctgaagcaatatccggatgaaacgcggcgccttccaggcggcacacttcggtggtcagcgtcccgtcagggtgaagctccagccagcgccagcccggtgacaccgtatccagagtgaaattggcacagtgcggtttaaactggacgcaggtcgacggcgtcgccatcatgcgccggccattccagtcgagatccagttcctgatgaatatggccgcacaaaagatgcttcacccgcggccaggcgctcaacgcgctgtccagcgcgccggcattgcgcagactatgctgatccagccagctgcagccggccggcagcggatgatggtgcagcaggagtaaggtatagcgctccggcgcctccgccagcttatgttcgagccactccagctggaagtcgctcagctcgccatggggaacgccaaacacctggctgtcgagcagcaggatctgccagcgatcgccgagaaacacgcgcttggcaggggaaatgcccgcctcctgcagggtgctgtacatcgccggctggaaatcatggttgcccggtagccagacgcagggtgcagcaaaactcgcgatgccctcagcaaaatgctgataggccgcggaggagtggtcctgcgccagatcgcctgttgcgacaatcagatcgcatggacgctgtgaggcatgaatggccgacagtacggcctgatagctatcccaggtattgatgcctaacaacgtttcatgcttttcagcaaacaggtgagtatcagtaatttgtaatatcctgactctggcctcaccagccagaggtaggtttaacaggctttccaaatggtgtccttaggtttaacgacgctaacaaaccggaatcgccatcgctccatgtgctaaacagtaacgcagccagtcggccaaaaactggttaatttgatgcttttcgtcgcgttgatgcaactttttattaggataatcatatcgcgctttgaagcgaaagatctgctgactcgaacacacttcggccaccatggcgtcatggtagaggcggacggtcatcgatggcaggctccagtagctcactgcaggcagagtctgctctattgccaccagagtagtgtagcgggtcgattcaactatcgttaaccgatactgcgcgcttcccacctgatagcttaccttctcacccgctgcatccgttcgcggcaacaggcggcgcaactgcgcgaagttggtctcgcacaggcgcatcatctcagggaagtcaggtgtataacgcttcattttgtccactcatttcgtaaattgtgataatgcaattgcagccattgcaaggcgatgacagaggctgcgttgtcgattttcccctcttctacccactggtaagcctgctcccgactcaccacatgcacccgaatatcctcgttttcctcggccaggccgtgaatgccttttgccgtcgatgcatcaacttctcccaccaggatcgataaccgttcgctggtgccgccgggactggccagatagcttaatattggtttcgtccgcccaacttcaagcccggcctcctccagcgcttcccgacgggcaacatcttccaccgtttcacccgcttcaatcatgccggcgaccatctccagcagccacgggctctcgctggtatcataggcggcgatacggatttgttcgaccagcaccacttcgtcgcgcaccgggtcaaagggtagcaagacggcggcgtgcccgcgctcaaaaatttcacgggtgatttcgccactcatgccgccgttaaacaggcggtggcgaaaacggtataaatcgagcgaaaaaaaaccacgatatagcgtttcgcgtgcaataatttctacatcatttttggagaaggtaattccctgctgcgtgggtttgctcattgtcatgtcctgcgaatctgaaattagggatttccaaaccgtttggctaccgttttacggtccgtatgttagattggtgcaaattaccgccggatggcacgtaacgccaactttttacggcggcagaatcgatacaatcagcggaatttttcttagaattagaccagcgctaaatgcttcacaacaaggaatgcaaatgaagaaattgctccccattcttatcggcctgagcctgaccgggttcagcgccatgagccaggcggaaaacctgcttcaggtttaccagcaggcacgcatcagcaaccccgatctgcgtaaatcggcagccgatcgtgacgccgcgttcgaaaagatcaacgaagcgcgcagtccattactgcctcagcttgggctgggagcggattatacctataacaatggctatcgcgacagcaacggcatcaattcaaacgtcaccagcggctcgctgcagttaacgcaggttctgtttgatatgtcgaaatggcgcgccctgacgctgcaggaaaaaacggcagggattcaggatgtcacgtatcagaccgatcagcaaacactgattctgaataccgcgacggcctattttaaagtgctggccgccatcgacacgctctcctataccgaagcgaagaaacaggctatttaccgccagttggatcaaaccacgcagcgctttaacgtaggcctggtggcgatcaccgacgtacagaacgcccgttcacaatacgatgccgtgctggcgaacgaagtcaccgcgcgtaacgatctcgacaacgccgtcgaagaactgcgtcaggtcaccggtaattactatccggagctggcctccctgaacgtgaatggcttcaaaaccaacaagccgcaggcggtcaacgccctgctgaaggaagcggagaaccgcaacctgtcgctgctgcaggcgcgtctgaaccaggacctggctcgcgagcagattcgccaggcgcaggacggccatttgccgacgctcagcctatccgcgtcgagtgggatatcgaatactagctacagtggttcaaaaacccataataatcctcagcaataccaggataacgatgccgggcagaaccaaatcggcctgaacttctctctgccactgtatcagggcggcgcggtgacctcgcaggtcaaacaggcgcaatacaacttcgttggcgccagcgagcagctggaaagcgcccaccgcagcgtcgtgcagactgtgcgttcatcgtttaacaacgtgaacgcctccatcagcagcatcaacgcctacaaacaggcggtggtctctgcgcaaagctccctggatgccatggaagctggctactcggtgggtacgcgtacgatcgttgacgtcctcgacgccaccactacgctgtataacgctaagcagcagctctcgaatgcgcgctacaactacctgatcaacgagctgaacattaagtcggcgttaggtaccctgaacgagcaggatctggtcgccctgaacaacacgctgggtaaacccatctccacctccgcagatagcgtcgcgccggaaaatccgcaacaggatgccaccgctgatggctacggcaacactaccgcggcggtgaagccggcgtccgcacggaccacccagagcagcggcagcaatccgttccgtcagtaattctcatactgtgatgcgcatcgcctgtccgtcggacaggcgatgcgttaaacgtaaggcaacgtaaagatcccccgcttagcgcccctcttcgcttcattttccaccactcatcctctatcctgagcgttaacacacgccataccactgggtcctggaagacaaatatgaaacggacaaaaaatattaatcattcgtcgttccgcaaaagctggagcgcacgccatctgacgccggtcgcgctggccgttaccgcggtctttatgctcgccggttgtgaaaaaagcgacgaaacggtgtcgctgtaccagaacgccgatgactgctccgccgccaacccgggcaaagcagccgaatgcaccacggcctacaccaacgcggtaaaagaggcagagcgcactgcgccgaagtatgccacccgcgaagactgcgtcgccgagtttggcgaaggccagtgccagcagacgccagcccaggcgggcgtcgccccggaaaaccaggcgcaggcgcaaagcagcggcagcttctggatgccgctgatggccggctacatgatgggccgcctgatgggcggcggcatggcgcaacagcagccgctgttcagctcgaaaaatccggccagcccggcctacggtcagtacactgacgccagcggcaagagctatggcgccgcccagccgggccgcaccatgaatgtgccgaaaaccgcgatggcgccgaagccagccaccaccaccaccgtcacccgcggcggctttggcgagtcggtagcgaaacagtcgaccatgcagcgtagcgccgcaggctcaacgtcctcttctcgctcaatgggcggctaagcaacatggaaagagtcagtattaccgagcgcccggactggcgcgagaaagcgaccgagtacggtttcaacttccataccatgtacggcgagccctactggagcgaagaggcgtattacaagctgaccctcgcgcaggtggaaaagctggaagcggtcaccgctgagctacatcagatgtgcctccaggtggtggaaaaagtgatcgccagcgatgagctgatgaccaaattccgcatccctaaacacacctggggttttgtacgtcagtcgtggaaaaccaaccagccgtcgctctactcacgtctcgacctggcctgggatggcgtcggcgaaccgaagctgctggagaacaatgccgacaccccgacctcgctgtatgaagcggccttcttccagtggatctggctggaagatcagctcaacgccggcaagctgccggcgggcagcgaccagttcaacagtttgcaggaacagctgatcgatcgcttcggcgagctgcgcgagcagtttggctttcagctgctgcatatggcctgctgccgcgataccgttgaagatcgcggtaccgtgcagtatctgcaggactgcgccgctgaagcggggctggcgacggaattcctctacgttgaagatatcggcctgggcgaaaaaggccagtttaccgatctgcaggatcaggtgattggcaatctgttcaagctctatccgtgggagtttatgctgcgggagatgttctccaccaagctggaagacgctggcgtccgctggctggagccggcgtggaaaagcattatctccaacaaggcgctgctgccgatgctgtgggagatgttccccaatcaccctaatctgctggcggcctacttcagcgaagatactcacccggagatggagaagtacgtcattaagccaatcttctcccgcgaaggcgctaacgtgtcgatcgttgaaaatggcaaagtggtggaggcagtagaaggcccgtacggggaagaaggcaccatcgtgcaggcgttttacccgctgccgaagtttggcgatagctatacgctgattggcagctggctcatcaacgaccagcctgcagggatcggtattcgcgaagaccgggcgctgatcacccaggatctgtcgcgcttctatccgcacattttcgtcgaataatgccgcgctccggcgacggtaaatgccgccggagcgcgctatcatcaggcgccaaccaacaccgacagcatgctcagcgagcccatctcgatgccatcgactgggatcgtcatcgcctcaacgccatcccacgtccccaggacatacagcagcggcaggaaatgctccgccgtcgggttggagagcgagcccccttcgtgtgccaggtagttaaccagcgggtgctgctcgtccagcccctgccattgcagattcgccttcacgtagttattgaaggactctgcccaagggtacggcgtgttctcgccatgccagcgggcggtgcgcaggttatgcaccacgttgccgctggccaccagcataatgccttcatcacgcagcgaggccagtttccgccccatttcgagatgccaggccggcggtttggtgctgtcgatgctcaactgaaccatcgggatatccgcctgcggatacattttaatcagcacgccccacgagccatggtcaaatccccaggcttctgtatcgagggtgaccggcaccggcgagagcagctccaccagccgttgcgccagcgccggagagcccggcgccggataatgcgtgtcatacagcgcctgcggaaaaccgccgaagtcatgaatggtcttcggcgcctccatcgccgttacgcccgtaccgcgcgtaaaccagtgcgcagagaccaccacgatcgctttcggacgcggcagggtttcgcccagttgagcccaggcgcgggtataacggttgtcttccagcacgttcattgggctgccatggccgagaaacaacgcgggcattcgggtacgggacatgatgatatccttagggtgtcaatgtgatgtgctcacattacgcgcttttgcgccaggataaactcagataaccatgatgatgatcgtcagaaaatttgaatgtaattcgcggtaaagggacgtgtcccgtacgcgcatcctcaggcaatatactcgtatgtaattattttcacagggagagaagcgatgtcatcacccttaatattgacgctgttagccggtagcgcaaccttcattggcgccatattcggcgtgattggccagaaaccctctaaccgcctgcttggcttctccctcggctttgccgccgggattatgctattgatttcgttgatggaaatgctgcctgccgcgctggccgccgagggcatgtcgccgctgctcggctacggaatgtttgttgtcggcctgctgggctactttggccttgaccgcctgctgccgcacgcccacccgcaggatctgatgactcccgccatgccgcgcccgcgcaacttacgccgcaccgctattcttctgacgctggggatcagcctgcataactttccggaagggatcgccacctatgtcacggccagcaacaacctcgagcttggcatgggcgtcgcccttgccgtcgccctgcacaatattccggaaggactggcggttgccggaccggtgtatgccgccaccggctcgcgcagcaaagcggtgctctgggccgggctttccggcatggcggaaattttgggcggcgtgctggcgtggttgattctggggagcctggtctcgccgctggtgatgggcgcgatcatggctgccgtcgccgggattatggtggcgctgtcggtcgatgaactgatgccgctggcgaaagagatcgatccgcaaagcaatccaagctacggcgtcctgtgcgggatgtcggtcatggggctgagcctggtggtactccagacgatgggcatcggttaaagcgcagaaacaacacagcccactaacaagtgggctgtgctcgggcgtagcgaaccgctatttagctggctttacgctcatgttcgcgacgataggccaccagatcttcaatcgtgactaccgccatattgtgctgctgagcgaacttgatgcactccggcgcgcgggccatggtgccatcgtcattggtcagctcgcacagcacgcctgccggtttaaagccagccagggtcacgaggtcgatagtggcttcggtgtgaccgccgcgggtcagtacgccgcccggctgcgcacgcagcgggaagacgtgacctggacggttaagatcggaaggtttcgcgccgtcggcgatggccgcgcggacggtggtcacgcggtcggcagcggagacgccggtggtcacaccttcggccgcttcgatggtcacggtgaagccggtgccgtaggcgctggtgttgttctctaccatcatcggcagatccagctgtttgcggcgttcttcggtcaggcacaggcacacaatgccgctgccgtgacgaatggtcagcgccatctgctcaacggtcatggtttcagcggcgaagatcatatcgccttcgttttcacggtcttcatcatcaagcaccatcacgccgcggccttcgcgcagggcgttcaaagcgtgttccacacgttcaaaagcggtaccaaaagaagaaaggagcgtctgattcatggtaaaaaaacctcattaaaattatggttaccagaatcagggcagtcttaggagcgccggtttagcggcaaaagtcaacgcgagcgggcctgggcccgactgtgccgttactctctcccatccggactttaaccgtcggccccggaattacaccggatctgctgaccttcccgtagtcacgggaagcgctcgcgggctttcaacgccatggttgatttaccgccggtggggaatttcgccccgccctgagaataagcgagataactataacgctattgactatcctcggcaatgcataagcttcaaacatttctggtttataggcggcctggttcgcactacaatgatcaatcatccgacccgagcaggaaaccaccatgattgacccgaaaaaaattgaacaaatcgcccgccaggtccatgagtcgatgccaaaaggacttcgcgatctgggtgaggatgttgagaagaaaatccgccaggcgctgcagtcgcagctgacccgtctggatctggttagccgcgaagagtttgacgtgcagactcaggtgctgctgcggacccgggaaaaactggcgctgctggagcagcgcctgaatgacctcgaaaaccgcccggcggcgacgccgggcagcgaagagcagcagtaaaaaacgggcccctgggggctcgttttgcgtttggcttaatgggcggcttccgcctggctactcacctggcgacagtacagttcatagcgctggcaaaaccattcacgatgttcttcatccatattgccgacaatggcctgaagatcaactggctggccctgggcgtgcattctggcgaaactccgcgccaaaaaatcaaaattcttcattgaatacatatcgttatggttcatgcgcatactccttcagcggtggatgttctgatcagtcatatgccttttactcacttcagtatttacgcttaccttaacgcgatttgtacgaaaaatgcgcttaacatgattatttattgcgctaaatcattttccacatgattaaataaaaacggcccgcgatacgtctatcgcaggccgtgatgcttcaccgtacaaaccggtgaatagcgaaaagcttatttgtcgctatctttttgtattttcttaataatattggtagttgagcagccatcttcaaagttgagcaccagcacttcgccaccgttcgcccatacctcttcgctgccggcgatttgctccggtttgtagtcgccgcccttgaccagcagatccggcaggatgccagcgatcaggcgctgcggagtatcttcttcgaaggagaccacccagtcgacggcctccagcgcccccagcacgatcatccgctgttccagcgggttcaccgggcgggtttcgcctttcagacgtttggtggaggcatcgctgttgaccgccacgatcagacggtcgcccagcttgcgcgcattcgccagataggagacatgaccggcatgcagaatgtcgaagacgccgttggtcatcaccactttctcgccgcgcttgcgcgccgccgcaaccgcctgtttgagttcctcttcgctcatcacgccaaagccggtctcagcccggccgcggaccgcgttttccagctcgacaggggaaacggtggatgtacccagcttaccgaccaccacgcccgccgcggcgttagcgaaatagcaggcctcttccagggtgttgccggacgccagggtcgccgccagcacgccaatcaccgtgtcgccggcgccggtcacgtcgtacacttcctgggcctgggtcggcatatgcagcggcggacgccccggctgcagcagcgtcatcccctgctcagagcgcgtcaccagcagcgccgacagttcgaattcggcgatgagcttcatgccgcgctcaacgatctgcgcttcatcctggcacttgcccaccaccgcttcaaactcagagaggttcggggtgagcaacgtcgcgccgcgatagcgttcgaaatcggtgcctttcggatcgatcagcaccggcacgcccgcttcacgtgcgagtcggatcatggtctggacgctggtcagcgcccctttggcatagtccgaaaggaccagcgcgccaatagagcccagcgcctgctgaatgcgctcgtgcatcggctgcggatcgacgccggagaagccctcttcaaagtcgaggcggatcagctgttgattgcgcgacagcacccgcagcttggtgatagtcgggtgagtcgggacggagacgaagtcgcacttcacattgacgttggccagcgcctggctcagcgcgcgggcggcgtcatcaatcccggtcaatcccaccaggcgcgaggttgcccccagcgaggcaatgttcatcgctacgtttgccgcgccgccaggacgttcttcgatattttccaccttcaccaccggcaccggggcttccggggaaatacgactggtggggccgtaccagtagcggtccagcatcacatcacccaccaccaacactcctgcacgttcaaactccggcagcgttactttcatgactctctcctgcgagacgcaaactttgcgcgcgataatagcacacccgattttatagttaagccatcagccatttctgccagctggcgctgacctgctcgcgctcccggctgaaggcctctggcgccacgtgtcccggcagctcctgcagggccaggtgatggagcgcgtcacgcaaggtggtgtacgcgtgcgttaaggcgcgcgcttcctcctcgtccatgatgtcgttctgcgccagcagctcgagaatacgcacattatcagaccagcgggtcagcttcggcttgtcgctggcatagcgtaggaccagatactgggtaataaattcaatatccgtgatcccgccggcatcggctttgatatcaaaacgattgggatgcttgttgccgaggtgggcgcgcatcttctcgcgcatctcgcgaacctcggtctgcagggttgcgccctcccgcggggtggtcaggatatcgcgacgaatggcgtcaaagcgcgcctgcaacgccgggtcgccatagaccacacgggcgcgcaccagcgcctgatgctcccacgtccaggcctcgttctgctgatagtcggcaaacgcgtcagcggtggtaaccagcatccccgccgcgccggaagggcgcagccgggcgtccacttcgtagagaataccggacgaggtgcgggtgctgaacagatgcatgatccgctgggccagccgcaggtagaactgacggccgtcaatctcccgctcgccgtcggtcatcacctccgccggacagtcatggaggaacaccaggtcgagatcggagctgtagcccagctcccaaccgccgagcttgccgtagccgacgacggcgaagccgcgcccctggcgatcgtgcaggtgggtcggcaggccgtagcgagccaccatctgcccccatgcctgctgcaccaccgcatcgaggatcgcttcggcaagccaggttaaatggtcgctgaccttcatcaccggtagggtgccggcgatatccgccgccgcgatatgtagctgctgcgcctgcttgaactggcgcaacgcctccagctgctgctcttcatcctcttccggcacccgcagcagatactgacgcagctcgtcgcgataggcatcggtcgccgtcggctgatagagggtgttgggatccagcagctcatccagcagcagcgggtggcgcgccagctggctggcgaccatcggcgatgccgcgcagagcgtaatcaggtgtttcagcgcgccggggaattcgctcagcagttcaagataggtggtgcgggtgacgatcccggtcaacagcggcgtgatccgcgccagaggcagcggcgcatcggcgcgcgagcagatttcgctcagcagatgcggcatcagctgatccagcacctggcggccgcgcgggccgatggtgcgccgatccagctctttgcggaaatcggcaatcagcgccagcacgctgcggcggtcggcgtcgtttaaatgcgccagcgccggactggcgtcatcttcttccagcgcatcctgccacagctcgcgccagtactcggccagctgctcatctggcgactgagcctcgtcatcgccgatcagttcattaaacacccgccgtacgttggccatatggttcgccagctgcgcgctcagcgtctcccagtcatcggtatgcatcccccacgccagtctggcgcggttcagttcatcctgcggcagggtctgggtctgttcatcgttgatactttgcagcaggttttccagccggcgcaggaacagataggccgcgcgcagcagcgtcgcgtcgccttccggcagcagatgcagctcatcaatcgccgccagtgtcggcaatagcgcgcgctgctgcagcgcaggttcgcgaccgccgcggatcagctgaaagacctgaacgataaattcaatttcacgaatgccgccggcgccgagcttgatgttgtctttcagcccgcgacgccgcacttcacgggcgatcatgcctttcatgttacgcagcgactggatcacgctgaagtcgatatagcggcggaagacgaaggggcgaagcatcgcgcgcagttcgctggcgtaggcgccgtcgttatcgcccatgatccgcgctttcaccatcgcgtagcgttcccagtcccgcccctgctcctggtaataatcctccagcgccgcaaagctgagtaccagcggtccgctgtcgccaaagggccgcaggcgcatatccacccgataaacaaagccgtcctgcgtcggctgatccagcgccttgataagccgctgccccaggcgggtaaagaactgggcattatccagctcgcgacggccgccgcgggtggcgccatgctccggccaggcaaagatcagatcgatatcggaagagaagttcagctcgccgccgcccagctttcccatcccgaggatcggcagcggctgcggctgaccctcggcgttgcatggcgttccccactctttacagcaggcggcgtacagccagtcgcgggcggcgacaatcagggtctccgccaggacgctcagctgctgcagcgtctcttcttcgcgcaccagcgacaacgcctgcgcccaggcgatgcggaccatcatctggcggcggaagagacgcagctctcgcatcaaccccgcttcgtcagtgacggcctgcaggcgctcctgcagccaggcttcgtaatgccgccactcttccgccgccggcgcggagtccgcaagctcattcagccagcccggctgagcgatcacaccctgttcgacaaaatcgctgaacgccatcaccgacctggcctgtgggctcagttcggcaacgggaaaatccgttggcagacggtcagcgaccgtctgccagtgctgctgtaactgcggagaaagcggcatcataagggctccctggcctgtaattatcgttttccactatgcagccagaacggctcggcagccagcgcctggcgacggaaatattcaaacacgctgcggtcgtcatgctctatcgcacgctgaagttcctgccagttctccagccagggcgcgacggcgtcgccataggcgcccgccagcagctggacgctgtcgatgtcgcgggacagcttcggcaactggtcagcggcatcttctaccgccagatgctgcacggcgctgcgcagctcggccgccacccgcgagaggtgaatatcggcaaaccgtttgaacgatccggctatttttttctctcccgcctcgttgaggaacgaacgccacccgcgctggaccagccattcggtcagggccagtttggcgccaacgacctcggtgcggaataacgcttcgtcggcggtgtccgcagccagcagaacggcgtcggcgtcgttcagcaacgcgcggaggtgggtggtcgccttacgcggcacgatgccgccaaacagcacgagggcatggcgcacgcgggctatcgccagcagaatttccgctttggcttttgcgttgccgcgcagccagatctcgtcgtgatacagccaatgcaccagggcgctctccagcgccgcctccagcccctgctccacgctggccttcgctgccaccggcagcaccgccagccgggtcaccggacgctcattgttaccttgcgccagatgatacccgcgcgcggctttgctcaggctcccctgacgcaggacgccgctctccagcaaacgatgcgcgaggcgcagcagatcggcggtctccccggcgagccgctccagctccagttcgcagatcggctcctgctgttcgcccgccttgacttcgccgcgatcgagggcaatctcaatctcactctttccttcctggatcacccagcgttcacgggcaaaatcggtgctgaacagcggctggacgtgctccgccagcgcggccggaagttccccttgcggccagacctccgccggcaggcgctcaagcgccagctccggtttatccagtggaatattatattccgggcgctggtgcaggccgccgacctcccgaccggcgattttcagcgtcatctcataacgcccctgatcgccgcggatgcgcagccccatatcgtgacgacgcagccagttatcggcggtttcgtaataaatgttcagcaactggcccgcgggcgtatgtttcgcctcgagcgcattgagctgctcgcgcagcgtctctaccccatcctgagcgacgataaacttgagttcgatttcttgagccatgactgaattcttccgcttctgtgctgcgccgacaaattgcggcgaacttacgacgatattttttgtcagtagatagtattttgcggtgaatcgccatgcaacgcgctttttgccgggccacctcctggatgattccgattgtggcggaaaactttgcgtcgctctggcgatgcctctactatcgttccactttttatgaccaaacgatgacctgctgccaaaattacgcctgattacttttactttgctcgcgcttagcgccgccacggcggttcacgcagaagaaaagcgctacgtttccgatgagctgaacacctgggttcgcagcggcccgggcgataattatcgtctggtcggcaccatcaacgccggggaagaagtgtcggtactgcaaacgaacgacagcaccagttacgcgcaaattcgcgacagcaacggccgtaccgcctggatcccgctgaaagagctgagcaacgagcccagcctgcgcacccgcgtcccggatctggaaaaccaggtcaaaacgctgaccgataagctgaataacatcgatgccacctggaaccagcgcacggcggatatgcagaagaaagtcgccggcagcgacagcgtgattaacgcgctgaaggacgagaaccaaaagttgaaaaacgagctggttgtcgcgcagaagaaggtgaatgcggcaaatctgcagcttgatgataaacagcgcaccattatcatgcagtggtttatgtacggcggcggtgtgctgggcgtcggtctgctgctcggtctggtgctgccacatctggtgccaagccgcaaacgtaaagaccggtggatgaactaattcgtcttctctgccagacttacgtatcatcttgcgaaaaacggatacgggagaatcaggcgtgaagagttatctggtcggtggcgcggtgcgtgacgcgctgttagggctgccggtcaaagaccgagactgggtggtggtgggcgccaccccgcaacagatgctagacgcgggctatcaacaggtaggccgcgattttcccgtgttcctccatccgcaaagccgggaagagtatgccctggcccgcaccgagcgcaaatccggcgcgggctataccggttttacctgctatgccgccccggacgtcaccctcgaagccgatctgctgcgccgcgacctgacggtcaatgccctcgcccaggatgccgacggcgcaattatcgacccctacggcggacagaacgatctccgtcagcgcctgctgcgccatgtctctcccgcgtttagtgaagatccgctgcgcgtgctgcgcgtcgcgcgttttgccgcccgctacgcccacctcggttttcgcattgccgaagagactcaggccctgatggccgcgatggttgaggccggcgagctggcgcatttaacgccggagcgggtgtggaaagagacggaaagcgcattaactactcgcaacccgcaggtctttttccagacgctgcgcgactgtcaggccctcaaggtgctgttcccggagattgacgccctgtacggcgtgccggccccggcgaaatggcatccggaaatcgacaccggcctgcacaccctgatgaccgtcacgatggccgcgatgctgtcgccggatgtcgacgtacgtttcgccaccctgtgccatgacctcggcaaagggctgacgccgaaggcgctctggccgcgtcaccacggccatggtccggcgggagtcaagctggtggagcagctctgcgcgcgtctgcgggtgccgaacgatatccgcgatctcgcgaaactggtggcggagtaccatgacctaatccacaccctgccaattctgcagccgaaaaccctcgtcaaactcttcgacagcattgacgcgtggcgcaaaccgcagcgcgtgcagcagatcgcgctcaccagcgaagccgacgtccgcggacgcaccggtttcgaggccagcgattacccgcagaggcgcctgctgctggaggcctgggaagtggcgcagtcggtctccactaaagaggtcgtggcggcgggctttaaaggggcggaaattcgcgaggagctgacgcggcggagaattgcggcggtagcgcagtggaaggaacagcgttgcccccagccgcaaggctgagggcgcaggccttagaagaagaccacgtacaccgctgccgcgacgataaagcggtagatagcgaacggaatgaacgagatccgtttgatcagctgcaggaaggttttaatcgcaatcagcgccacgataaacgccatcacgaagccgacggcgaacatcgggacgtcgcccatgttcaggaagccgatgctcttgtagacgtccagcacggtggcgcccatcatcatcggtaccgccagcaggaaagagaactccgaggccgcatagcggctgacgcccatcagcatgccgccggagatagtcgcccccgagcgggagaaacctggccacagcgccaggcactgaaagcagccgatgacgaacgcctgacggtaggtcatatcgtcaatcccgaccgcgcgcggctgtttcggcttcagcacttccgctgcaatcagcaatacgccgccgacaagcagggcgtacatcacgttcaccgggttaaacaaggatttaatggtgtcatggaaaatcagccccatcaccaccgcggggatcatgccgagaaggatatggataagcgacaaacggccgctgccctggccttcatgcgccggcggtttcccgaaatggatgccgatcaggccgaacaggcgacgccagaacatcaccaccacggcgagtatcgaacctaactgaatcaccacttcaaaggtatttgcggtatcaccttcaaaccccagcaggtgaccaacaataatcatatgaccggtactggaaacaggtaaaaactctgtcaaaccctcaaccacacccaatattgccgccaccagcagcgagtgtatatcgctcatccaattaaaccctttaaaaaagtaaaatgaaaaaaaccaggaacacggtatcgttcaacaggcacaacccggctgccagagcgcgcgtaatccgcagcgtacaggaagtacacacggattcgtccaccgttctggaaggacatcgccagtaaaattgcctgatgaccggatgctatgaccggtataaacgcaatttgtttaacaagtatgacctgaaaagttttgtttcagattaaggccacgttcaataatcaccccgacgtttgccgcgcgagccacggcgccaggtttgctgacttttatgcgcacccagggcgactggaatgtttccagcagcaggtcggccacctcttccgccacccgctccactaacgcaaattttcccccctccacatgcgcgatcacgcgctcgctgatatcagcatagctgaggcaatcgctgacatcatcgctggcggccgccttgcggttatcccatgcaatttcgatatcgaacaccagcttctgctcaatggtttgttcccagtcataaacaccaatggtggtgattaccgaaagttgctctataaatacaatatccatcacgccctgcctgctttttagctaaaccggataccacttccggcgaattatgcgtattatccacagatgcagagaatacaacgacattttcaaaacggaacagcgttatgagtgcaatcgcgcctggactggtactcctcgcctacctctgcggctccatttccagcgccattctggtatgtcgccttgctggcctgcccgacccacgcgacagcggctcaggcaaccccggggccactaacgtactacgaattggcggaaaaggggcggccgtagcggtacttatttttgatgtgctgaagggcatgctcccggtgtggggcgcctgggcgctgggccttacgccgttctggctggggttagtggcgattgccgcctgcgtgggccatatctggccagtcttctttcatttccgcggcggtaaaggcgtcgccacggccttcggcgctatcgcccccatcgggctcgatctcaccggggtgatggccgggacctggctgctgaccatcctgctcagcggctactcttccctgggcgctatcgtcagcgcgctgatcgccccgttctacgtctggtggttcaaaccgcagtatacctttccggtgtcgatgctctcctgcctgatcctcctgcgccatcacgacaacattcagcgtctgtggcgtcgccaggagagcaaaatctggacccgcgtgaagaagaaaaaaacgccagagcagaagtaatctcccctcccggctccgccagccggggaactcccctgcgctaatcgcgcctttcacccgcccttttacgcttcctcgccatcaaaggcgatcatcgccacatcctccttttgtaacaatacgttagcagcatggaaaggcaaaagttgcgctggcggctggcggcgcggcgcaacgcgatccgccgccttttccgccgcgcccaggctgcggatcaggatattgacggcaaagattatccgggtgaataatccggagcggttatgccgctttcccctcgcgcccgtcgcgacgctccgggttacggatgacataagcgtttcgtatgaccgggataaactcccgccgatcaatactcattgctgctgttttatcttgattttgcaggggcgcaacattgcacggcaccgtgttaccaccactcaaaaaaggctggcaggccacgctggatctccgctttcagcaggccggcggcaagaccgttctcgccagcgcccaacatgtcggcccgctgaccgtccagcgcccgttttacccggaagaagagacctgtcacctctatctgcttcacccgcccggcggcatcgtcggcggtgatgagctgacaattagcgcgcaccttgcccccggctgccatacgctgataaccatgcctggcgccagcaagttttaccgcagcagcggcgcgcaagcgctagttcgccagcagttgacccttgccccgcaggcgaccctggagtggctcccgcaggatgccatcttctttcccggggcgaatgcccggctgttcactacctttcatctttgcgcctccagcaggctgctggcctgggatctgctctgccttggccgcccggtgattggcgaaaccttcagccacggcaccctcagcaaccggctggaggtatgggtggacgatgagccgctgctggtcgagcgcctgcagctgcaggagggagagctctccagcgtcgccgaacgtccctgggtcggcactttgctgtgctatccggctaccgatgccctgctcgacggggtgcgcgacgcgctggcgccgctcggtctctacgccggcgccagcctgaccgaccgcctgctgacggtgcgtttcctcagtgacgataatctgatttgccagcgggtgatgcgcgacgtatggcagtttctgcgccctcatctcaccggtaaatctcccgtacttccccgaatctggctgacttaagagaacgttatggaactgaccccccgagaaaaagacaagctgttgctgtttaccgccgcgctggtggcggagcgtcgcctggcccgcggcctgaagctcaactatccggagtccgtggccctgatcagcgcctttattatggaaggcgctcgggacggcaaaagcgtggcctcgctgatggaggaaggccgtcacgtcctgacccgcgagcaggtgatggagggcgtcccggaaatgatcccggatatccaggtcgaagccaccttcccggacggctcgaagctggtcaccgttcacaacccgattatctgaggtagcgccatgatccccggtgaatatcacgttaagcccggtcagatagccctgaataccggccgggcaacctgtcgcgtggtcgttgagaaccacggcgatcggccgattcaggtcggttcgcactaccatttcgccgaggttaacccggcgctgaagttcgaccgtcagcaggccgccggctatcgcctgaatatcccggcgggcacggcggtacgctttgaacccggccagaaacgcgaggtcgagctggtggccttcgctggtcaccgcgccgtcttcggcttccgcggcgaggtcatgggccctctggaggtaaacgatgagtaatatttcacgccaggcctatgccgatatgttcggccccaccgtcggcgacaaggtgcgcctggcggataccgagctgtggatcgaggtggaggacgatttgaccacctacggggaagaggtcaaattcggcggcggcaaagtgatccgcgacggcatgggccaggggcagatgctggccgccgactgtgtcgacctggtgctcaccaacgcgttgatcgtcgatcactgggggatcgttaaggccgatatcggcgtgaaggacggccggatcttcgccatcggcaaagccggcaaccccgacatccagcccaacgtcaccatccccatcggcgccgcgacggaagtaattgccgccgaaggaaaaattgtcaccgccggcgggatcgatacccatattcactggatctgtccgcagcaggcggaagaggcgctggtctccggcgtgaccaccatggtcggcggcggcaccggcccggccgcgggcacccacgccaccacctgtaccccgggcccgtggtatatctcacgcatgctgcaggcggccgacagcctgccggtcaatatcggcctgctgggcaagggcaacgttgctcagccggccgccctgcgcgagcaggtggcggcgggcgtcattggcctgaagatccatgaggactggggcgccaccccggcggcgatcgactgtgcgttaaccgtcgccgatgaaatggacattcaggtcgccctgcacagcgacaccctcaatgaatccggttttgtggaagacaccctcgccgccatcggcggacgcaccatccacaccttccataccgaaggggccggcggcggccatgcgccggacatcatcaccgcctgcgcccatccaaacattttgccgtcgtccaccaacccaacgctgccctacaccctcaacaccatcgatgaacatctcgatatgctgatggtctgccaccatctggacccggacattgccgaggacgtggcctttgccgagtcgcgcattcgccgggaaaccatcgctgcggaagacgtgctgcacgatctcggcgccttctcgctcacctcctccgattcgcaggccatgggccgcgtcggagaagtgattctccgcacctggcaggtggcgcatcgcatgaaggtgcagcgcggcgcgctggcggaggagaccggggataacgacaacttccgcgtgaagcgctacatcgccaaatacaccatcaacccggcgctgacccacggcatcgcacacgaagtcggatccattgaggtgggtaagctggctgacctcgtggtctggtcaccagccttcttcggcgtgaaaccggccaccgtgatcaaaggcggcatgatcgccatcgcgccgatgggcgatatcaatgcctctattccgaccccgcagccggtgcactaccgcccgatgtttggcgcgctgggcagcgcccgccatcactgccgcctcaccttcctgtcgcaggcggcggcagccaatggcgttgccgggcggctgaacctgcgcagcgcgatcgccgtggtgaaaggctgccgtacggtgcagaaagccgacatggtgcacaacagcctgcagcctaacatcaccgtcgacgcccagacctatgaggtgcgggtggatggcgaacttatcaccagcgagccggcagacgttctgccgatggcgcaacgatattttctgttttaaggagagcggatgctttatttaactcaacgtctggagatccccgccgccgtgaccgccagcgttacgctgccgattgatgttcgcgtcaaaagccgggttaaggtcaccctcaacgatggccgggaagccggcctgctgctgccccgcggcctgctgctgcgcggcggcgatgtgctcagcaacgaagaaggcaccgagtttgtgcaggtgattgccgctgatgaaggggtgtcggtagtgcgctgcgacgatccgtttatgctggcgaaggcctgctaccacctcggcaaccgtcacgtgccgctgcagattatgccgggcgagctgcgctaccatcacgatcacgtgctggacgatatgctgcgccagttcggcctgacggtgacctttggccagctgccgttcgagccggaagccggcgcttacgccagcgagagccacggtcatcatcatgctcatcatgaccaccacgctcacagccactagcatgtcgacagcggaacaacgcctgcggctgatgcagctggccagcagcaacctgccggtagggggttacagctggtcccaggggctggagtgggctgtggaagccggctgggtgccggacgtcgcggccttcgagcgctggcagcgacgccagatgacggaaggcttttttaccgttgacctgccgctgttcgcccgcctgtaccgcgcctgcgaacaaggcgatatcgctgcggcccagcgctggaccgcctatctgctggcctgccgggaaactcgtgaactgcgggaggaagagcgcaaccgcggcgcggcgtttgcccgtctgctgagcgactggcagccggactgtccgccgccgtggcgctccctgtgccagcaaagccagctcgccgggatggcctggctcggcgtgcgctggcgtatcgccctgcccgagatggccctcagcctgggctacagctggattgagagcgccgtgatggccggcgtcaagctggtccccttcggccagcaggccgcccagcagctgattttacgtctttgtgaccactacgcggccgagatgccccgcgcgctggccgcgccgggcggcgatatcggatcggccaccccgctcgccgccatcgcctctgcccggcatgaaacccaatactctcgattattccgttcctaggagaagccatgaactcttataaacacccgctgcgcgtcggcgtcggcggcccggtcggctccggtaaaaccgctctgctggaagcgctgtgtaaagcgatgcgcgatacctggcagctggcggtggtcactaacgacatctataccaaagaagatcagcgcatcctcaccgaagcgggcgcgctggcgcctgaacgcatcgtcggtgtggaaaccggcggctgcccgcatacggcgatccgcgaagatgcctcaatgaacctcgccgccgtggaagcgctgagtgaaaagttcggtaacctcgaccttatcttcgtggaaagcggcggcgataacctgagcgccaccttcagcccggagctggcggatctgaccatctacgtcatcgatgtggccgaaggggagaagatcccgcgcaaaggcggaccggggatcaccaaatccgattttctggtgatcaataaaaccgaccttgccccctatgtgggcgcgtcgctggaggtgatggcgagcgatacccagcgtatgcgcggcgatcgcccatggaccttcaccaatctgaagcagggcgacggcctgagcaccattatcgccttcctcgaagacaaaggcatgcttggcaaataggcctgttgcaccagccgggcgcaagcgcgtccggatggtgcagcctctgctctctctttatatcatcctgcctccacctccgcgccacgcctgccctgcaatatggcataaggtttgctaattcaagtcatgcctaaccattaaggaatgactatgtcatcactggatcttaaccctgaattacccgcgacaacgcggacttccggctcccgggaaaccttagaagattacaccttacgttacgccccgctgagctttcgccgctggggtccgggcgtcgtcgcggtcaccgcgctgggcggcattgcctatctggccgacttttccatcggcgccagcatcggtatggcctggggcaccagcaacgccatctattcgatcctggtggcggcgctggtgatcttcctcaccggcattccgctggcgatcaccgccgcgcgctacaacattgaccttgacctgatcacccgcagcgccggcttcggctatttcggctcggtgatcaccagcattatttttgccggcttcacctttatcttcttcgccctcgaaggctcgatcatggcccagggcctgctggtgggcctcgggatcccgctgtggatgggatatctgatcgccaccctgatggtgctcccgctggtggtctatggcatgaaagccctgacccgcctgcaggtgtggaccacgccactgtggctggtgctgatggtggtgccggtggtgtggctgattgtcaaagatccgcagctggtggacggcttcctgcatttcgccggtaaaaacagcgcgtcgacggtggatattaccgccatcatgctcggcgccggggtatgcctgtcgctgatcatgcagattggcgagcaaattgattacctgcgctttatgccgcctaagaccgcggagaatcgtaaaagctggtggctggcggtcttttccgccggcccgggctgggtggtgttaggggcgatcaaacagatcatcggcgccttcctcggcttctatctgttgacccgtttcccggcggtgcacaataccgaaccggtgcagcagttcgtcagcgtcttcgataacctggtgcccggctggctggccctgacgctggcggtggtgctggtggtgatctcgcagatcaaaattaacgtcaccaatgcctactccggctcgctggcgtggaccagcgcctggacccgcaccaccaaacgctatccgggacggattatttttgtggtggtcaacctggcgattgccctggcgctgatggagggcgatatgttcagcgccctgtcgtggatcctcggcttttactccaacttcgctatcgcctgggtcgtggtggtggcgaccgacatcacctttaataaaggcttgctcaagctggcgccggcgcagccggagtatcgtcgcggcatgatctacaacgttaacccggtgggcgtggtctcctttggtctggccgccgggctgtcgatctgcgccttcttcggtctgttaggggcgacgctggcgccgttctcgccgctgattgcgctggtcgttgcctttgtcatgaccccgctgatggggctccttacccgcggacgctactatattaagcaggtggatgacggcatcgccgagccgcgctatgacgcggcggggaacgcctccaccaccgcgtatcaatgcgttagctgtgaggaagagtacgagcgcccggacgtgatgcactcgcacaagcatcagggagccatctgctcgctgtgtaaaagtatggagtagtcaggaaggcaggccgacgtgacgtcggcctgtttcaggatgcgttaggcggcaggcagctcggccagcggccagcgcgggcgaaccgtcacgccgagctcggctttggcgccggtttgcagacgcaccatgccggcgtaggcgatcatcgcgccgttgtcagtacagaactcagggcgggcgtagaacacctcgccgccgcgtttttgcatcatctccgccagcttcgcccgcagggtacggttggcgctcacgcctcccgccatcaccagacgcttaaagccggtttgctccagcgcgcggcgacatttaatcatcagcgtatcgacgaccgcatcctcaaacgcccgggcgatgtcggcgcgggtttgctcatcgtcgccgttgctgcgaatggtgttggcggcgaaggtcttcaggccggagaagctgaagtccagccccggacggtcggtcatcggccgcgggaagacaaagcggccttcggtgccctgggacgccattttcgacagcatcggcccgccgggataatccagtcccagcagcttcgccgtcttatcaaaggcttcgcccgccgcatcgtcaatcgactcgcccaacagttcatactgaccaataccggcgacgctaatcaactgggtgtggccgccggaaaccagcagcgcgacgaacgggaacgccggcggattatcttccagcatcggcgccagcagatgcccttccatatggtgtaccgggatcgccggcacgttccaggcgaaggctagcgaccggccaacggtcgccccgaccagcagcgcgccgaccaggcctggacccaccgtataggcgacggcgtcgatatctttcgccgtcagaccggcttctttcagcgccgcctggatcagcggcaccgttttgcgcacgtggtcgcgcgatgccagctccggcaccacgccgccgtaatccgcatgcagtttcacctgactatacaattggttggctaacagaccttgctggtcgtcataaatcgcgatgccggtttcatcgcaggatgtttcaatgcccagtacacgcatgagttgttttacctcgcttcaataccgcgcagtgtaggtccaatgaacggcgatgtaaaactttgctcacccctggtgctctcttcgtgtatactcctcacccttataaaagtccctttcaaaaaaggcgccggtgctttacaaagcagcagtagttgcagtaaaattccgcaccattttgaaataagctggcattgcggccagcggcaaaccgaattaatcaaaggtgagaggcacatgccggtaattaaagtacgtgaaaacgagccgttcgacgtagctctgcgtcgcttcaagcgttcctgcgaaaaagcaggtgttctggcggaagttcgtcgtcgtgagttctatgaaaaaccgactaccgaacgtaagcgcgctaaagcttctgcagtgaaacgtcacgcgaagaaactggctcgcgaaaacgcacgccgtactcgtctgtactaatctgttgagagcgacgctctcaattcagaccgagttgtagttgtaaggccgtgcttccgaaaggaatgcgcggcttattttcgtttatagtcatcagaaataacggggcttatggctggacgaattccacgtgtatttattagcgatctgcttgccagaaccgacatcgtcgatctgatcgatgcgcgggtaaagctgaaaaagcagggcaaaaattttcacgcgtgctgtccgttccataacgaaaaaaccccctctttcaccgtcaacggtgaaaaacagttttaccactgcttcggctgcggggcgcacggcaatgctatcgacttcctgatgaactacgacaagctcgagttcgtggaaacggtcgaagagctggccgccatgcacaacctcgaagtgccttatgaagcaggcaacggacccagccagatagagcgccatcaacggcagaacctctaccagttactggatggtctgaatgcgttttatcaacagtctctgatgcagcccgccgccgatcctgcgcgccagtacctggcgaaacgggggttaagcagcgaggtgattacgcgctttgccatcggctatgctcccccaggttgggataacgttttaaaacggtttggcggcaatcaggaaaaccgccagtcgcttattgatgccggcatgttggtcaccaacgatcagggacgcagttacgaccgcttccgcgaacgggtgatgttccccatccgcgataagcgaggccgggtgattgggtttggcggacgggtgctgggcgatgccctgccgaagtatctgaactccccggaaaccgacatattccataaaggccgccagctgtatggcctgtatgaagcgcagcaggataaccccgaaccaccgcgtttgctggttgtcgaagggtatatggacgtcgtggcgctggcgcagtacgacattaattatgccgtggcctcgctgggtacctcgaccacggccgaccatatccagctgctgttccgggtgacgaataacgtcatctgctgctacgacggcgaccgggccggccgcgatgccgcctggcgcgcgctggagacggcgctgccgtacatgaccgatggtcgccagctacgctttatgtttctgcctgacggcgaagacccggatacgctggtgcgtaaagagggcaaagcggcgttcgaggcgcggatggagcaggctcagccgctctccacgttcttgtttaacagcctgctgccgcaggtcgatctgagtactccggacgggcgcgcgcagctgagcacgctggcgctgccgctgataacccaggtcccgggcgaaacgctgcgcatctatttgcgtcaggagttgggcaataagctgggcattttagatgacgcgcagcttgaacgattaatgccaaaacaggcggaaaatggcgcgccgcgtcccgcaccgcagctaaaacgcacgaccatgcgtatactgataggactgctggtgcaaaacccggatctggcgccgttagtcccgccgctggagggactggactcgcgcaaaatgccgggactgagcctgttcagcgaactggtgaagagctgtctggcgcagcctggtctgacaaccgggcaacttttagagcaatatcgcggcacaaaagaggcggcaacccttgaaaaactgtcgatgtgggacgatatagcagataaagacatcgctgaacaaaccttcaccgactcgctcaaccatatgtttgattcactgctggaactgcgacaggaagagttgatagctcgcgatcgcacacacggtttaagcagtgaagaacgccgggagctctggaccatcagccaggagctggcgaaaaaataaatgacagacaatatccttcacgttgtatcaaagcagtaagaaaacgcagaacaacgtgaaggaaaagtatttaacggcttaagtgccgagtatcgatcgggaagcccccgacagccgcgcagaggcgcagcggcaataatataagtacgccctcgctttaaatgtcgacagcccgtctgccgacaccaatcaaacgaattaagtgtggataccgtcttatggagcaaaacccgcagtcacagctgaagcttcttgtccaacgtggtaaggagcaaggctatctgacctatgccgaggtcaatgaccatctgccggaagatatcgtcgattccgatcagatcgaagacatcatccaaatgatcaacgacatgggtattcaggtgatggaagaagcaccggatgccgatgatctgatgcttgccgaaaacaccgcggatgaagatgctgccgaagccgccgcgcaggtgctctccagcgtggaatccgaaatcgggcgcacgaccgacccggtgcgtatgtacatgcgtgaaatgggtaccgtagagctactgacccgtgaaggcgaaattgacatcgccaaacgcatcgaagacggcatcaatcaggtgcagtgctccgttgccgaatatccggaagcgatcacctacctgcttgagcagtacgaccgcgttgaagcggaagaagcccgtctgtccgatctgatcaccggtttcgtcgatccgaacgccgaagaagatatggcgccaaccgccacccacgttggctccgagctgtctcaggaagagatggatgacgacgaagacgaagacgaagatgaagacgccgacgacaacagcgatgacgacaacagcatcgacccagagctggcccgtgagaaattcgccgagctgcgtacccagtacgagctgacgcgcgacaccatcaaagccaaaggtcgtagccatgccgccgcccaggaagagatcctgaagctgtctgaagtcttcaagcagttccgcctggtgccgaagcagttcgattacctggtcaacagcatgcgcagcatgatggatcgcgttcgtactcaggaacgtatcatcatgaagctgtgcgttgagcagtgcaaaatgccgaagaaaaacttcatcaccctgttcaccggcaacgaaaccagcgaaacctggttcaacgccgcggtggcaatgaacaagccgtggtctgagaagctgctggaagtgaaagaagatgtgcagcgcggcctgcagaagctgcagcagattgaagaagagaccggcctgaccatcgagcaggttaaagatatcaaccgtcgcatgtccatcggcgaagcgaaagcccgtcgtgcgaagaaagagatggttgaagcgaacctgcgtctggttatctctatcgccaagaaatacaccaaccgcggtctgcagttcctcgacctgattcaggaaggcaacatcggtctgatgaaagcggtcgataagttcgaataccgtcgcggctacaagttctcgacctacgccacctggtggatccgtcaggccatcacccgctctatcgcggaccaggcgcgcaccatccgtattccggtgcatatgattgagaccattaacaagctcaaccgtatctcccgtcagatgctgcaggagatgggccgtgaaccgaccccggaagagctggctgagcgtatgctgatgccggaagacaaaatccgtaaagtgctgaagatcgccaaagagcctatctccatggaaacgccgatcggcgacgatgaagattcgcatctgggggatttcatcgaggataccaccctcgagctgccgctggattctgcgaccaccgagagcctgcgcgcggcaacgcatgacgtgctggccggcctcaccgctcgtgaagcgaaagtgctgcgtatgcgtttcggtatcgacatgaacaccgaccacacgctggaagaagtgggtaaacagttcgacgttacccgcgaacgtatccgtcagatcgaagcgaaggcgctgcgtaaactgcgccacccgagtcgttctgaagtgctgcgtagcttcctcgacgattaatcgtcgcggggcatcgtctacagcctgttaaaaagctccctgcggggagctttttttatggcgttcaggtggccatcccgggaaagtcgcctctctccgctactggccgcgggttgccagggcatcgtccagttcacgataggccgccaccagcttatcgagcgtcgcccggtttaagccgctgggattaggcagcacccacacctgggtcgtcccgatggtcatagcctgtttcccccacttcgcgccgcgctggttaaaggccagctcgaaggcctgcttgccgagcaccgccagcgcctgcggctgatactcctcaatcttccgcaccagctcacggccgccgctgcgcagctcctgcaaggcgacctcgctggcctgcaccgtcggacgctctaccagcatggtgatgccgcagcgcgtatccagcagctgcagctcctcttccggcctgagctgccgatcggtgaacccggcctgatggatgaccttccagaagcgattgccaggatgggcaaaatgaaagccggtatgggcggaggacttccccgggttgataccgcaaaagacaacgcgcaggcccggcgcaaggatatcgctaatcatgttttctccggctgtatggctaaaacatgattataaaggattgaaaatgcattgtttataaaaacagcagctgcgcgctttacgctggattgcaatcgccagttactttataatccctcgccacggccccttagctcagtggttagagcaggcgactcataatcgcttggtcgttggttcaaacccaacaggggccaccaaattttagatttaaaatcatataattaagccactcgaaagagtggcttttttgttcctgaattttaaaatggcaccacaaaccgctgagcagcgcgcatggcttagcgtgttgtcgctatcccattaagaggataaaaagtccgttataacgcagggaaaatttgcgcttacgctaaaacagatagcattctgccttagcaaaatattgctcagagcatctcgggcagcccataaccgccgcactcctgttgacttctgtctaactacgcaacgtagtcttaaaatatctttcattcctgcaatgctggaattcatactactcacgataaatgtaacaacacaggtcaatttccgaataataaccatagcctgcgccagctgttcgaaatcaacgcgttcctccccccgctcttatatataacccgctgacttacaaaaaggatgaaatgatgaaaatacgggatatatcaatcagtacctgtctggcactgttattaatgggttgcgtagctaaaccacccatggcgacggaaaatgaaatgaaagaggccgccgcgtttgcttttaatgtcgatgcttcgcaggtgacaatttccgatgcgaggcagcaggatgtgaaaaccaactttgtggtcaccatcggcaaaaccagccatcgctgctatgtgacgaaggccgccgagccgaagctttacgggctgatcccgctgggcggcggtagcaccgtctcggatgccatctgcgccggcgccaacccgacgctagcgagcaaaacctgcgacgccctgtcgcaaaaagcgggccgctgctgagcctttgcgcagaagaaggccgctaactgcgcatttagtcactttttctgccgttttaccgcggtcgcttagttcagcgaccgcacctgctgataagaattgagccgttcccgcagcgaggtgagccagacatccggctcctgacggcagatttcggtgaggatcggcgtcagcaccagctcggcttcatggaagtcggtccactccggcggctccagtgaaaaaggatcgttcatcagccaaatcaccatcggcgtccaggcgcgcggatccagttgcagataatcctgacagcgcatcatatctcgggtccgcgcctcatcggggtcgacatcctttcccaccgcggcgctactcattgccagtactgttattcctgccatcagatgtttccaaacccattttcgccagaaggcgcgtttttctttcgccattgttattattttacctgccagttgtcgccggacgatattccgagaactcaccttaataagagcagattaatcgtttgcattttttttaacagcagaccgcgctgaagcaagtgaacgcccgttcctacagctgtcatccagctatgcaaatatattcgtctggctcagctccacaatatttccctggcccaaaacgatttgtgttacaattacgccttataacggcatcgataaaaataacccccgccgcacctgcaccaggcatcgcccttcttttttcatatcaggatttacgcccccatgaatgcgataatcattgacgatcatccattggcacgtatcgccattcgcaaccttctcgacagcaacggtattaccgtcgcggcagagctcgacagcggcgctcatgccgtgcagaccgcggaaagcatgcagcctgacctgctcatcgtcgacgtcgatattccggagctcagcggtatcgaggtgctggagcagctgcgcaaacgccgctaccagggaacaatcatcatcatttccgctaagaatgaactgttctacggcaaacgcagcgccgactgcggagcaaatggttttgtgagtaaaaaagagggaatgaataatatcctcgccgcaatcgacgcagccaataatggctacagctatttccccttttcactggaacgcttctgcacccacggcatcaccgatcaggaccggctggatacgctgtcaacgcaggagatgaaggtgttccgctatattctcagcggcgtcgactacaccaccatcggcagcaaaatgaatatcagcaataaaacggtaagtacctataaggtccgtctgatggataaattaggctgcagcaccctgcttgagctatatgactttgcgcaacgcaataaaatagggtgatggcatggcggttcgtcttattttatccgtcgttgtcgggctggcgctgagcctctcgcctgccgcgtatgccatgaaacagctggagctgaagagccattctcatatcgcggcgatcgatatcccgcttagcggtaaggagaaagcatggctggcggcgcagcctacgctgaccgtcgggacctggcttcccgagaggacgcccatcgtctatgacggcgacgagaaaagttatcagggcattaacgccgactatctggcgctgatggcgcacagcctcggactgaaggtgattatccgccagtatgacaccgagcagcaggcgctcaccgccctggccgaccgtcaggtggataccctgctcactcaggtggcgcaccgggatgcgctcgccccgggcctggatcaatccgcgccgctgcttaaaacctggccgacgctggtcacctcgctgaaatcccctctgccgccgctgaccactgaccgccgcgtcacgctggcctgcacccgcgattgcgcttttttcgatattattcagcaggcgtttcccaacgccaaaatcaccctttatgatagcgactatcaggctctcgcctcggtggtcagcggcgagaatcagtattttatcggcaacaacatcaccactggccactgcatctcgaaatatttctcgcaatcgctggttatcgcgcactattttcgtcagcaggagcaacacaaccgctttgtcacccgtgacgatcggccagagctgcatcaactcttcgaccgttttatccatgccgtcgacagcgacaccgcgatgcggatcatgcaaaactggctcaaccgtggcgatctgtcgtttctcaataccccgcttacctttagccccgaagagcagcgctggctgcagaagcatcgtcgcgtccgcctgctggtgaacccctattttccgccatttaccctggtggataacgaggatgaactgcgcggcatcatggccgatatgctgaatattgtctcactccagaccggcctgcagtttgaccccattctggtgcgcaaccgtcaggctctggcaaagcgcatggaaaaagaggactgggcgatcatgcccgccgccaccctgaccccacagccgcaggcctacgtcaccctcagcgatccgctcattaacgtggcctttgtgctggtcgcccgcggcagcgcccccgaccagcatctgctgacgcgctcggcgcggatcgccctgccggtcgggcctatcgccgcccatgatctgaaagcgcgttttccgctgattaactgggtggaaacggataacgttggcgtcgccatgaagatggtagaggaaggcgaagtggatgccgccgtagcctcggagctttccgcccgctatatgatcgaccactactatccacagggtctgcactacacccgcattgatggactccccgtcgcggccattcggctggccatcccgcgcgatgaaccggtgctggccgccattcttaacaaagcgctgcaggttattccgccacgggatattctgcagatgaccgagaagtggtcgaaaatctccagtcagcaaatagagaactggagccagtacagccgccagttttaccagctgatcgcctttgcgctggtgctgatcgccatcagcctcggctggggactctccctgtgtcgggaagtgcgcaaacgtaaagactcccagcagcggctcgaggaggagctggcgcagaaggaggccctctcctgtgcgctggagcgcgaaaaagacaaagcgattcaggcgacaaaagccaagagccgctttctggccagcatgagccacgagctgcgcacgccggtgagcgccatcgtcggctttctggagctgctggcgaaacctgagctgaacgtcggccagcgtaaagaggcgatcgagctggcggggtcgacggcgcaaaccctgctgggacttatcggcaatattcttgatatcgacaagattgaatcgggaaaataccaggttaccccgcagtggagcgatgtcgcacagttagtgtcgcagcagtgtcataccttcgacgcgctggcgcagcaaaagggcatcgatctgcactaccataacgcgctgcaggaaggtaccatgctgtgggtcgacccgcaggcgctacggcaaatcctcaataatctcatcggcaatgcgctgaagtttaccgtcgaaggcgcaattcaggtctcctgccggctgacgccggcgaatgagacacagggagagctggccctcatggttagcgacagcggctgcgggatcagtgaagcagagcaggccaccctcttccaccgctatgcccaggcgcgccagggacgacagcagaccggctccggactggggctggtcatttgcaaagagctggttgcgctgatgcagggtcgcctggagatggtcagccgtccgggcgtggggaccactttcaccatcacgctgccggtcaaggcgagccgctgcgcgatccacgcgccgcaggcgtcgcccgccagaccgcaggctctacccgggctggcgatactgatagcggacgatcaccccaccaaccggctactgctcaagcgccagctcagcactatcggctatagcgtcgatgaagcctgcgacggtgaagaggcagagaataagctcgccagcaaacattacgatctgctgataacggacctcaatatgccgaagaaagatggcctggcgctggcggcctcgctacgccgtcgctatccgggcctggtaatttggggcgtgactgccagcgcgctgccgcagtcgcgggaggcgtgtctggccagcggcatgaatatgtgtctgtttaagccggtgtcggtccagacgctgagtcatgagctcagccgtttagcggtgggccgcgcatcacctcacgctacccggcacctgaagctcagcgtgctgagcgagaatacggggggagaccaggcgctgatgaatgagatgctggagacgttccgcgatgcgtcggccgcggatttacaggctgccggacaggcaatcgcccggcatgagccgcagacctttctgcgggcgctgcaccgcctgcacggttcagcacaaattctggggattactgcgctacaacaactgtgcgccccttttgaggcaaagcggcctgattcgctgacgccggcaagctgtctggaggtggtacagcgcatcaccggcgtcatgcgcgagatcgatggcgaaatcgacgccctgatcggccgctagccgttccgctcgggcagtccgcctgcccgagcgttaaggggacatccttgtcagttttttcctctgcgctctctcagggtggaacaagtatcagttgcctgccaccagcatctcgctatccaccacaatgccctcttcagcgcccttcagcaccagattcgcttcgtaatatttaccggctttcagcagttcttgcgcctgcgctaccgccttacgggtctggttaagcggcatcagatactggttctcaatcaccccaataccggccaggcgcagggtatcgatagcccctttctgatcgcctttcgccagcttttcgttggcggattggatagcgctctctttttccggcgtggccacatagtcttcagacagggcgatagaggcgttaatgatcacatagcgatcggcgatcattttggctttagcatcagttttcacaaacttcgcccagctggcatcatcggcggccagcagcgcggcggcgtcgtctgtcagttttttggcgctatccggctggccatggaacagcgccagacgggcgaactggatgtcgcgcatcgcattcgcgccctgcaccgccacctgcagcacatcggcggcttctttctgtacctgcgtcgtggctgccgcggctggcgcggctggcgctgccgtcgcgctatctgttgcccataccggagaggtactcatcatggttgccagcaggctcgccagaatgacttttttcatcgttgactcctgattaaaatcggtaagcatcaccaaacgcagccagcttaaaaaatatcgcgggcattgagaatcagagcccggaagtaatattgcgggcctggtctgacagctgtcagaccaggcgtataaagtggcctcggcgctcttatttacgcctgccgatcgcgcggcctactattttcctcagacctttcttttggcccgctgaataaaccctcacgctttttattcagcgtcaggccgccaaccgggatctgcggagcaattatgtttatgtttagccattacaccttaaatgcgtttagcccacgcgtcttcattcgatataaacggcatgcctgcctgatggcggtattgctgtttatctgcggagcctgttgtctggcctggccgttggtcgccggctggtatctcgccacagtaaccggcatgttattgatgatctgcggcttctattcgctgtacagcctgattgtcttccgccagcagcactggaaatcacgcctggtggcgctgatcttcgccatcgcctggatcgtgctcggcctgagctttgtcgtcaatcccctcaacggtatgagcagtctggccattttatttggctttttatttgttctcggcggtatttcccgcatcgttaacggatgtcaaacccgcaaacaaagcggcgctggctggaatatttttatcggcctgttggatttacttatcgcctgcctgtggctggccatgaacccgcagcaaagctggttatttattaccgcctttatcggcgttgaaatgatatttagcgccatcggcttgttggtcctgcgcaataaaatgaagcacgctgaggcttaagccctattttgacactggagaagaaaatgaatttacctaaagcactcgtattgaccgtggcggctaccacattctgtctgatgaccagcccggcgttcgcggttgaggaaaccacgccgcagaatatgacctgtcaggaatttatggatatgaacccaaaaagcatgaccccggtggccttctgggtagtgaatcgcaacaccgactttagcggcggcgactatgttgactggcatgaagtcgagaccgtttcggtaccgaaaatgctgcaggagtgccacaagaaccccgccgctaaacttggcgatctcagcgcggtcatcaaaaaataacccccccggcatcaggccggggaaacccgccgcgctgcggcgggtcccgctttactcatcgataccgcattcgcacggcagatggcggccgataagcttgcgatacaaaaacgccccgataatcgcccccaccaccggcgccagcagcggcaccagaaagtaagggatcgctaggccaccggtaaaagcgatcgagccccacccggccagactggtaaacagttttgggccgaagtcgcgcgccggattcagcgcaaagccggttagcggccccatcgacgcgccgatcacggcgatcagcaagccaatcagcaacggcgccagcggcccgcgcggaattccgttgccgtcgtcggtcagggccatgatcatcgccatcaggattgccgtgatggtggtctccacggcaaacgcttgtataaaagtgatatgtggatgcgggtacgtggaaaagaccccggccaggttaagactggcggcagtgccgcgcacgatatgctgactctgttcaagatcgagaaacagctggcgatagagcccatacaccagcgcggcggcgcagaaggccccggccgtctgggcaacaataaacggcagcaccttgcggcgttcaaaacaggcgaacagccacagggcaatggtcaccgccggattaaggtgcgcgccggagacaccggccgtcaggtagatggccatggcgacgccaaggccccagataatactgatctcccactgaccaaagctggccccggcgacccgcagcgcagcgacgcagcccgcgccgaagaaaatgagcaatccggtgccaagaaactcggccacgcactgcccggttaaggtagaagtctggttcattatcggcatcctgaaatagcacgttaaagagagaggctggcgcgagcgcccgtttaattcgcctgaccggccagtagcagcccggtggcgaccgcattgcgcggcccttctgttccccgaatattgccctgcccggcgaccacgccatagtgcgacaaggcttccgtgataagctgcgggatctcaaagtccagcgatgagccgcccaccagcaccacaaaggcgatatcgcgaatggaaccgccgggtgagacctggcgcagcgcgcgcaggcagttggtgacaaacactttctctttcgcctgccggcgcacgagacgaattttttccagcgggctggcgttatcgatcggcaccagttcgccctccttgatgtacaccactttggcgaacaccgccgggctgagggcttcccgaaagaactccaccgcgccattctcgtgacgaatactgaacaggctttccactttggccagcgggtatttttttatcgcttccgccagcgaaagatcctcgaggcccagctcggttttaatcaacaggctgaccatattccccgccccggcgagatggaccgccgttatctgcccctccgcgttgacgatcgccgcatccgtcgagccggcgccgaggtcgaggatcgccagcggcgccgcacagccgggagtggttaacgccccggcgatggccatgttggcctccacgccgcccaccaccacctcggtctgcagtcgggcgctcagttcgcgggcgatgacctgcatttgcagacgatccgctttcaccatcgccgccatcccgacggcattttccatggcgcactcgccggccatcccgccctgcaccttgcgcggaataaacgtatccaccgccagcagatcctggatgtatatcgcgctcatctcatggccggtcagggacgccattaccttgcgcacccgctcaagcatgccgccggcgtgagtgcccggttcgccgcggatgtcgcgtaccggagcgcaggcgctcatcgcctgcatgatggcttccgcgccctcggcgacatcggcctctccgcggcgcttttcgccgctaatgtagaggttgcccgccgggatcacccgcgactgcacgtccccctgcggggtcttgagcaccaccgcggaacggttgccaatcagggcgcgggcgatggggacgatggcctgggtctcttccgggcttagcccgaagaaggtggcgatcccgtagggattcgacaggatccgcaccacctggcccggcgcggccacttccaccgccgccatcaccccctcggggacctgctccagcagcgtcacttcatctaccaccggcagggttttacgcaggcggttgttcaccagcacgccgtcgtcctttttgaggatcgccgccaccacgttgatcccccggtcgagcgcctcattgagccaccacacggcgtcaaggaaatcgacggcgtcgtcaatcagtacgatccacccctcggcatactgcgccgccggcagcgtcgccagccgcccgagggcgatagtcgtccccacgccaacgcccaccccgcccggcgtctgcgggttatgaccgatcatggtcgattcggtgataatggtctcggtgatggtctccatcgccacatcgccaatcaccggcgcggcttcgttaagatagatgcgagagacatcgctcatcgaccacggtgttttcgccagggcctgctccagcgcggcgagggtcccggcgatattgtcccgcgtccctttcatgcccgtcgtcgcgacgatcccgctggcaacaaacgccctcgcctgcgggtcatcggacgccagcgccacctcggtggtggcgttgccgatatcaatcccggctattaacggcatgctgacctccgcttagcttcctttacgcagcttatgccgctgctgatacacttccgccgactcccggacaaaggcggcattcactgtcgcatgccaggtgtgctccagctcgtcggcgatcgccagcagctccgcctgcgaggagcggaacgggcgcagcgcgttatagatagccagaatgcgctcgtcaggaatggcgataagctccgccgcgcggcggaaattgcgcgccaccgcatggcgctgcatctgctcggcaatctgcgcctggtactcaagggtctggcgggagatccgcacatcctgcgggcccacctcgccagagagcaccttctcgagggtaatatcggtcaatggtttaccggtaggcgtcaggatatgctccgggcagcgggtggctaacggataatcctgcacgcgcatggttttctcgctcatggtcactcccttactaagtcgacgtgcagggtgacgggctcggcgtcctgcaccacatgtttggtctctttgatatgaaatagcgcggctttggccataaatttcggccgcaccatctgatcgttcaccaccggcaccggcgaaggtgactctttgcgcgcatagcgcgcggcgtttttgccaatctgccggtaggtctccagcgtcagcagcggcgcctgggagaacagctccaggttgctgagcggcagcagatcgcgctgatggatgaccgtggtccccttcgactggataccgatgccgatccccgagccgctcaggttggccgcatcccaggccataaaggagacgtcggacgtgcgcagaatgcgcaccacccgggcgtgaagcccctcttcttccaccccggcaatcagctctttgaggatcgcgccatggggcatatcgatcagagtgtgatgctggtgtttatcgaaggcagggccgacgccgatcaccacttcatcggcgcgttcatcggcagaagctaccccgccctcgcgggttttcagggtaaaagagggctgaatttgggttgtctgttgcacaggaataccgccttattcaatggtgtcgggctgaaccacgcccggaatatttttgatctccgcccagcgttcggcagagatgcgatagccggtgcccggcccctgatagtcattgatgtcgttgaccgcactcaccacctcgaactgccgatcgagaatggccgaggtctgcaggtaatcgccggtgacccgctggcgcagcatattgagaatattgctggcgatatcctcaaagccgctgcggctcagcgcgccgacaatatcgaggccggtgatgttgcgcttcatcatctcttccaccgcactcagatcctccaccacgttacgcggcggcatctcgttgctgccgtgcgcgtaggtggcggcctccacctcctcgtcggcgattggcggcagccccagctcgcggaataccgcctggatcgcccgcgccgctttctggcgaatggcaatggtttccgcctcggtcaccggacgcaggccgccgtcaaccatcaggtcacgctgcaggatgttgtaatcatcaaaatcttccgcatcgaagttcgagccggcgaacatgttgtcgtagttcggcaccgcgctgtagccggagaaaataaagtcggtgcccggcagcatctgcatcagggtgcgcgcggtgcggcgaatatccgagtgggagaaagtctggtcgttggcggacgccacttcgaggtcgagcatagaggcgatcaggttttccgccagcaccgcccgaatgcccgacggcacagcgccggtcatgccgatacagctcaccgcgccgttttgcagcccctgaaccccggcgcctttggtaatgaagatgcagcgcgattcgaggtagagcatcgacttgctctccgaatagcccatcagcgcttcggatccggtgccggaggtgtagcgcattttcaacccgcgggaggcgtaggccgaggcgaggaacgcctttgaccacggcgtatcatcgccgtcggtaaataccgcttccgtgccgtagaccgacaccgtctcggcgtagctggttaagccacgcatgcccagctccagctcggtggcctcttccaccgagcactgcgtcaacacgccggggcggccgcactgcgaaccgaccaacagcgccagggcgttaaacggcgcgtagcgcgcgataccgaccgtggtctcctgttctgagaagccgcggatcccggcctcggcggcgtcagcggcaatctgcaccggattatctttgagattggtgacgtggcactggttggagggggtccggcgggcacgcatcttctgcagcgccatcatcatctccaccacgttcatctgcgccatcacctcgaccgctttggccggcgtgatggcggtagtgatggcaatgatctcctcccggctgacgtgaatatccaccagcatacgggctatttccaccgcctccaggcgcattgcctgctctgtgcgctcaacgttgatcgcgtaatcggcgataaaccggtcgatcatgtcaaactggtcccggcgtttgccgtccagttcgacgatcagaccgttgtccacttttactgaagagaccgggtcaaaggggctgtccatggcgatcagcccctcttcaggccactcgccaatcagcccgtcctgattgacggggcgctgggccagtactgcaaatcgttttgatcttttcattgttcatcggctcaaaaggtgaaatccgcagacggtagcgaatacgccgggccagcgtcgttgccgcccggccattaccggcaatagcggaactttaaatgagccagtggtgaaaaaaataaatttaatttcgtttcaatttggcacacgaaatctaccgacagtttcactatgaaactttactccgccggcaaaaataaaaaatgtgatcgcccgcaatgatataaatcaattaataaaaaacgcccttaattacgttttgccgacgctattttaaccctattgactaaatcatggcgggcgacaaaataacgctgactaaaataaagcaagccaaccgaatggtaatagttttttactatcgccccctactgactattcgcgccagcgttaccctggtgcgggagagaatgatgaacaagagccaacaagttcagacaatcaccctggccgccgcccagcaaatggcggcggcggtggaaaaaaaagccactgagatcaacgtggcggtggtgttttccgtagttgaccgcggaggcaacacgctgcttatccagcggatggacgaggccttcgtctccagctgcgatatttccctgaataaagcctggagcgcctgcagcctgaagcaaggtacccatgaaattacgtcagcggtccagccaggacaatctctgtacggtctgcagctaaccaaccaacagcgaattattatttttggcggcggcctgccagttatttttaatgagcaggtaattggcgccgtcggcgttagcggcggtacggtcgagcaggatcaattattagcccagtgcgccctggattgtttttccgcattataacctgaagcgagaaggtatattatgagctatcgtatgtttgattatctggtgccaaacgttaacttttttggccccaacgccatttctgtagtcggcgaacgctgccagctgctgggggggaaaaaagccctgctggtcaccgacaaaggcctgcgggcaattaaagatggcgcggtggacaaaaccctgcattatctgcgggaggccgggatcgaggtggcgatctttgacggcgtcgagccgaacccgaaagacaccaacgtgcgcgacggcctcgccgtgtttcgccgcgaacagtgcgacatcatcgtcaccgtgggcggcggcagcccgcacgattgcggcaaaggcatcggcatcgccgccacccatgagggcgatctgtaccagtatgccggaatcgagaccctgaccaacccgctgccgcctatcgtcgcggtcaataccaccgccggcaccgccagcgaggtcacccgccactgcgtcctgaccaacaccgaaaccaaagtgaagtttgtgatcgtcagctggcgcaacctgccgtcggtctctatcaacgatccgctgctgatgatcggtaaaccggccgccctgaccgcggcgaccgggatggatgccctgacccacgccgtagaggcctatatctccaaagacgctaacccggtgacggacgccgccgccatgcaggcgatccgcctcatcgcccgcaacctgcgccaggccgtggccctcggcagcaatctgcaggcgcgggaaaacatggcctatgcctctctgctggccgggatggctttcaataacgccaacctcggctacgtgcacgccatggcgcaccagctgggcggcctgtacgacatgccgcacggcgtggccaacgctgtcctgctgccgcatgtggcccgctacaacctgatcgccaacccggagaaattcgccgatatcgctgaactgatgggcgaaaatatcaccggactgtccaccctcgacgcggcggaaaaagccatcgccgctatcacgcgtctgtcgatggatatcggtattccgcagcatctgcgcgatctgggggtaaaagaggccgacttcccctacatggcggagatggctctgaaagacggcaatgcgttctcgaacccgcgtaaaggcaacgagcaggagattgccgcgattttccgccaggcattctgagtgttaacgaggggaccgtcatgtcgctttcaccgccaggcgtacgcctgttttacgatccgcgcgggcaccacgccggcgccatcaatgagctgtgctgggggctggaggagcagggggtcccctgccagactataacctatgacggaggcggtgacgccgctgcgctgggcgccctggcggccagaagctcgcccctgcgggtgggtatcgggctcagcgcgtccggcgagatagccctcactcatgcccagctgccggcggacgcgccgttggctaccggacacgtcaccgatagcgacgatcatctgcgtacgctcggcgccaacgccgggcagctggttaaagtcctgccgttaagtgagagaaactgaatgtatcgtatctatacccgcaccggggataaaggcaccaccgccctgtacggcggcagccgcatcgagaaagaccatattcgcgtcgaggcctacggtaccgtcgatgaactgatatcccagctgggcgtctgctacgccacgacccgcgacgccgggctgcgggaaagcctgcaccatattcagcagacgctgttcgtgctgggggctgaactggccagcgatgcgcggggcctgacccgcctgagccagacgatcggcgaagaggagatcaccgccctggagcggcttatcgaccgcaatatggccgagagcggcccgttaaaacagttcgtgatcccggggaggaatctcgcctctgcccagctgcacgtggcgcgcacccagtcccgtcggctcgaacgcctgctgacggccatggaccgcgcgcatccgctgcgcgacgcgctcaaacgctacagcaatcgcctgtcggatgccctgttctccatggcgcgtatcgaggagactaggcctgatgcttgcgcttgaactggctggcgtcaatatcgtactgcttcattttgcgccacagggtggtgcggccaatattgagcagctgcgacatctcctgcacccgcccgctggtcacccgggcggcgtgaataatagcttccttttcgatggcgctaaaagtcaggctggccggcagcagcgatgacgcgctatccccgcccggccgctcggaaaagagatattccggcagattactcaggcgaatgtggccgttgtcgctgctgatggcgatattctcaatgacgctattgagctcaaaatcattccccggccacgagtaggccaccagctgcgccagcgcgtcatcgtccactttcagtcgcgaagagaaacgcttctccaggctcttcaaccggttatgcaccagcgacggaatactgttgcgtcgggcgcgcagcggcgggatgacgatctcaaaggagtgaagcgcatagtacagctggcggctaaagcggttctgttccaccagattggccagatcgacggtggtggtggcaatcaccttcacatccaccgggatcaggcgccgggcgtcgaggcgggtgagcacgccctgcttaatcacctgcagcagagccgactgcagctccggcgccagatactcgatcttttccagaaacagggtgccgccgttggccagctcaaggcggctcaggcgaccattttcatcgtcggtaggggcgctgcccataaagtcctggcccagcacgctgtcggcatatagctggcagttgacggcgatataggggccgcccgcccgttcgctttcattgtggatagcctggctcagcagctctttcccaaccccctcttcaccgcacagcagcaccgggaagccaccgcgcgccgcctggcggccaaagtggatcaggcgtcgggtttccggatcgtcggcagacatctgttcaaaggtgtggctgactttaccgagctggctggtcatcagctgccgcatctgctccaccgggtgcagcagcagaataaaactgttgccttgcgcctcgacaatcggttttaaggtgatcaccgcgtcgacaaactgatgctgactttcaaaggtgacttcgacgtgattcaggccgcgggcgtgtttgatggcgcggcgcagcagcgccgggagggtcaccagatcggcgatatttttcccctggctggcctgaacatcaagatgcagcagtctcgccgcctgaacattgagaaactgcagcacgccctgttcgttccacgccatcaccccatcgtccatgctctccagcaggccgtacatctgattgaggtggcggttggattccgccagcaggctgtcggtaagcagggagttacccacctcgcgggcgatggccagcgtcagggagaggtcggcgctggactggtgctcgaccagacagcaaagcgagatagagccgaacagccgcccgtggttatcaaacaccggcgtcgagcaaaaactccatggctgtagcgcctgcttaaaatgccgatcgccggcggtgttgatcggctggccctgcatcgcggccagcgacagcgcgcaggtgccgataatgctctccgcgcagtagctgccgtcgcgaaatcccagggcagccagctgggccagggtttgcggctcgccgcaacggctgaggatgcaggcagactcatcaagaataaacagcgcgcaggggcggccgtccataaactcccaggcgtcttccagcgccgcctggccgatggtcagcagcgcggttttacgccgacagatggagtcgaaggtcaggccctgggcctggtgcggcgtttgccaggtttcgcgctgcataaacttgctgcagcggtgccatgactgggcgatgacggaagagaccgccttcccggtatcctgagtctgaacagtcatatccttttccgcgttgtaccatagagaacccctccggcagcgactgccggaggggagaaagaaaaaccgctgacctgggccagcggtttagccaccgcgaattaacgcgccagccactgctggcctaacagatcggcggtgaggatagcggcatggacgctctccggggtcaccgcaaacggcatattatggatggtttccccttccgcgcaggtggctttcgccaccgcggcgattttctcgtcgatcccctctttgacgcccatctgcgcgagcgtcaccggcaggccgacgcgctggcagaagcccagcaccgtttcaatctcgtccatcgggctgttctgcagcaccagctgcgccagggtaccgaaggccactttctcaccgtgatacagatggtggcactcttcaagaatggtgaaaccgttgtggattgcatgggcagcggccaggccactgctttcaaagccaatgccgctgagataagtgttcgcctcgatgatgcgctccagcgcttcggtcactaccccggcctgcgccgccagacgggccttttcgccctccgccagcagcgtatcatagcacaggcgggcgaggctcaacgccgcctcggtggactgtcctccggccatgctggtggcgcgcgcatcgtagcaagctttggcctcgaaccaggtggagagcgcatcgcccatgccggagaccagcaggcgtaccggcgctttggcgataatcgccgtgtccatcaccaccatatccgggtttttcggatagatcagatactcttcaaactcgcccgcttcggtgtagatcaccgacagcgcgctggttggcgcatcggtcgaggcgatggtcgggatcaccaccaccggcagcttctggtagtaaccgatcgccttcgcggtatcgagggttttaccaccgccgatcccgaccacgccgcggcagccctgtttttgcaaaatcgccatcagacggttgatttccgcatggctgcattcgccgttaaaccgttccgcatggcagcgaatatcgtggctctgcaggccattcaccactttctctcccgccagcttcattacgaaatcgtcggcgatgacgaagaagctctccgccaggtttttggcatattgaccgaacagaacagcagcatcaggaccctgaagatatttggctggagattgaataacttttagcattcctttcaccctcaaataagtgcgcatgtagacatgatgagccctggcgttatccgcgccggccagtgaagcgcggcctgaacggagcgtaccggagcagtgcgatcactgtagggccggcagggaacaaaaaaatctttcgcctttttgttctgatatgaaacacaggttaattttttacgttccatattggaacaaaaaaccctaatctctgtcaggattgcgatcccgatccgctcctttgccgcataatgcccttacaatcctccgtgtttgaccgccttttctcccgcagtcggcagaaaatcagcaaaaaattttttcccacccgcttcgccggctatcctgaccgccgcttatggcagaagaaaaaaagcgcgccagctcgcattttcaccatatcctcagcaaaaacgttccataaagaaacaaaacaaggaggcaatgtttcgtaatgaaacccgatcgtcggggcattctttttttcgtccgctcagccagaatcatcatatcgccaggcacgctccaccgtcagacgatacccctacgcgatgaccgcctccgccagcagagaggcggcatcgaaccttctccaacggagcactgaataatgaaaaagctgattaaccgtgttgaagatgtactgaatgaacaattacaggggctggctaaagcccatccgcagctgaccctgcatcaggacccgctgtatgtgacccgcaccgacgcgccggtggctggcaaggtggccctgctctccggcggcggcagcggacatgaaccgatgcactgcggctatatcggccagggcatgctctccggcgcctgtccgggggaaatcttcacctcgccgacgccggacaaaatgtttgaatgcgcgatgcaaattgacggcggcgaaggcgtcttgctaattatcaaaaactataccggcgacatcctgaattttgagaccgccaccgagctgctgcatgagagcggcattaaagtcaccaccgtggtggtcgacgacgacgtggcagtgaaagacagcctctataccgccggtcgtcgcggcgttgccaacaccgtactgatcgaaaaactggtcggcgccgccgccgagcgcggcgactcgctggaagcctgcgctgaactgggccgccgcctgaacaatctcggccactcgattggtatcgccctcggcgcctgcaccgtaccggctgccgggcaaccctcctttacgctgaaagatgacgagatggagttcggcgtcggcattcccggcgagccgggcatcgaccgccgccgcttcagctcgctggaccaaaccgtcgatgagatgttcgataccctgctggaaaacggcgcttacagccgcacgctgcgccagtgggataccgtcaagggcgcgtggcaggaagtgcagcagagcaaaaccgcgctgcaaaacggcgaccgggttatcgcgctggttaataacctcggcgccactccgctttccgaactgtatggcgtgtataaccgcctcgcccagcgctgcgaagcgtccggcatcatcatcgaacgcaacctcatcggcagctactgtacttcgctggatatggcgggcttctccatcactctgctgaaagtggatgacgagacgctgacgctatgggacgccccggttcacaccccggcgctgaactggggaaactaaggagcacgacatgtcactgaacagaacgcaaatcgtcgactggctgtaccgctgcggcgatattttcaccaaagagagcgattttctcaccggcctcgataaagagattggcgacgccgaccacggtctcaatatgcaccgcggtttcagtaaagtggtcgaaaagctgccgtcgattgccgataaagatattggctttatcctcaaaaacaccggcatgacgctgctctccaacgtcggcggtgccagcggcccgctgttcggcaccttcttcattcgcgccgcgcaggtgacccaggcccaccagagcctgacgctcgacgagctgtacctgatgatccgcgaaggtgcggacggtgtcgtcaaccgcggcaaagcggagccaggggataaaaccatgtgcgacgtctggctgccggtggtggactccctgcgccagtccagcgagcagcacctgtcgatcgccgccgcgctggatgccgcctgcgaagtggccgagcgtgcggcccacgccaccatcactatgcaggcgcgtaaaggccgcgccagctatctcggcgagcgcagcatcggacatcaggatcccggcgcgacctcggtgctgtttatggttcagatgctggccgccgccgccaaagagtaaggaaattgcgatggtaaacctggttattgtttctcatagcgcccggctgggcgaaggtgtcggagaactggcccggcagctgttaatcaacgatggctgcaaactggcgatcgccgccgggatcgacgatcccgacagcccgatcggcaccgatccgcttaaagtcatggaggcgatcgaatccgtggccgataccgatcacgtgctggtgatgatggatatcggcagcgcgttgctcagcgccgaaaccgccctcgatctgctcgatccggcgattgccgcgaaggtgcgactgtgcgccgcgccgctggtggaagggacgctggcggccaccgtcagcgctgcctccggcgcggggatcgacaaggtgatcgccgacgccatgagcgccctggaggccaagcgggttcagctgggtttaccttcgccaacttctgacgccgcgccggcgccgatgcttgccgacgacggcgacacaaaatcggtgtcagtcattattaacaatcataacggcctgcacgtgcgtccggcgtcgaagctggtcgccgcgctggcgggctttaacgccgatctgctgctggagaaaaacgggaagtgcgtcaaaccggacagcctcaaccaaatcgcgctattgcaggtccgccgcaacgataagctgcgcctgctggcccgcggtccggatgccgacgcggcgctggcggcgtttcaggcgctggccgccgataacttcggtgaatcgcctgcggcgcaaccggcagcggctccggcaacgcccgagcgcgtcgaaggcgctgccctgcgctatccgctggccctgatccagccgctccgcccggctgccgccgatgccgcccgcgagcagcagcgcctgcgccaggccattgaccagacgctggcggatcttatcgccctgaccgagctggcggaaaataaatttcacgccgatatcgcggcgatcttcgccgggcaccacaccctgttcgacgatgacgatctgtttgatgccgccaacgatcgtctgctcaccgaacaatgcacggcggaatgggcatggcatcaggtgttgatggagctcagccagcagtatcgccagctggatgacccctacctgcaggcgcgctatatcgatatcgaagatattttgcagcgcaccctgcgccatctgcagggcgttcaggagagagtgccgacgcccggcgagccaacaattattattgccgacaacatttatccctcaaccgtcttacagctggatgccagcttcgttaaaggcctgtgcctgcgcgatggcagcgaacaggctcacggcgcgattatcgcccgcgcggcggggatcgcctggctgagccagcagggcgaggcgctgaacagcgtgcagcccggcgagactatcgtgctcgatatgcgccaccagcgccttatccgtgactaaaattcacgttgaccgttaccgctccgggggcctgcctccggagggtgagttttcgcttactcttcaggaaccactatgtctcaattcttttttaaccagcgcgccagcctcgtcaacgatgtgattgagggtaccattatcgccagcccgtggaataacctcgcccgtctggagagcgacccggcgatccgggtggtggtccgtcgcgatctgaataaaaacaacgtggcggtgatctccggcggcggcgccggccatgaaccggcgcacgtcggctttattggtaaaggcatgctgaccgccgcggtctgcggcgatctgttcgcctcgccgagcgtcgacgcggtgctcaccgccattcaggcagtgaccggcgaggcgggctgcctgctgatcgtcaaaaactacaccggcgatcggcttaacttcggtctggcggcggagaaagcgcgccgactcggctacaacgtggagatgctgatcgtcggcgacgatatttcgctgccggataacaaacagccgcgcggcatcgccgggaccattctggtgcataaagtggctggctatttcgccgagcgcggcttcaacctcgccaccgtcctgcgcgaagcgcaatacgccgccagccataccgccagcatcggggtggcgctggccagctgccacctgccgcaggaagccgacagcgcgccgcgccatcaggccggtcacgccgagctgggaatgggcatccacggtgagccgggcgcctcgacgatcgccacgcaaaacagtgcggagatcgttaacctgatggtggaaaaactgaccgccgccctaccggaaaccggccgcctggcggtgatgctcaataacctcggcggcgtgtcggtggctgagatggcgattctgacccgcgagctggccaacaccccgctgcaggcgcgcattgactggttaataggcccggcctcgctggtgacggcgctggatatgaaaggcttctcgctgaccaccatcgtgctggaggagagtattgagaaagcgctgctttcggatgtggaaaccgccagctggcagaagccggtgcagccgcggactatcaacgtcgtgccgtccaccctcgacagcgcccgggtggattttacgccctcggccaacccacaggtgggcgattacgtggcgcaggtgaccggcgccctcatcgatcttgaagaacatctcaacgcgctggatgccaaagtaggcgacggcgataccggctccaccttcgccgccggggcgcgcgagattgccgagcggctcgagcgtcagcagctgcccctgaacgatctgccaacgctcttcgcgctgatcggcgaacgcctgacggtggtgatgggcggctccagcggggtattgatgtctatcttcttcaccgctgccgggcagaagctggggcaaggcgccagcgtggccgaggcgctgaacgccggtctggaacagatgaagttttacggcggcgccgatgagggagaccggacgatgatcgacgctctgcagccggccctggcggcgctgctggccgaaccggagaatctgcaggccgctttcgccgcggcgcaggccggggcggatcgcacctgccagtcaagcaaagccggcgccggacgcgcgtcctatctcaacagcgatagcctgctcggcaacatggaccccggcgcccacgcggtggcgatggtgtttaaggcgctggcggaacgctaagccttccccggtggcgctgcgcttatcggggcgatgtaacaccgccgaatagcaggtcgggtaaggcgtaagccgccacccgacaaaaaacggcaccgccggtagcccggataaggcgcgacgcgccgctatccgggttttaccacgatggctttttacttgctgtgccagtacgcctgggaacgcaccagctgctgatcgatgctctcgtcttcaaagcgcgccagcagcgatttcaccaccgcgccttcgccggtcagccagataaaataatcctccgccggcaccttcacctgcgccagacgctcggcgacgaaggccggattgtggcccaccacccactcgatgttaaagccgtcgagatccgccagataatctttatacgacgcatcggcgatagtaacgatggccgtcacctgcggcctcgccggcagctggcgtaatcccagcagacgacggcgcagcgccggcatgccggactcatcgcaaacatacagctgccaggcataatcttccggcaccaccagcgagccacgcgggccgccgatcaccagcttatcgcccacttttgcttccagcgcccaacggctggcgataccgccatcgtggatatagaaatcgtaagccagctcgtgacgttcggcatcgtacagcggcgtatagtcgcgggtggcaggccgcacgccttccccccagtcaatcccctcctcggtcacctgcggcggggtaaatgccgcgcccggctcggggaaaaaaagcttggtatggtcgtcaaagccgtgagaggcgaagccttccagcgcctcgcctcccagcacgatacgctggaacgccgcgcctgcgcgctccacgcgcagcaccgtcagctcacggaaacgcagctcattgcggacacgctgcgggtacttgtctgctttggtttttgtcatcatcgattgccttcgtgaacggtaaatagatatatctaaacttgatgcaaatgataatgattgccaactaataagaatgcaagtctttttttgatatagtcaaaacaaaccgcatcaaaatccacagtcagaaaataattttatatatatcaatatattaaaaaataaatagcaaccagcattgcgaacattcattttttagatataaattagatatatcaaaacagcaggaggtaaccatgcgacatcatcatgaagaagggcgtgggccacgcgggcgccacggtgaccctagcgaacacggcgaccatggccgccgcggcggcggacgtcgccagcgtttctttggccacggcgaactgcggctgatcattctggatatcctcagccgcagcgccagccatggctatgagctgatcaaagagatcgaaacgcttacccaggggaactacagccccagcccgggggtgatctatccgacgctggatctgctccaggaccagggccttatcagcgtggaagacgacaacggacgcaagaaaatccttatcagcgaggaaggaaaacagctgcacgccgagaaccaggagcacctggcccatatccaggagcgcctgcaggcgcggatggtcggctgcgagctgcgccgcgatccgcagatgaagcgcgcgctggaaaacttcaaagcggtcctcgacctgaaagtgaaccagcaggccagcagtgccgcccagctcaagcagatcatcggcattattgaccgggcggcgatggagatctctcagctcgactaagcctcttttttcatcaccggctgccccgcgctggggcagctcgcaccacggcggatcgccccgtctattgccgccaggcagaaaatctcgtcagctcaggaataaaacgtgccaatagtggcgcaatgagattaaattttacacaattcgtcttttactttgcatttatcccgattttcaccgcttctgccgaactggcgtaatccctgcaatacttaatccagtatcgtgtgatacgtccgccccaggagcacattttgaacaggttaccttccagcgcatcggctctggcctgcagcgcacacgcactgaatctcattgaaaagcgcacgcttgatcatgaggaaatgaaagcacttaaccaggaggtcagggaatactttaaagagcatgtgaatccggggtttttagagtatcgaaaatcggtcacagccggcggggattacggagccgtagagtggcaagcgggagggttaaatacgcttgtcgacacccagggacaggagtttatcgactgccttggtgggtttggcatcttcaatgtagggcaccgtaatccagttgtggtatccgccgtcgagaatcaactcgcgaaacaaccgcttcacagtcaggagctgctggacccgctacgcgcgatgctggcgaaaaccctggcagccttaacgcccgggaaactaaagtacagtttcttctgcaacagcggtaccgaatcggtagaggcggccatcaagctggcgaaagcctatcagtcgccgcgcggtaaatttaccttcatcgccaccagcggcgccttccacggtaaatcgctgggcgcgctgtcggccaccgccaagtcgaccttccgcaaaccctttatgccgctgctgccgggcttccgccacgtgccgttcggcgatatcaacgccatgcgcaccatgctgagcgagtgcaagaaaaccggcgacgacgtcgcggcggtgatcctcgagccgattcagggcgaagggggcgtgatcctcccgccaacggggtatttgccggcggtgcgtaaactgtgcgacgagtttggcgcattgctgatcctcgacgaagtgcagaccggcatgggccgcaccggcaagatgttcgcctgcgagcatgagaacgtccagccggacattctgtgtctggcgaaagcgctcggcggcggtgtgatgccgatcggcgcgacggtggcgacggaagaggtcttctcggtgctcttcgataacccgttcctgcacaccaccaccttcggcggcaacccgttggcctgtgcggcggcgctggcgacgatcaacgtgctgctgacgcaaaacctgccggcgcaggcggcgcagaaaggcgatatgctgctggacggtttccgcctgctggcgcaggagtatccggacctggtgaatgaagtgcgcgggaaaggcatgctgatggctatcgagtttgttgataacgagattggctacgactttgccagcgagatgttcagacagcgggtgctggtcgccgggacgttaaacaacgccaagacgatccgcattgaaccaccgctgacgctcacccttgagcagtgcgaacaggtgctgaaggcggcgcgcaaggcgctggcggccctgcgcgtttcggttgaagaagcgtaataaagtgtccttcaccctctccctctgagagggtgaaggataaccctcacacctgcggtaacaggccgataaagctgcgcttctgccgcggctgcgacatcatctcctccagcttttcgacgcaggctaaatagtgcggcgtcttcttatgcgccagcaccgcctcatcgtctttataggcttcgtagataaaaaagcgggttttcacctcaggatcctgcaggacatcaaagcgcaggttgcctggctcctgtagcgcgccgtcgtggttggcgcgaaacacctcgagaaactcatccacccgctcgggtttaatattgatttccaccagcgtgacgttcatttcagctctccctgtttttcttcctgccagaactgatacgcttcgcgcgcgttcagattctcatgcaccacctttttcaccgccttcagcatcgcgcgcggggcgctggactggaagatattgcgccccatatccaccccggaagccccctggtcgatcgcccgccagcacatctccagcgcctcatgctccggcagttttttaccgccggcgataacgatcggcaccggacagctggcggtcactttttcaaagccttcctcaacgaaataggtcttcacaaactgcgcccccatttcggcggcaatccggctggccagcgagaagtagcgcgcatcgcgggtcatctctttgccgacgccggtaaccgccaggaccggcataccgtagcgattgccggcgtccaccagtttgatgatgttattgatcgactgatgttcgtattcgctgccgatatagacctgcgccgccaccgcgcatacgttgagccgcagcgcgtcttccatcgccaccgccacgcattcgttggagagttcgctcaaaatcgaattgccgccggaggcgcggagcaccaccggcttattggtggccgccggtacctggctgcgcagtacgccgcgggtgcacatcagcacgtcggtgtcggcaaacagcggcgcaatcgacaggtcgatacgctcaagcccggtcgttggcccctggaagtagccgtgatcgaaggccagcatcaccgtgcggttgctgtgcggattaaaaatgcgcgccagccgcgactgcatgccccaatccagcgagccgcagcctttcagggtatacagcgtattctgctgcgggcggtcgatgccgaagtccttcccctctttgatatcgtctaaatctgccatctcatcctccgtcagaagtcgtagttgttgatgttatctttgctgaacaccacgcgctccggcagcagcacgataccgttgcccttcgcctcatactgatagccctgcacgctgttcggttcgaccttcagcgaaccgatatctttcacctcaacgctgtcgcctacgttaagatcgccctttttcagtaatcgatcggcgacgttaaccgcaattttgccctgctgaaccacatcccacaggccgaacgctttcaccgtgccgcgctcaacgtacggacgcatcacgttcggcgtactaacgccgacaatcgccacgccctgacgcttgaggttctctgccgcctgcgccgccgccggcagcgcattggcatccggcgcgataatggcgtcgagatccggataggcttttaagatcccctcggcggtttgtagcgatttggtggcatcgttatagccaaactgggtggtgacgatttgccactgcggatgttctttttcgattttggctttggcttccttcacccactggttctggtcggtcaccgtcgggctggagtagaaaaacgctaccttggcagtaggcttcgtcacctgcttttccgccatctcgaccagcaggccgccaagctgctgcggcgtgccctgattgatatagatgctgcggcactccggcctggtatcggaatcccaggtcaggactttcaccccgcgctgcatcgcccgcttcagcgccggacacaggccgtccggcgagacagcggaaacgataatcgcgttgtagccctggttgacgaagttgttgataagctgcacctggccggagacgctgggctcggttgggccgtcataggtgacatccacgcccagcgctttccccgcctctttcgcgccgttgccgccgctggtaaagaagccgacgccgaccagcttaggaataaaggcgatgcggtccgccgccttcgcggtaaccacgctcatcgccagcgccagcacgatcagttttaatttcattttatgctccgattgttttatgcgagaaaagacgccgccaggtcgcgcgcacccattcacggtgcaggctcagcgaacgccccatcaccaccacaaccaacagcgcccctgacagcgcgctcgacacctggttggggatgccgaccatctgtaaaccctgttgcagataccccaccagcaatgccgccagcgcggaacccagtatcgatcccgagccgccgtaaatattggccccgccgagcaccgccgcggtcagcgccggcatcagcaggtcgcggcctaaatccgaacgtgccgagccgaagtaggaaaccatcaccagcgccgcgaccgccgaggcgacgccaaccaggccatacagcacgtacgggatgccgttcaccgacagcgcggcatagcgcgcggcgcgcgggttttgcccgagtaaaaagaggtggcggccaaagcgcccgcgatgggtcagcagccagaagaaaaaggtgataatcgcgaacagcaccagcggcagcggcagtccggcgagggttaaattggcgaaggcggtgaagctatcgggaaaaccgccaatcccctcgtaaccggtcgcgccggccatcccggaaagcagcagcgcgccgccgccgtacagatacagcgtaccaagcgtgatcaccagcgggctgatgccggtgtagtggatcagcgcggcgttgaataacccgcacagcagtcccaagagcaacgtcagcgataccgcgagccacagcggccagcccgcctgggtcatcaccccgagggcgatggcgcacaggccgatggtcgagcccagcgaaatatcgatcccgccgctgatgatcaccagcgtcagcggcagcgcgacgatgccgatgcagataaagtcgctggtgctaaagagcagcatattgagatccagcatgcgcggattcagcgcgccgaacagcaggatctccacgatcagcaacgccagcagcgcgctttcccagttaagcttcagcttcatttaagccacctctttgcttttgcgttcgggaaagcgggcaacctgtttcccccctttgttacccggctggaaacggctgtactttagcgcccgctgatggcgggccagcgcctggcgcaggcggccatcgagcaccagcacgccgagcagcaccaggccggcgataaagtcattccaccaggcgggaaggcggaacagcaccagtacggtgtcgatttgggtaaggaaaaaggcgccgagaaacgcgccgagcagcgtaccggtaccgccaagcagcgagatcccgcccagtacgcaggcggcgatggctttcatctccaggccgctgccggtctgattaggcacaaaaccaatctgcgcggcgaagacgatcccggcgcaggccgccagcataccgttgagggtaaaggccagcatccgcgtgcggttgaccgccacgcccagctggcgcgcggcggcgaggttatcgccaacggcgtaaaaatcacgaccaaaggcggtgcgcgacagcagccagccgcccgccagcagcagcgccagcaccagccagcccagcggcgacacgccgataaacgcaggctccgagagcgatttcaggctgtctggcaagccctcgatccatttcccgccggtccacagcagcattaccccgcgatacaaccccagcgtgccgagcgtcgcgacgatcgccggaatgcgcagccccaccaccagcaggccgttaaacgccccggccagcgcgccaatagccagcgcgaaggcgatggccgtcgccaacccgtagccgttgttcagcgccacgccgacggcgatggcgcatagcccaacggtggagcctaccgacacgtcaatattgcgggtcagcatcaccagggtcgcgcccaatgccagcaggcagaggatttgcgagctggcgaaaatcatcgccagggtctgcaggctgaaataggccggattgagcgccaccagcacaacaaagagcgccacgatggcaaagaaggcgctcagttcgcgattcttgagtaacgttttcatgcctgccctccgaaggccagggtcatcatgcgatcgacggtcaccgcctgccgcgccagctcgccgctgtagcggccctgatgcatcaccagcacccggtcggccaggccgatgaactcatccagatcggaggagatcatcagcactgccacattttgcgcggcgacgcttttcagcagctgatagatatcggcgcgggcggagacatccacgccgcgcgtcggctcatcgacaattagcagcagcgggttggcctccagacagcgcgccagcagcaccttctgctggttaccgccagagagagtgcgcaccggctgatcgccatcggccagcttgatccccagcgcccggtgatagcgctcaaccaccgccgcctcccgtttcccctgctgccaccacgacggctgattgaacatcaccgtgttccagcgcaccggcgcatcaagaaacagccccgagacctggcggtcttccggcagatagaccagcccgctggccagccgggcgcgggtgctgtcattgctaatctcgcgattctccagccagatcagcccggcgcgcggtggacgcaggccgtataaggtttcggcaaattcggtgcgcccggatcccaccagcccggcgaggccgacgatctccccggcgcggatctccagattgagatcgataaagccttctccggtaagatcctccacccgcagcacgggaaaatcctgcgcctgggtgcggcggttgcccggcagcgccagccacagcttttgcgtgtcgctcagcgtatggtcgcggctggccggcgtcatagcgctaatcagttgctcatcgcggtaagttgcggtctcgccgctcagcactaccgccccgtcgcgcatcaccgaaatatggctggcaagctggcggatttcgggcagtttgtgcgagataaacacgatccccacgtccagcgcctgtaacgcgcggatctggctaaacaacctctccgtttcgcccggggttaaagaggcggtgggttcatcaaggatcaggatccgcgcttcgcgcatcaggccgcgcaggatctcgaccatctgttgatcggctacctcgagcgtgctggcgctggcatcgaggttgatctggcagttcagctgctgcagtttttcctgcagtcgcgcggcggtatccgcccgcttcggcaaacgaaagagaatgttctcgcgcacgctgaggttgggaaacagcatcggctcctgcggcaccagataaatgcccagctggtgggccagcgccgggctgaggcgcgcaaacgcgcggtcgccgatcgtcagctcaccgctatccggggtttcgacgccggcgatgatcttcatcagcgtcgatttacccgcgccattgcctcccatcagggcatgcacctggcccgcgcatagcgtaaagtcgatgcccttcagcacggcaacgccggagaactgtttgcggatctggcgagcttcaagcagtggcttcatcgtcgcgcctcgtttgaacaaatgatttttaaatttaataatgttcaaaagcgtagacggtgaactatatttacaaccgtgcgaagatcacagtttggcgctttagatcctcaggaaaaaatgggccagcgatgaaagatccgttttgccagtcggctcacactttccggccgcgcaatagcgaacatatgatctaaatttttataagagttcaatttatgagcgaaaaacgcattacggaagagaaccgctacgccgggctggcgttagccgaggaagagctggtggcgcgggtggcgtggtgctactaccacgacggcctgacgcaaaatgacatcggcgagcgtttggggctgccgcggctgaagatttcccgcctgctggagaaaggccgccagtccggggtgatccgcgtgcagatcaactcgcgctatgagggctgtctggcgctggaaagtgaactccagcagcgttttggcctcaagattgcccgcgtactgccggcgctcaacaccccgccgatgaatacccggctggggatcggcgcggcgcagtcgctgatgggcattctgcagccgggacagctgctggcggtcggcttcggcgaagccaccatgagctgcctgcagcatctcagcggctttatcggctcgcagcaggtgcggctggtgaccctctccggcggcgtcggcccgtatatgaccggtattggccagctggatgccgcctgcagcgtcagcattatcccggcgccgctgcgggtctcttcggcggaggtcgccgagatcctgcgccgcgagtcgagcgtgcgcgacgtgatcctcgcggcgacggcggcggacgcggcggtggttggcatcggcgccatcgatcagcggcgcgacgccaccattttacgctccggctatatcagcgagggcgaacagctgatgtacgcccgcaaaggcgcggtcggcgacattttaggttatttcctgcaggccgacggcaggccggtagaaggactggagatccatcgggaactgctcggcgtgacccttgatgagctagcgcagctgccgaccatcgttggcgtcgccgggggagaagaaaaagcgcaggcgatttatgccgctctgattggcaagcgcattaatggcctggtaacggaagagacaacagcacgcgcggtgcttaccctggcctcctgacggcctggcgccgcgcgacaacagcgaggcgcatgtcatgagttacctgttagcgttagatgccgggaccggcagcattcgggcggttattttcgatcttaatggccgccagcgggcggtaggccaggccgaatggaaacacctgagcgttgataacgtccccggctcgatggagttcgaccttaccaccaactggcagctggcctgccagtgcattcgccaggcgctcgacgccgcccggctctctgccgccgatattcagtccgtcgcctgctgttcgatgcgcgaaggcatcgttctctatgaccgcaacggcgaggccatctgggcctgcgccaacgtcgatgcccgcgccagccgcgaagtggcggagcttaaggagatccacgactatcgcttcgaatccgaggtatacgaggtctcgggacaaaccctggcgctcagcgccatgccgcgcctgctgtggctggcgcaccaccgccccgatatctaccgcaaagcggcaaccatcaccatgatcagcgactggctggcggcgaagctttccggcgagctgtcggtcgacccgtcaaacgccggcaccaccggcatgctcgatctgttcagccgcgactggcgtccggcgctgctggatatggccgggctgcgcgccgatatgctgtcgccggtcaaagagaccggtaccctgctgggcgccgtcaccgaagcggcggcgcagcagagcggcctgcgcgccgggacgccggtggtgatgggcggcggcgacgtccagctcggctgcctgggccttggggtggtgcgcgccgggcaaaccgcggtactcggcggcactttctggcagcaggtggtcaacctgccgcaggtgcgcaccgatccgcagatgaatattcgcgttaatcctcacgtgattcccggcatggcgcaggcggaatcgatcagcttctttaccggcctgaccatgcgctggtttcgcgacgccttctgcgctgaagaaaaactgattgccgagcggctcggcgtcgatgcctattcgctgctggaggagatggccagccgcgtccccgccggttcccacggcgtgatgcctattttttccgacgctatgcactttaagcagtggtaccacgccgcgccgtcgtttattaacctctccatcgatccggaaaagtgcaataaagcgaccctgttccgcgcgctggaggagaacgcggcgattgtctccgcctgcaacctcgcgcagatctcgcagttctccggggtgacattcgacagcctggtgtttgccggcggcggctctaaaggcgcgctgtggagccagatcctcagcgacgtcaccggcctgccggtgcgggtgccggtggtccgcgaagccaccgctctgggctgcgccatcgccgccggaaccggcgccgggatgtatgacgatatggccagcaccggagagcggttagtgagctggcaccgcgagttcaccccaaatccgcagcatcgcgagctgtatcaggagatgatgggcaaatggcagacggtgtacgccgatcagcttggccttgtcgatagcggactgacaacgtcgatgtggcaggcgccgggtctggagcgccgccagcgcgttgtgtcttccccctcaccctaactaccggtgccgctccgcctttcccccctctccctttgggagagggccggggtgtggggcaacgcttcgccgttctttgaatcccatcacaatcaccgcactccccttttccctttttctccacgatggctaaattagtaactcatccgaccacataacaataattttacattggaagccactatgagccgctatccgtcgcttttcgccccgcttgagctgggcttcacaacgctcaaaaaccgcgtgttgatgggctcaatgcacaccgggctggaagagctgccggacggcgcgcagcggctggcggccttttacgccgagcgcgcccgtcacggcgtggcgctgatcgtcaccggcggcatcgctccggcgccctctggcgtcaccatggccggcggcgcggtactcaacgacgccagccatctggcgcatcatcgccatattaccgatgcggtacatcaggaaggcggcaaaatcgctctgcagatcctgcacaccggccgttacagctaccagcccgcgctggtggccccctcggcgctacaggcgccgatcaaccgttttaccccccatgaactgagccacgatgagatcctgacgctgatcgatgattttgcccactgcgcccagctggcgcgcgaagcgggctatgacggcgtcgaggtgatgggctctgagggctatctgattaacgaatttctcgccgcgcgcactaaccagcgcgacgaccaatggggcggcgattatgccaggcgcatgcgtttcgccgtagaggtggttaaggcggtgcgccagcgcgccggccacgatttcattatcatttaccgtctgtcgatgctcgatctggtcaacgacggcagcacgctggcggaagtcaccgaactggccaaagcgattgaagcggcgggagcgaccatcatcaacaccgggattggctggcacgaagcgcgcattccgaccatcgccacgccggtaccgcgcggagctttcagctgggtcacccgcaagctgaagggcgcggtgtcgatcccgttgatcaccaccaaccgcattaacgatccgcaggtcgcggaggatattctcgcccgcggcgatgccgatatggtatcgatggcccgcccgttccttgccgacgccgaatttatatcaaaagcgcaggacgatcgcgccgatcagatcaacacctgcatcggctgcaatcaggcgtgtctcgatcggatcttcgtcggcaaagtcacctcctgtctggtcaacccgcgcgcgtgtcatgaaaccctgatgccggtcctgccggccaacgcgcctaaacggctggcggtggtcggcgccgggcctgccggtctggccttcgccgtaaacgctgccgcccgcggtcatcacgtcacgttgtttgatgcgctcccggagatcggcggtcagtttaatatcgccaaacagatccccggcaaagaggagtttcacgagacgctgcgttactaccgcaccatgctcgatcttcatggtgtcgatctacgcctgaacacccgcgtcacgacagacgatctgctggcgttcgatgagacgatcctcgccaccggtatcgccccgcgcctgccggcgatcgacgggatcgatcatccaaaagtgctgagctaccttgatgtcttgcgcgataaagcgccggttggcgcgaaggtggcgattatcggctgcggcggcatcggcttcgacaccgcgatgtttttaagccagtcgggcgcggccaccagccaggatatcggcgagttctgccgcgaatggggtatcgataccagcctgcaaacggcgggagggctgagtgctgaaggcccgcagttgagtaaaagcccgcgacagattgtgatgctgcagcgcaaagccagcaaaccgggcgaagggctcggcaaaaccaccggctggatccaccgcgcgacgctgctggcgcgcggggtgaaaatgatcccggcggtcagctatgaaaagatcgatgatgaagggttacatgtcactatcggcggcgagcgccaactgctggcggtcgatcaggtggtgatctgcgccggtcaggagccgcgccgcgagctggcggatccgctgcgcgcggcggggaaaacggtgcatctcatcggcggttgcgacgtggcggcggagctggatgcgcgtcgggcgattgcccagggcactaaactggcgctggcgatttagccctgtcccgggggcggcgcgatgcgccttccccgggctaccacgataatcccgcacgctagcccggctaaggcgacagccgcgagcagggggaaaccgcgacaagaatcagcgctgcttacgcaccttcgttgctttcaaaatgacaaacttattgttcgtcgcaatcgtcgtgcaattaccaaacgcgcgcttcagcttacggaagtaatcgaggtggcggttgccgacgacgtacagctcgccgccgtatttcaggctgcggcgggcatcgttaaacatctgccaggcgatatggtcggtaatagcgtgttgctgatggaacggcggattacacagaatcgccgtaaagcggtcaggctcaatgccggagagcgagttgttgaccataaattcacagcgtgcgatatcgtccggcagattgcgctcgacgttcaaccggctggaagccaccgccatgtgcgactcatcggtgaacatcacgctggcgtttggattttgcgccagcgcctgcaggccactcaccccgttgccgcagccgagatcggcgatctcgccttctagatcagacggtaaatgctgcaggaagaaacgcgcgccgatatccagcccgctgcgggcaaaaacgttggcgtggttatggatggtccacggcgtgccgtccagcttccagctgtaggtttgcggcgcatcggcaagctcaggagcggtgaaaacgcagtggatcaaacgcgcttttttccacgccagcgaggtggtggtggtgccgaggattttttcaaacagcgccagcgtcgagttgtgcacatcacgggctttcgccgcggcgatgatgcgggtttccggcgtgactacttcgcgcagggcgcgcagctgctgttccagcagcgccagctgttttggcaccttaatcagcaccagcgccggcgcggccggtagcgggctcaggctatcctgaaagcgcacgctctcttcatcgataccgttcatccgcaggttgtggcgggtcgccagctcggaaataaaggagtcgttgatactgaccgggttgcgctccgccagcgcgcaggcgggcgcgccgaagccgtcgttgaagatgagcgtcaggccgtcgacgtcattcacctgttgcagcagatattcatccgccgcttcccatgcctgaagcgcttcttcttcagcgttaggtgggaaccgctctaatgtgaataactcaccgtttaactctgcctggctcatcgcctctccgcctccggaatagtaaaacccgcgagtttatacgcaaatcctgtccagttgaagagagatcgctgatcatcgccgctcagcgtagatcgccctcgtcatcggctcgcagcagcgttatcgacgcgcgagcgccgggcatcagctgctgcagataacctaccagccgctctcccgcctcatgcagggccgacaacggcatcgccggcaggctttcgagaataaaccacatcgtctgcgcgccgctgtccagccgggtgcgcacgccctgtcgccagttccagcgtcggcaggttacgcctatatcatcccgccagatgacttcgcccggctccggatattccactaccggctctgccgattttagcgtatcgaatggctcatcgccgcgggcaatggccagccgcggttcgccacggtaggcggccagattttccccaccgaccgggacggcatagcgaatgctgatcgcgttgtagatatccaccaccggatcgatggccggcaggctcccctctttcagcacccgcttgcgcagcgcctgcgccgaacagggggtacgtttcgccttcgcgccgaaggcgctgaacgcttcatcccatgccgccaggtgcgcttgcgcccagggcacatcatcctgctgcaccgccaggcaggcctcggccagcgcctgctccgcgacggcgggatcggccaccggcgcgctctccaccacaatacttaatgcccgaaagcccggcgccaggcggctgaccgcagattcgattgacggcgttacgctacgcattcgataatcctgtaatgaccaatttgtttcatcatagtgaccaatgaacgtaaaagtcaatataacgaccgattcaggatctgatgtcgaccaggtaagtcgcgccgtcgccacgcggctgaaggcctaccgtaaagcgaaaaaaatgtcgctggacgagctgtcgcgccgggccagcatcagcaaaggtatgctggtcgagatggaaaaagaggccgccaatcccagcattgcgatcctctgcaaactcgccgccgcgctgggcgtctcggtggcggatattgtcaatgtgtcaagcgaacccgcgttgcatattattcccgccgagcagatccccaccctctggcaaggcccgctggggggcagcgccaggctcctcgccggcaccgccgggccgaatatgattgagctgtggcgctgggagatgcagcccggcgaagcctttgcctcgcctggccacccggcaacaaccttcgagctgctgcacgtggaagccggcgcgctgacgctgacgcttggcgagacctgccgcacggtggcggccggggaatcggcggtggcccgcaccgaaatagagcacggttaccgcaatgagggtaccgcgccgctggtctttaccatgaccgtggctgaactgccctcctgacagacataatgataagacgatgacaaaactcatttatttacagggctatcctgaatcgctgctggcgcaggtgaccacgttaatcgagcaagaccgcctcggcgaggtgctgcaaaagcgctatccgcaagggcacgacgttaacagcgataaagcgctgtatcagtacacccaggacttgaaaaaccgctttctgcgcggcgcggcgccgatcaacaaagtgatgtatgacagtaagatccacgtgctgaacaatgcgctcggcctgcataccgccatttcccgcgtgcagggcggtaagctgaaagctaaagcggaaattcgcgtagcgacggtatttcgcgacgcgccggaagcctttctgcggatgatcgtggttcatgaactggcgcatctgaaagagaaggatcacaacaaggctttttatcagctgtgctgccatatggagccgcagtaccaccagctggagttcgacacccgcctgtggctgacgcacctttcgttaaatcgttctgcgtagtgacgcactggttttgtcatgacggcatgatagagtggcggcaggttccctttaacggagttcgtcaacgtttatgatacgtttcgcagttgttggcacaaactggatcaccaagcagtttgtcgatgccgcccatgaaaccggcaaatataaacttaccgccatctactcccgcagcctcgaacaggcgcaagccttcgccaaagactatcctgtcgagcatctgtttacctcgctcgatgaactggcacagagccctgacgttgacgcggtctatattgccagcccgaactcgctgcactttccgcagacccggctgttcctgagccataagaagcacgtcatttgcgaaaagccgctggcgtcgaacctgcaggaagtcgaggcggcgatagcgctggcgaaagaaaataacgtggtgctgtttgaagcctttaaaaccgccagtctgcctaactttctcctactgaaagaaacgctcgctaaagtgggcaaactacgcaaagcctttatcaactactgtcagtactcctcgcgctatcagcgctaccttgacggcgaaaaccccaacacctttaacccggcgttctctaacggttcgattatggatatcggcttctattgcctggcgtccgctgtggcgctgtggggcgagccgcaggccgttcttgccaccgccagcctgctggacagcggcgtagacgcccagggcaccgtggtgctgagctatggcgacttcgacgtgacgctgcatcactccaaagttagcgattccgcgatccccagtgaaattcagggcgaagacggcgcgttagtgatcgaaaaaatctccgaatgtcagaagctggcgtttgtgccgcgcggcggtaaagcccaggacctgacgcagccccagcacattaataccatgctgtatgaggcggagacctttgcgcggctggtggagacacaggatgtggatcacccgggcctgggggtgagccggatcaccgccaaactgtccagcgaaattcgtcgccagaccggggtgatcttcccggccgatacgcagccgctggcgtaaaagagtgtaaaggcctgaccggccgccattgacgaaaaccgccctgtgacatattttgttacgtgcaaaggggagtaacttccttgccggttgatcgtcattacgatgcgtgcaataccgcatccggtcgccgggcaataaccaaagcccatcgcgatgtactttggttgttgtaagtgagaccttgccggaaggcgaggtctatgcataaaagcgcagcggctgccgtcttccgacgtcagccgttttgtttttatgtaaggaatatcaaatgaatactgtcggcacgccgttgctatggggtggattcgctgtcgttgtcgcgatcatgttggcaatcgacctgctgcttcagggacgacgcggttcgcatagcatgaccatgaaacaggccgctggctggtcaatcctctgggtcacgctttctctgctgttcaacgccgccttctggtggtatctggtgcaaacccagggccgggccgtcgccgatccgcaggccttagccttcctcacaggttatctgattgaaaaagcgctggcggtcgataacgtcttcgtctggttgatgctgttcagctatttcgccgtaccgcctgctctgcagcgccgggtgttggtgtatggcgtactgggcgcgatcgttctgcgtaccattatgatcttcgccggcagctggctgatttcgcagttcgactggctgctgtacgtctttggcgccttcctgctgtttaccggcgtgaagatggcgctggcgaaagaggacgactccggcatcggcgataaaccgctggtgcgctggatccgcagccatctgcggatgaccgataaaatcgagagcgagcgcttcttcacccgtaaaaacggggtgctgttcgccaccccgctgctgctggtgctgattctggtggaactgagcgacgtgattttcgccgtcgacagtatcccggcaatcttcgcggtcaccaccgatccgtttatcgtgctgacctcgaacctgttcgccatcctcggcctgcgcgccatgtacttcctgctggcgggggtcgctgagcgcttctcgatgctcaaatacggtctgtcggtgatcctggtgtttattggcgtgaagatgctgatcgtcgacttctaccatatcccggttgccatctcgctgggcgtggtgggcggcatcctggccgtcacgctgctgattaacgcctgggtcaacaggcagcacgacaagcagcgcaaactgccagagtaatctgctaccgcgccgtcggccctcgctggcggcgcggtaatcagctatagcagacgttctcgtaacgagaatacctgctcatgtcacaattatgttgctacgcagttaaaaaataagatccatattaaaatcacagtattttacgcttcccgccagtctttctttccggatactcgactatgcaaacatctacttacatcctgacataaacgtaaaaaataatacgtggctgggatggcttgctacatcactggaaggaatgaattatgacaacacgcactccctcatcagggtggctctcccgcctggcgcaaggcagcctggtgaaacaaattttaatcggcctggtgcttggcgtactgttggcgctggtctctaagcctgcggctatcgccgtcggtctgctggggaccctgttcgtcggcgcgttaaaagcggtagcgccggtgctggtattgatgcttgtcatggcctcgatcgccaaccatcagcacggacaaaaaaccagtatacgccccattctgtttctctatctgctgggcacctttagcgcggcgctgaccgcggtgttgttcagttttctctttccctcgaccctgcacttaaccaccgccgccgacagcatcacgccgccgtcggggattgttgaggtgctgcgcggcctgctgatgagcatggtgtccaacccgatcgacgctctgctgaacgccaactatatcggcattctggtgtgggcggtggggcttggcttcgccctgcgtcatggtaacgacaccaccaaaaacctgatcaacgacgtctcccacgcggtgacctttatcgttaaagtggtgatccgctttgcgccgctggggatcttcggcctggtatcttccaccctggcgaccaccggtttcgagaccctgtggggctatgcccagctgctgctggtgctggtgggctgtatgctgctggtagcgctggtgattaatccgctgctggtgttctggaagatccgccgcaacccctatccgctggtgctcacctgcctgcgcgaaagcggcgtttacgcgttcttcacccgcagctccgccgccaacattccagtgaatatggcgctgtgcgagaagctgaatctggatcgcgacacctattcggtctctattccactgggggcgaccattaatatggctggcgcggcaatcaccatcaccgtgctgacgctggcggcggtgcatacgctgaatattccggtggatctgccgacggcgctgctgctgagcgtggtcgcttcgctgtgcgcctgcggcgcctccggcgtggcgggcggctcgctgctgctgatcccgctggcctgtaatatgtttgggatcccgaacgatgtggcgatgcaagtggttgccgttggctttattatcggcgtgctgcaggactcctgcgaaaccgcgctgaactcctccaccgacgccctgtttaccgccgcggcctgcatggcggaagacgaccagctggcgaaaaacgccctgcgcggataacgcctttcccctccgctatcgggcggagggactctcttcctgtactgcgttttcaaccttaaacggatcgataccgcgcttttgcatccggcggaagcgaatgatattcagcccgttgacgatcaggaaactgccttctatcagcgtcccgccaatggaacccaaccacagattatgcgtgacccagcaggcggtggagcaccacatcacgcagcggacggttagccctttgcagcgaaacagcgcccaggtgctggcgacggtgccaatgatcggcagcagctccatggcatgctgcagtttacccaggccgagaatcaacgtcaggaggataaagactgtcatcacccacaggctacgggtgcgtaaggaaatgaccgtgcgaagcgcattgagcccggcgctcattccagccggcccggcgcccatcaggaaaaaatgaacgccgataatagcgctatagaccgccagctgtagcctgaaacggcgttcatcgcggttgataaaggtggtaatgccgataagaaaggcgatgacgccgaccccctgggccagccaatacgcggtcatgtaagctccctgactgaaaaaaacaaacggcgcttcactggctgaaacgccgctgttacgagcccgatggcgctacgctatcaggccgatacacaaaccaagcctctgggcgccaacgcaaatacgcctttacagggtaacaccgcttttaaagatggccagctcgcggaagtcattctgctcattacaggtcggtttaccgttggcgaaggctacaatggcatccacaaactcttccagcagctgcggcatcgttttgccgtggagcagctgcccggcatcaaagtcgatccagtgctttttcttcgccgccagctcgctgttggtggcgatcttcaccgttggcacaaagccgccgtacggcgtgccgcgaccggtgctgaacagcaccatatggcagccggcgccggccagcgcgctggtggcgaccgcgtcgttgcccggcgcgctcagtaaattcagaccatgaaccttcaggcgctcgccgtagcgcagaacatccaccacctggctggagcccgctttctgagtacagcccagcgacttatcttcgagggtagtgatccctccggccttattacccggcgaggggttttcgtaaataggctggtcgtgagcaataaagtactgcttaaagtcattgaccatggtcaccagcttgtcgaaggtcgcttcgtcgcggcagtggctcatcagcaactgttcagcgccgaacatctccggcacttcggtcagcacggtagtgccgccgttggcgatcacatagtctgagaagcggcccagcatcggattagcggtaatgcccgacaggccgtccgatcccccgcactcgaggccaaacttcagctcgctgagcttgcccggctggcgtttatcctgacgcatcacttcatacagctgatgcagatgctcaatccccgcctccacttcatcgtcctgatgctggcaaaccataaagtgcacgcgctgcgggtcaaactcgcccagcgtctcgcgaaaggcctccacctggttgttttcacagccaaggccaaccaccagcaccgccccggcgttcgggtgacgaaccatattttgcagcatggtgcgagtgttgatgtgatcgtccccaagctgcgagcagccataggtgtggctgaagagatgtaccccatcgatatcctcagcgccatacgtctctttcaggaaacggttctgcatttgtctggccatcgcgttgacgcagccgacggtcggcaggatccacagctcattgcgcacgccgacgtcaccgttggcgcgacgataaatctgtacttcgcgatccgcaggctgtggcggttgggcaaccaggtccggttgatagcgatacgcgtcaaggtcgctgagattggtgcgcgtattgtgcgcatgaacatgctcgcccggcgcgatatccgccagcgcatggccaatcggcaacccgtacttaacgacgttttcccctttcgcgatagcgcgcagtgcaaacttgtggccgcgaacgatatcctggccgagggtgaccgagtcattatcaatcgtcaccacgctaccggcagcgatatccgtcagcgcgaccgcgacgttatcctgcgaatggattttgatgtattgcatatcaaccgacctctggccttagttcagttcaatggcgaaatagtcacgcgcattgttaaagcaaatgtttttcaccatctcgcccagcagcgcgatatccgcaggcgcttcgccggcagccacccaacggccgatcatctggcacagaatgcggcggaagtattcgtggcgcgtgtaggagaggaagctgcgactgtcggtcaacatcccgacgaagcggctcagcagcccgagctgcgccagctgggtcatctgccgctccataccgtctttctgatcgttgaaccaccagccggagccgaactgcatcttgcctggcatgccttcaccctggaagttaccgatcatggtgcccagcacttcgttatcacgcgggttcaggcagtagagaatcgttttcggcagcaggttttcttcgttctgcttgctcagcagcttagacagctcttccgccatcggacgatcgttgatcgagtcgaagccgacgtctggccctaacagtttgaactgacggaggttgttgttacgcagcgcgccaatgtggtactgctggacccagccgcgacgggcatactctgcgccgaggaacaccagcaccgcggttttaaactgcgccacttcgtgttcgctaagggtctcgccagccaggcggcgcgccagaatttcatccagctcggcgtcggtcgcttcggcaaacagcaccacgtcgagcgcatgatcggagactttgcagccgtgtgcggcaaaatgatccagacgtttggtcagggcgctttgcagatcagcgaagcggcgaatatcggtatcggatacctcgcccagcttagccatataatcattgaaggtcgccaactcgatgttgaacgctttatccgggcgccagctcggcagcactttgatgtcaaaggagttgtctttggcgacagccgcgtggtgctcaagagaatcaatcggatcgtcggtggtaccgaccatcttcacattcatctgtttcatgattccgcgggcggagaaggcatcctgagccagcaaatcattacactggtcccagatctcatcggcggtggatggcgacaacagcttacctgtaataccaaaaggtcgacgcagctctaaatgggtccagtggtataacgggttgccaatagtgtgcggaaccgtggccgcccaggcgtcaaatttctcgcgatcggacgcatcaccggtacacagacgctccggcacgccgttagtgcgcattgcgcgccatttatagtgatcgcctttcagccagatgtcatacaggtttttaaagcgatagttttcggcaacctgctgcggcggaaggtggcagtggtagtcgaaaatcggctgatctttggcgtaatcatggtacagacggcgggcaaactcggtatcaagtagaaaatcttcagtcataaacgatgtcattcgcgtgtcctcttcgctccagtgtgggagcctttcagatgattgactacaatgctgacaaagttatcacaccaatttctacagaccgaactgtttttcgtgagttagatcaataaacgtcgataaaaaaatgaccgccctggagcaaaacacctcgccagagcgcgccatctctggctttccaggcaagggataaagaccacactaactttcccacttttgtgacagctctcaacttttaaagttgtatgacaagttatctttctgccgtcgcaacatataaaccgacggaatgcattaccggtgcttatggcatcggcttatacggaatggataccgactttcaacataacaactgatggtaaggttcaggccagaggggactaccctcctgaatcctccgtttcgctttcccggccgcttattgcgctcggtaaaggccgcacctgatgcggaaagataacagacgatgaggtttacatgcgtaaaattaaagggttacgttggtacatgatcgcgctggtgacgctgggcaccgtgctgggctacctgacccgtaacaccgtagcggcggccgcgccgacgctgatggaagagttacacatttcgacccaacagtactcctatatcattgcagcctattccgctgcctataccgttatgcagcccgtcgcggggtatgtccttgatattctggggaccaaaattggctatgccttcttcgccatcgcctgggcggtattctgcggctcaaccgcgctggccggcagctggggtggactggcgctggcccgtggcgcagtcggcgcagcggaggccgcaatgatccccgccggcctgaaggccagctcagagtggttcccggcaaaagagcgctctatcgcagtgggctacttcaacgtgggttcctctattggcgccatgatcgcgccgccgttggtggtgtgggcgattgtcatgcacagctggcagatggcgttcatcatctccggggtattgagcttcgcctgggccatcgcctggcttatcttctacaaacacccgcgcgaccagaaaaaattatctgacgaagaacgtgactacatcattggcggtcaggagtctcagcatcagaccaataacgcgaagaaaatgtcgccgtggcaaatcctgcgcaaccgtcagttctggggtatcgccctgccgcgcttcctcgccgagccggcctgggggacctttaacgcctggatcccgctgttcatgttcaaagtttacggttttaacctgaaagagatcgccatgttcgcctggatgccgatgctgttcgccgacctcggctgcatcgtcggcggatatcggccgccgctgttccagcgctggtttggcgtcaacctgatcgtgtcgcgtaaaatggtggtcaccatgggcgccctgctgatgattggcccggggatgatcggcctgttcaccagcccgtacgtggcgattgccctgctgtgcatcggcgggttcgctcaccaggcactgtccggggcgctgattaccctctcttccgatgtctttggccgtaacgaagtcgctaccgccaacggtctgaccgggatggccgcctggctggcgagcaccatgttcgccctggtcgtcggcgcgctggcagacaccatcggctttagcccgctgtttgcggtactggccgtctttgacctgctgggcgcgctggttatctggacggtgctgaaaaacaaaccggctgacgatgactcgacgccgcttagcagccgcaaaccggtcacgcagagttagatcgaatggcaaggtaatcgccgatcaagccgccttctcaggcggctttttcatgcctgccagtggtggaaagcgcgtaaaagtggtataacaaatcgaatattgtcgccatcttccgggagcgaatatggaaatcattgaaccacgccgtctatatcagcagcttgccgctgagctgaagacgcgcatcgaacaaggtgtctaccttgtaggggataagctgcccgccgagcgcttcatcgcagatgaaaaaaacgtcagccgcaccgtggttcgtgaagccattatcatgctggaagtggaagggtatgtcgaagtccgcaaagggtcgggtatccacgttatctccaaccatccgaaataccagcaggtggccgatgaaagccttgagttcgccaactatggcccctttgaactgctgcaggcgcggcagctaattgaaagcaatattgccgaattcgcggcgactcaggtgaccaaacaggacatcatgaagctgatggagattcaggagaaagcgcgtaacgagaaatgtttccgcgactccgagtgggacctgcagtttcacgtccaggtggcgctggcgacgcagaacagcgcgctggcggcgatcgtggaaaagatgtggacccagcgcgtgcataacccctactggaaaaagctgcatgagcatatcgacctgcgtacggtcgataactggtgcgacgaccacgatcagatcctaaaagctctgctgcgaaaagatcccaacgccgccaagctggcgatgtggcagcatctggaaaataccaagcaaatgttgtttaacgaaaccagcgatgactttgaatttaatgccgatcgctacttatttgccgaaaacccagtcgttcatctcgataccgcagtcaacggcgcgaaataaggccttatccctccggcgcgcccccctgcgcgcctgtctgacagtgaggctggagtaagcaagtcatatatagtgtcagcctgtgtaaatcctctcgcctcccatctccgcaatcagcaaaatcaacgagcaacacgttgcaatttctctgacggaaagtcaggtgatttgttacaattagatgcattttgtcgttctgggggtaggtatttacttacttcagtcttatacagggaagcgttcagagcgcctaagcagcgaccataatctcataaaaatcttgtcgccctatatgccacgcgctcagacgtgccgttaaccgatgtaccaggaatcgtgaatggaactatttacccagttattgaatgccttgtgggctcaggattacgaaacgctcgcgaatccctccatgataggcatgctgtattttgtcttgtttatgattttgttccttgagaacgggttattgcctgccgcgtttttaccgggggatagtctgctcgtgctcgtgggcgtgctgatcgccaaaggggcgatgggttttccggaaaccttgctgctgctcaccgccgccgccagcctcggctgctggctaagctatattcaggggcgttggctgggtaatacgcggatcgtgcaaaactggctgtcacacctgccttcgcactatcaccagcgtgcgcatcacttgtttcataagcatgggctctccgcgctgctgattggccgctttatcgccttcgtacgcacgctgctgcccaccatcgccgggctttccggccttaataacgcccgttttcagtttttcaactggatgagcggcctgctgtgggtgctcatcctgacctcgcttggctatctgctgggtaaaaccccggtattcctcaagtatgaagatcagctgatgtcctgcctgatgctcctgccggttgccctgttggtcttcggactgatcggctcgctggtggtgctgtggaagaaaaaatacagaagccggggctaatgatggtcatgaaacgcccttccctgcgccagttcagctggctgctgggtggttctcttctgctcggcgccctgttctggctttggctggcggtgcagcagcaggaggccacgctggcgatacgcccggttggccagggtatcggaatgccggacggtttctccgtctggcatcatctcgatgccaacggcatccgctttaaaagcatcacgccgcagaaggatggtctgctgattaagttcgattccaccgcccagggcgcggcggcgaaagaagttctcggccgcgctctgccacatggttatattattgcccttctggaggacgataactcgcccaccgcctggctatcccgcctgcgcgacgcgccgcatcgcctcgggtaagctgccgccagactgcgtttttaacccagtctggtggtttcccgcatttgttactatgcttaaacctgcgggaatcaacgcattcacgttcaccaacgggaacgggtatatcctccgggtatcccctcagacaatggaaggtactatccatgaaacaccgcatcgctctgcttctggtcctgacttcacttagcgccagcgccctagccgcctctccctgccaggaaaaagagcaggatattcaacgagagatcagctacgccgaaaagcatcataatcaaagtcgcattgatgggctaaataccgcgctacgtcaggttcgggaaaactgtagcgacagtaaactcaaagccgatcatcagcaaaaaattgccaaacagcgggaagagatcgctgaacgtcagcgcgatctgcaggaagcccggaagaaaggcgatgcggacaaaattaacaaacgccagcataaactcaatgaagcgcaacaggagttaaaaacgctggagtctcgggattactaatcaccattaactttcgcaacacggaccacgctacaggagaacgacatggctaaagagaatgtgactgacgaccttcgtgcagaactgaaaacgctggcggataccctggaggaagtactaaattcctcggcggacaagtcgaaagaagagatgggtaaactgcgcagtaaagccgagagcgcgctgaaagagagccgcgctcgtttgggtgaaaccagcgaagcgattcttcgtcaaactcgtgagaccgccgcgcgagcggatgattatgttcgcgaaaatccgtggactggggtaggaattggcgccgccgtcgggctggtgctgggtgtcctgctgtcgcgtcgctgattatggcgaatactcaacacacgcagggaccgggtcagcgcgttttctccattggtcagcgcatcgtcacgctgctggtcgaaatggtggaaacgcggctgcgtctggtcgtcgtggagctggaggaggagaaagccaacctcttccagctgctgatcatgaccggactgacgctgctgtttgccgcgtttggcctcatgagtctgctggtgctggttatctgggccgttgacgctcagtaccgcctgcacgtgatgatcgccaccaccgttgtgctgctccttgccgccgcgatcgtgggtatcctaaccctacgtaaggcgcgccgctccacgctgctgcgtctaacgcgtaaagagctggagaacgaccgtgcccttctggaggaggataaatcgtgaatggccgacaggagcgtgaacggcaaaagacgcagctgctgcgccagatccagcagcaacggctggagctcagcgcctgccgccgtcactggcacgaggcgactgcgcccctcgaccgcggctggcatacgctgctgagtttacgttcgtggctgatggttggcagcggtctgatggccgtatggtccgtacgacatccgcattttttaatgcgctggaccaaacgcggactcggactgtggagcacctggcgcctggtgcgcgggatcctgcgccagtcggcagttcgctagcggccctgagcgtgagcgctttccctggcgcccacgctctgccatttccctgtccgttaccgcaccctgttcgcagcaacatgcgccttttccgtagcgcgcccttctctacgacgccctttacctcacgccataccaggaccggtggtggcccatcgcgttcggtacactttcgcctccgcgtactgattgctcagaaactttgaaatagatctacagttttccttgctaacaattccctctccgcctcgctactatcctctccatcgacagcaacaccgcgtaactacgcgggattgcactaaaaaaaaaaccgccgccctttgggttttctggagtaacaaatgaaaaaattagaagatgttggtgtattggtagcgcgtattctgatgccgattctgtttatcactgcaggatggggcaaaatcaccggttatgcgggaacccagcagtatatggaagccatgggcgtcccgggtgcgctgctgccgctgaccatcctccttgagttcggcggcggtctggcgattctgttcggtttcctgacccggaccaccgcgctgttcactgcgggctttacgctgctgaccgcgttcctgttccatagcaactttgcggaaggcgtgaactccctgatgttcatgaagaacctgaccattgcgggcggttacctgctgctggccattaccggaccgggcgccttcagtattgaccgtgtactgaataagaaatggtaagcgcactatactgaatgaatgaaaaaagcgaggagaccactcctcgcttttgctatctgtagtctgaaggaggagcaaagatgggacaattagttgacggcgtctggcaggatacctggtatgacacaaaatccaccggtgggcgttttaaacgttccgtttccgccttccgtaactggctgaccgccgacggcgcggctggccccagcggtgaaggcggttttgccgcggaaaaggatcgctatcatttgtatgtttctctcgcctgcccgtgggcgcatcgcacgttaattatgcgtaaattaaaaggtctggaaccttttctccccgtatccgtggtcaatccgctgatgctggaaaacggctggacctttgacgatagcttcccggaagccaccggcgataccctctaccagcatgactttctctatcagctgtatctgcacgccgacccgcactacaccggacgcgtgaccgtgccggtgctgtgggataaaaaacagcagaccatcgtcagcaatgagtcggcagaaatcatccgcatgttcaataccgccttcgatggccttggcgcccgggccggggattactacccgccagcgctgcgggaacaaatcgatgagctgaacggctggatctatgacaacgtcaacaacggcgtgtataaagccggctttgccaccagccagcaagcttacgacgaagcggtggatgcggtctttacctcgctggagcggctggagcagatcctcggccagcatagctatctgacgggcaatcagctaacggaagccgacattcgcctgtggacaacgctggtacgcttcgacccggtatatgtgacccattttaaatgcgataaacggcgcatcagtgattacctcaatctgtacggtttcctgcgcgacatctaccagatgccgggtatcgccgagacggtgagttttccgcatatccgtcaccactattaccgcagccataaaaccattaaccctaccggtattatttccattgggccgcagcaggatctcaacgaaccgcacggtcgcgatcagcgcttccgttgatctgtcgggcgccagtgatggcgcccaataattcagaaaacagatatttacccaccattcattcacgtctattcttattgcgatcgcttaaaaaacaagtgattgacggttaattgaggcgtagaaatggactggtatctcaaggtattaaaaaactatataggatttggcggccgtgcgcggcgcaaagagtactggatgtttattctggtcaacctcatcctgaccggcgtattgagcatcatcgataaaatgctgggctggcagcgggctggcggcgaaggcattctgaccactatctatggcgtactggtctttttaccgtggtgggcggtgcaatttcgccgtctgcatgacaccgatcgttcggcctggtggctattgctgctgttgatcccggtcatcggctggctggtgatcctgatctttaactgccagcgcggcaccgaaggcaataatcgcttcgggcccgatccgaaacccttttcctactaatcttcctgctcctcccgctagcgggaggagggtcttcatcactatctgccggcaaacagcttggggatctcacgcagacaccaggacttcgcttcgcccatactgtcccgtcgccaggccatgataatgtcaatttcattggtgtattccgggctgacgacccgcaggcgaccttcggcaatatccttctccaccagcggatagggcatagtcgccacgcccagtccggccagtagcgcctgacgtttatcttctatcgtactcaccgttaaacgcggctgtttatccagcagttgaacggtgaggacgggccgctcgcgcgcggtatccgccaccgcgacgccgcggtatttcacgcgggtaacctcagagagcggctccggctcctgatggatcgggtgatccggcgccgcgacgtacacactgagcaccgaatagagtttgcgcgagttaatctccgaagaggaacgaaaatgcatatccggtgcgacaacgatatccgcccgcccctgctccagccgctcccaggcgccggccagtacctcagtgataatcgacagctgggtgtttgatttagtcgccagtttctcaatcagcggaaacagatccggagtgggcaccagcgcttcggtaacgatcgtcaggtgggtttcccaaccacgcgacagggcttcagcatcggtggtgagtttatccgccgcttcaagcagcacgcgcccgcgctccagcagcattcttccaacgttagtgaacttcgtgcgatgacctgagcggtcaaacagcaccacgtccagttcctcctccagtttttgcatggtgtagctcagggcggaaggcacgcgtcccagctcatcagctgcggcagcgaagcttccgcgccggtcgatcgcatccatcacgcgtaacgcttccagcgttaatgctctctctttggccatcgctttctcattcaggaaatttgaacataccgggcagaatatctggctaacaatacagcgtccatacctttaccattgatttagtgtaaagagaggtcaagaacatgattactacccgaacagccaaacaatgcggacaagcagacttcggctggctgcaggcccgctacaccttctcctttggccactacttcgacccgaaattactgggcttcgcatccttgcgcgtcctcaaccaggaagtgctggcgcccggcgcttccttccaggccagaacgtacccaaaagtcgatatcctgaacctgattctggaaggcgaagcggagtatcgcgacagcgacggcaaccacgtgcaggccaaagccggggaagcgctgctgatcgccacccagcctggcgtgagctatagcgagcataatctgagtaaagagcagtcgttaacgcgaatgcaactttggcttgatgcctgcccgcagcgggaaaacccgctgcagcagaaaatcaatgtcgcagacgcgacgctgcagctgctggcctctccggagggcggggataacagcctccagcttcgccaacaggcctgggtctaccatatcgcgctggagaaaggtgagcagatcaacgtgcaattacatggtccacgcgcctacctgcagtcgattcacggctccgtccatgccgtcgcacaggaacagcaaaagcaggctctcacctgcggtgacggcgcatttattcgtgacgaagctaacattaccctcgtcgccgatacgccgctgcgcgctttgctgatagatttaccggtgtaacaacggaagtgatggagtctgtcagtgagtaagaagaaaaacagaaaaaaggcgtcaccaacgccgttagccccggtgcaaccgcaagtcgccggggccgccagctttggttatgatgagatgcttagcgaactggaagccattgttgccgaagcggagatccgcctgcgggatgaagaaagtctcgcctgaaacggcaaaatggctgggttgattttcattaatggcctgaagaagatatcggccccgcgaggggccgatggcattattcactcagcgcgtcggcaagatcttttttcacctgcgtgcgctgctccggcgtcagtaccttattcacctcaaaatagtacttcacgcggtaataacgcacctgctgatcaatcttgctgaaggccgccagctgatcgttgaccgctttttcatcccatttaccggaatcaatcacgtttatcagagccccgtctttaatttcctgttgggaaatctgctggacattactctccaactgctgatgcaggcttttaattttcgcgacctgatcgttggtaagttttaagtgctgaacaataggatcctgcgccggtgctggcgccgccttaacgtctgcggcctgagccgtgatagagaaaccggtggtcaacagcgtggcaaaggcaatacgggttatcaatttcattttttttcctgaagtaaaggtggcagaaatagcggattattattttccagggcgcagtgaataaatgtaaaaaatgatagccaaacattatatatatccacagcactaatatacttcactaaaacatataaaatatgaataccgtgttaacttatatagttgacgccctaacatcaccaggttttattttaatttcaacagcaagcaaaatatttgacagtggtgacttttcctttaatttaattagcgcatattacgttatccagcgcatcaaggatatcatttaaaaatagataaggagattgagatgttattacgttttcgcgtattaccgctggtttttgtcatctcgctgttaagcggctgcggcctggcttctaaagccttttattccgcgggagacaaattatttcaacctggagatgacgccgtcgcttcgatgcagacgtattcagtggctcagttcctgcagccgtttactctcaacccggcgaaggccagcagcgattatctgggtaaatgggtcaaggtacgcggggtgattgtcgacattcgtcggaagagcggtatcgccggcagctactattttatcgtgaccatgcgagatgaacagaataaaacggataaacgtcttacctttaattttggctcgcataacagcgcagacgtagaggctttaagcaacggcagcgtcgctacgatcgtcggccaggttcatcaggtgcaagattccacgatcccgacgctacagaatcctaaggtggttaaataacggtagctgaccgagaagccgccttcttttggtatagcgtcgtggacagttattcatccgcgtcacgggttcagatagcaaaaaccccgccgaagcggggttttgacataaaaaggtgaaactgaccgataagccgggttctgtcgtggacagtcattcatctaggccagcaatcgctcactggctcaagcagcctacccgggttcagtacgggccgtaccttatgaacccctatttggccttgctccgggtggagtttaccgtgccgcggactgttaccagccgcgcggtgcgctcttaccgcaccctttcacccttacctgatcccgcttgcgcgggccatcggcggtttgctctctgttgcactggtcgtgggctgtgacaccccccaggcgttacctggcaccttgccctatggagcccggactttcctcccctccgcccgtctccccccgaaggaggacgacgacgaagcggcgactgtctggtcagcttcggcgcgcagtatagagggtttaccgcccgttgtcatccctcagtggtcatcccaacctgcagggtggcagcaatattacgcgacgcgcggtaaatattatcaaacgccccgcgaaatgcctcttccagcgtcgaaacggaagttaacacgctgaatacggcatcgataccgtgctggtgaaccacgccgacatcgtgagtcaggctgccagcaataccgatcaccggcttacggtatttcttcgccacccgggccacccccaccggcaccttaccgtgaacagactggctatcgagccgcccttccccggtgaccaccagtgagcagtcatggatttgttcttccagcttcagcgcctcggtaacgatctcaatcccgctgcgcagctccgcattgagaaaggccatcagcgccgcacccatgccgccggccgctcccgcgccggggatcgacttcacgtccacctgcagcgacgtcttaatgacgtcggcataatgcgccagattacgatccagctcgacgatcatcgcctcggtcgcccctttctgtgggccaaagatccgcgacgccccacgctcgcctaccagcggattggtaacatcgcaggccacgtggatcatcctgtcacgtaagcgcggatcgatggcggaaagatcgatccggctcagacggctcaaactgcccccgccatggccgatctcttgtccctcggcgtcacagaggcgggcgcctagcgcctgcatcatacccgccccaccgtcgttggtcgcactaccgccgatgccgataatgatccgttccgcaccatgctccagcgcctgtaatattagctccccggtaccccgtgaagtggtgatgagcgggttacgtttgtcgggcggaacgagccccagaccgctggctgccgccatctcaataaacgcggtgacgccgtcgccggacatgccccagcaggccttcactctctcacccagcggacccgttacccatgcgaaatgttcctttccctgggtggcggcaatcatggcttccaccgtcccctcgccgccgtcggcgacgggcagggaaacatactgtgcatcagggaaaatttcccgaaatcctttttctatcgcctgagctacctcgctggcagaaaggctttctttgtaagagtctggggcaatgacgattttcataattttgtagcctgacagtgccgcgcaaggcaagcataacagggcgcgcagggcgcccttcttgttagcgagtgacttccactttcgccagtttttcgtaatagcacgccagcgcgctatggtctgcagtgccgagaccgtccgcgcgcagcgcctgcatcatctccatcaccgccgccgtcagcggcagttgggcgcccacgccgtgtgaggtatccaacgcattggccagatctttaatatgcaggtcgatacggaaacccggtttgaagttacggtccatcaccatcggagctttcgcatccagcacggtactgcccgccagaccgccgcgaatagcctgataaaccagatccggattgacgccggctttagtcgccagggtcagcgcttcagacatcgccgcgatgttcagcgcgacaatcacctggttagccagtttggtgacgttgcccgcgccaatatcgccggtatgcactacggagccggccatcgctttcatcagatcgtagtatttatcgaagatcgctttatcgccgccgaccatgaccgacagcgtgccgtcgatggctttcggttcgccgccgctcaccggcgcatccagcatatcaatacctttggctttcagcgcttcgctgatttcccgactcgccagcggcgcaatggagctcatatcgatcactacggtgcccggtttcgccccttcaataatgccgttttcacccagcgccacctctttaacatgcggagagttcggcagcatggtgatgatcacctcgcactgttcggcaatcgctttcggcgtcgtcgcggtctcagcgccagcggcgatcacgtcggcaatcgcttccgggttacggtcagacaccaccagcgagtaacccgctttcagcaaatttttgctcatcggtttgcccataatgccaagaccgataaaacctactttgattgtcataatgttctctctcttcatcctggtgattattttttaaacgcgtcggcaagtttctgggttgcagaacggaagacgcccagatcgctgccaacggcgacgaaggtcgcgccccattccagatagcggcgcgcatcggcttccactggcgccagaatgccgcttggcttaccgtgcttcttcgcgctggcgaagatatgctggatagcgcgctgcacctcaggatgggcggcattgcccaaatggcctaaggcggcggccaggtcgctcgggccgacaaacacaccgtccacgccctcggtcgcggcaatcgcctcgacgttttccactccggtctggctctcaatctgcaccagaatggaaatgttcttgttggactgggcgaaatagtccggcacggtgccaaacatattgccgcggtgggaaacggagaccccgcggatcccttccggcggataacgggtcgaagccaccgcctgcgccgcctgttcagccgtctcgacaaacggcaccaggaagttatagaagccgatgtccagcatgcgcttgatgatgatgggttcattggtcggcacacggactacctgcgcgctggagctatctttcagggccatcagctgcggaatgagcgtggtgacgtcgtttggcgcgtgttccgcgtccagcaccagccagtcgaaccccgccagacccagcacctcggtgctaatcgggttagccaaagcgcaccagcagccaatctgcacctgatgcgccgccagcgcggccttaaatttgttcggaaaaattgcgttatccatgatttttaccttgcgttaatcgttgcttacttctgcaattccatacgtttgatatcgccaaccacaaacaggtagcagaccatcatcatcagcgcggagccgccaacaaaaatcagtgcgccattaaatgagtgcagttcgctcacgatgtagccaataaccagcggcgtggcgatcgaggccacattgccaaagacgttgaataccccgccgcacaggccaacaatctccttcggcgcgacatccgagatgaccggccagcccagcgcgccaaagcctttgccaaagaacgccagcgccataagcgtaatgaccagcggcgtgctggccgtgtagttacacaggatgatggacgacgccagcagcattcccagcacaataggcagcttacgcgcaaaagtcagcgtgcagccgcggccaatcagataatccgaaaacagcccgcccagtacaccgccagcaaagccaaacagcgccggaatcgaagccacaaaccccactttcagaatcgacattcccttgtcctgcacgaggtagatcggaaaccacgtcaggaagaaccatgtaatggtattcaggaaatactgaccgaaaaatacgcctaacatcattcggttagtcagcaactggcggatatagtccatcttcggcccggccgccggggtggcctcttttttatggtccatatcgaccactgcgccgccttctgagatatatttcagctccgcggccgacattcgcggatgatcggtggggttatgcacaaacttcacccagatgatggtgagcacaaaccctattatccccatcacggtaaagacatgttcccagcccagcgcgaaggtcagccagccgagcagcggcgagaacagagccagcgagaagtactgagcggcattaaagatagctgaagccgtaccccgctctttggccggaaaccaggccgccacaatgcgggcgttggcgggaaacgagggcgcttcggaaaagcccagcataaaacgcataaagaacatggagaccccggcccaggcgagcgggaacacatcaataaagccttgcaggaaggtaaacagtgaccagaaaaacagactgtatgaataaacctttttcgagccaaatttatccagcagccagccgccagggatctgcatcagcagataagcccagccgaaggcggaaaaaatgtatcccatcgacaccgcgctgagccccagctctttcgcgacttcagtaccggcgatagacaaggtcgcgcggtcgccatagttcactgccgtcaccacaaatatcatcaacagaattaaatagcgggtcggtattccttttttttcatctaatgtagaatccaaaatcatttagacattcctcgggcacagaacaccttttataattgttttaagtggtttctgatttatttaaaagacgatattgaaactgtctattcgcatatcgatcacctcaaaaacatgactcagtataatcagcacgcccccgccagacactatgcatacccacaatataaagttattatttaaagccataattgtgctcatgccataagtcatgggcgctaatccacacttcttacgattgcctgtcctgcagaggttagcgtcataaaaaggagtgatgccgatcacattttaaaatcaactcagctgacatcctttattccatcatactgatatgtagcaaatgaattagcgttttattttattattagcacctgtttggagatgactggacaatggctgacattgcaattcgacaacaatcgccgaccgcgttttatattaaagttgacccgacagataatgtggcgattattgtcaacgatcgcggcttaaccgccggaacgcgtttcccggacggcctgacgctcgtcgagcatatcccgcagggtcacaaagttgccctggtggatatccccgcccatggtgaaatcatccgctacggcgaagtcattggctatgccgtacgcgatatcccgcagggaagctggattgacgagtcgctggtggagctgcccaccgccccgccgctgaataccctgccgctggccactaaagtgcctgaaccgctaccgccgctggaaggttacaccttcgaaggctaccgcaatgctgacggcagcgtgggtaccaagaatctgctgggtattaccaccagcgtgcactgcgtcgctggcgtggtcgattacgtggtgaaaatcattgaacgcgacctgctgccaaactatcccaacgtcgatggcgtggtgggcctgaatcatctctacggctgcggcgtggcgattaatgcgccggcggcggtagtgccgattcgcaccattcataatatcgccctcaacccaaacttcggcggcgaggtgatggtcattggcctcggctgtgagaagctgcagccggaacgcctgctgcagggcacggaagacgtcaaaagtatcccggtggacagcgccagcatcgtcagcctgcaggatgaaaagcatgttggttttaaatcgatggtcgatgacattctgcaggtcgccgagcgccacctggcgaaactgaaccagcgccagcgggaaacctgcccggcctctgagctggtggtcgggatgcagtgcggcggcagcgacgccttttcaggcgtgaccgccaacccggcggtaggttacgcgtccgacctgctggtgcgctgcggggcgacggtgatgttctcggaagtgaccgaagtacgcgacgccattcatctgttgaccccgcgggcgattaacgaagaggtcggtaaacgtctgctggaagagatggcctggtacgataactatcttgatatgggcaaaaccgaccgcagcgctaacccctcccccggcaacaagaaaggcggtctggccaacgtggtggaaaaagcgctggggtcgattgccaaatcagggaaaagcgccatcgttgaggtgctctctccgggtcagcgtccgaccaaacgcggcctcatttacgccgcaacccccgccagcgattttgtctgcggcacccagcaggtagcctctggcatcacggtgcaggtattcaccaccggtcgcggtacgccgtacggactgatggcggtaccggtgataaaaatggcgacccgtaccgagctggccaaccgctggtatgacttaatggacattaacgccgggaccatcgccactggcgaagagacgattgaggatgtcgggcggaagctgttcgaatttattctcgacgtcgccagcggacgcaaaaaaaccttctccgatcaatggggcctgcacaaccagctggcggtatttaacccggcgccggtaacctgatcgagagcgtaaggatttaaccacttttagcccggatctatccgggcttgttggttagggatgctgggcggcaagaaaagcgctgatctccgcctgcgtcgaggtgccttccatggggccgcgttggctaatcgccagcgagccgctggcgtttgcccatctcagcgcctcccggggcgtggcgccattgaggaacagactaacaaaagtggcgccaaagcaatccccggcaccagtcggatccaccaccggcacgctgaagccggcgacatggtgcgtctcgttggcactaaagtagcttgcgccacgcggcccgcgtttaatcaccacatgcttcacgccgcgtttcagtagcttatcaaccaggacctgctcattgcgttccggattgagaccaaagtaatccagctcgccatcgctcggcaggaagatatcggtgtagtcgaggatatattcaaaggcctgcgacatctccgggatgttcagcatctctttgcgaatatttgggtcgaacgatactgtgccgctgcggcctttaatgttttcaatcgctttacgcatcgcatcgataatacgaaacgagaatagcgatgaccccataatatgaaaatgctgacactgatttagcaacgcttcgtcaatgtggtcggcagtcagcagaccgcaggcgctgttaggcatattaaaaataaaatcgcgctgcgcctggctacgatagctgacgaaggcgctaccggtagtcgctttctgcagcatagcgatgccgttgacgttgacgccgtctttctccagccgcgcaatattcatctcgccaaatgcgtcgttgcccacacagctaaacaacacggagccgaaacccagctttgccacctgatcggcaaatattgccggcgccccgctgggatagggcccccaaaattcaccgggacgggaaaacccctgattctcttccttggcgagaaactccaccagcagctcgccgatggtgcaaatggttacgttcatcaccgctcctggtttgtcttatgcaaagccgtgttgagccatgtcaggcattcattgttggtatagctgttggtcaaacccgcggcgaggaagcaggcatggtactctgccgcgacgacctgaggggtcacgacgctgctgatctgctgtaattcacccacagcataacgtttctcgccatagaccggccgggaagcgacaatcgcaatgactcgtttactctgggccaccgcttcgcttaacaaatgtgccgtaacctcgttacgcacgcttagcgtgccgtcttcagcaatgtggtccaccgctatcagcgcacgtgaagggcggtaatgacccaacgccttcagcgccagttcgccctccacaatccgcccctgaccggacaacaccccgccaagcagaacggtttccccatttaaaaactcctgcgccagcgcgacgtggcccagatcatttaatagcaggcaaagctcttctctgttggccagaaaggggatcactttacgcaaaatggaaccctggcctagaaacagcgtttcgccattttctatctgcgccgccacctggcgagccatttccgtctccagcgctttatctctgacggcaggcgcttctcgggtcatcgcaaccggcgcgccagcctgggcggtataaatcgccccgccaaaagagcgtttcaagtagccctgctgctcgaggtagttgagatcgttacggattgtcaccccggaaacagccagcatttctgccagatcgtcgactttgatctcgccgttcttacgaacgatctctgcgatgtccaagcgccttttcagcaagctggttgacggttttgccacggtttatgccttattattttctcctggaataactttcatttttaaatttccctcttgcaatgtcaaaccgcggctgtagccctatcccgccatcaatcagcaaatcgatattaatcatgtagttacaaattggcaccttaccaactcaaactttaaaaaagaaaccttataaatactattaactttcattttaaaaatcaattcatcattgtgtgcggtggatcacacctaaaaggcgagacgatcgttacattactttcaaactgaaggttattaaccaaaaataacttacaagatgaaaacagaggactaaaatgtacatcatttccagtaaaaacatgctattaaaagctcagcgacagagttatgccgtgccggctttcaatatccataacctcgaaaccatgcaggtcgttgttgaaacggcggctgagttgcgctcccccttgatccttgccggcacccccggtacctacagctatgccggcaccggcaacgtggtggcgatcgcccgcgatctggcaaaaaagtgggatctcccgctcgccctgcacctcgatcatcacgaggatctggctgatatcacgcgcaaagtgcaggcagggatccgctcggtcatgatcgatggctctcactcaccgttcgaggagaatgtggcactggtaaaaagcgtggtggagttgagccaccgctatgatgccagcgttgaagccgagctgggccgtctgggcggagttgaagacgatctggtggtcgatgctaaagatgcgctctataccaaccccgaacaggcccgcgaatttgtcgctcgtaccggtattgattcgctggccgtcgccatcggtaccgcgcacggcctttacaccgccgaaccgaagcttgattttgagcgcctggcggctattcgcgactgcgttgacgttccgctggttctgcatggcgcttccggcctgccggatagtgatattcgtcgcgccatttctctgggcgtatgcaaagtcaacgtcgccaccgaactaaaaatcgctttctcggatgcgctgaaagcctacttcctggaaaatccgggcgccaacgatcctcgtcactatatgaaaccggcgaaagcggcaatgaaagaggtcgttcgcaaagtcattcacgtttgtggctgcgaaggacaactgtaatcagcggatcgaaggagccttgctgtgatccacaccctgacactgaataccgcgatcgatatgaatatcttttgcgatccgctccagccggcggcagtcaaccgcacccggcaaacggaatattgcccgaatggtaaaggggttaacgtctcgctggtattacatcattaccagcagccaacccatgtcatgggcatattcggcggttttaccggccgctatatcgttgaggaactacgcaaacagcatattaatgtcacaccggcatgggtcgctgaaccgacccgtataaatatatttattaacgacggcagtgatgaatacaaactggtaaatcccggcgcgcggattgatgatgaaggaaaagaacaaattcttcaccatttacagtgcgtcgcgcccggtgattatttagttatcagcggcagtctgccaccgggaatagagagccggttctatagcgagattctggtgctgtgccagcagaaagggtgtgaagtcatcttagatatcagccacccggtgctgcgccagctgttagagtggcgtccactattgattaaacccaatgacgacgagctgaaagagatctttggtctggatgtcagcagcccccggcgggtacgcgaagcaatgcaaacgctccaccagctcggggctcgcaatgttctgctgacccttggcgcgcaagggctctatttttcgaacggcgcgcaactgtggttctgctcggcaccgaaaatcgaactggtcagctcggcctgcgccggcgatgccgcgctgggtgcattcctcagccattggcttaacacagacgatattccccaggccctggcgctggccagcgccaccggcgctgatgtggccgcctccgccgggctgggtaaattaaaccgtacgcaagaattattacaacaacttcagatcgtccaattataaaggtccgattatgaaaaaaattattgccgtgaccggctgccctacaggtattgctcatacatttatggctgaagaggccttaaaaaccgcagcgaaaaaattaaatgttgaaataaaagtcgaaaccaatggcgcttccggcgtagaaaacgccattacgtcggaagacctgaaggatatttatggcgtgattatcgctgccgataaagatgttaatgccgaacgttttaatggtttaccggttattgaggtgccggttaaagaagccattcaccatccggcggaattaattaataaagtcgttaacggtcaggcgccgcgtcgtcagggattctccgcggcaacggatccagacgagaaatatgagcgagaatcgttcggccgacagatttacaaacatctgatgagcggcgtttccaacatgctaccgttcgttgtcgccggcgggatcttaatcgctgtttctttcttatggggtatctactccgccgacccgaattcaccgcagtataacgtgattgccgccacgctgatgaaagtcggtcagcaggcgttctcgatcatggtgccggtgtttaccgcctacattgcctggtcgatatctggccgccctggcatggttgccggttttgtcggcggtctgctggcgaacgccaccggcgccggattcctcggtgggatcatcgccggttttgccgccgggtattttatgctgctgatccgtcatctgctcgacggtctgccgcgccagtacgaagggctgaagtcgatctttattatgccgctgataggcgtcctggtgatcggcgtgatgatggtcctgctcggccagccggtggcagcgatcaacaatggcatgatgaactggctcagctctttacaggaagccaacccgatcctgctggggatcgtggtaggcgcaatgtgctccttcgacttcggcgggccggtcaacaaagcggcctatgtcaccggtacgttgctgctgggtcaaggtaactacttttttatggccggtgtatctgccgcctgcatcacgccgccgctggtcatcgctctggcgaccacgttctttccgaaaggctttagcgaggaggaacgcgccgccgggatggtcaactatatcctcggctgtacgcacattaccgaaggtgcgattccctttgccgccaaggatccgctgcgggtgatcccgatgatgatgatcgcctcctcaatttctgcggtactcagctacagcctgcatattcaggttccggcaccgcacggcggcttcttaatcctgccgctggtcagtaaaccgttgatgtgggtgctgtgcattctcgccggttccgcctgcggggcacttatgctgggatgctggcggctgtggcaaaaacgcactgacaaagcgacagctcttgctggcgccatgaaataaggagcaagctatgcaactgacttctgccgatatttgtttcgatcgtcaggtcaaaacaaaagacgaggcgctacagcgtgtcgttgcagccctgacccatgccggacatacgcgggcagactatctacaaggcatgcgcgagcgcgaggggcaaatcagcacctatctgggcaacggcattgccattccccacggtacgccgcacagtcgcgacgcagtgcttaaaacgggcgttaaggtgctggcttgtccgcagggggttgactggggtgaggagcaaaccgcctatctgattgtcggtatcgcggctcaggacaatgagcatctcgatattttgcgccagctcacccatgctctgggcgatgatcgagtacctgaggcgctgacgcgcgctgataccccccaggcggtgctggaaattctcgccggcgacattcctctgccagcaggcgaagaaccacaacccgcgccgcaatttgacgaagaggccacctttaccctgcgtaatccgcacgggctacatgcccgtcccagcgcggtgctggtgaaagccgtcaagcagtggcgatcgcaaatccgggttgaaaaccttgatacgcgctccgccattgttgatgccaagaatctgatgcgcgtcgtatcgctgggcgccaaacagggtcatcgtctgcactttatggccagcggcaacgatgcgcagcaggcgttaaaagccattggtgacgcttttaacgccggtctcggcgaaattgccgcccagccgcagcaggtctcccaggaagccgtcaaaacgaaacgcagctggctatcccgaatatttagttaattttcaattaattaaaaacgccctgtcttcctggtcagggcgtttttgtctcgaaagacgatacctttcactgcgttacaacactatttatcgatgcagatcacaaatcaaaacaaagccatttgcgaccaaaacaaaacataacgaatatattcgaaagaaaacggaggttgtaaatgaaagacattatcactcgccataagtcaggcgaacatatcggcatctgttcagtatgttcggcgcatccgctggttatcgaagcggcgttacgtttcgacctgtcgaccaacaataaggtgctgatcgaagcgacgtccaaccaggtgaatcagtttggtggctacaccggcatgcagccggccgatttccgcgacttcgtctacaacatcgcgcgtaccgtcggttttccggcggagcgcattattcttggcggcgaccatcttggaccgaactgctggcaagacgaaccggccgccgtggcgatggaaaaatcaatcgacctgatcaaagcctacgtcgccgccggctttagtaaaatccatctcgatgcatcaatgtcctgtgctgacgatccggtgccgctggatcctggtgtggttgctgagcgcgccgctcgcctgtgtcaggctgccgaggagaccgccagcgatgagcaaaagcgccacctgacctacgtcatcgggaccgaagttccggttcccggcggcgaggccagcaccatcggcagcgtacatgtcacccgggcgcaggatgccgccgcgacgctcgaaacccatgaagccgccttccgtaagctggggctcgacgccgcgctggagcgagttatcgccatcgtcgtgcagcccggcgtggagttcgaccatacgcaaatcattcattaccagccgcaggaagcgaaagcgctctccgcctggatcgaaagcaccccgatggtctacgaagcgcactcaaccgactaccaaacccgccaggcttatcgtgcgctggtccgcgaccacttcgccattctgaaagtcggcccggcgctcacctttgccctgcgtgaagccatctttgccctcgcccaaatggaaaatgagctgatcgccccggagtctcgcagtcgcgtgatggaggtgatcgacgaagtgatgcttaacgaacccggctactggaaaaaatactatcgccccacctggagccaggcgatggtcgatatccacttcagcctttccgaccgtatccgttattactggccgcatccgcgtattcgccaaagcgttgagaaacttatcgctaatctgaccgacgctaagctaccgctggggcttatcagccagtatatgccggtgcagtttgaacgactgtcgctgaatgaactgaacgccgagccgcacgcgctgatcctcgacaaaatccaggatgtcctgcgtgcctatcgctacggctgttcttctgaaaccgcgtgaagttaagaggatatatgagtcaactgtttgttcgtaccggcattcatttcagttccagtcagcaggcactggaacacattggcgcagagatgctggcgcgaggcgtcgtacatgacagctatcccgccgccctgctcgaacgcgaagcgacttttcccaccggcatcgccctggagaagcatgctgtcgctatcccgcactgcgaagcgatccacgcgaaatcaccggccatttacctgatacgtccggacatgccggtctcttttcagcgcgctgacgacgacggcgaaatcgacgtttcgctcatcatcgcgctgattgttgaaaacccggcggcacagctgaagctgctgcgccggttatttagtgagctacaaaatccgcacacgctggaggcactgctcgccgcttccgacgatcggctgccggtgcggttccagcaattaatccttgagcccgagcttagcgccgtggcttcataagatactgataataaaaggggtaccctatgaaacgtaaagttatcgtcgcctgcggcggtgccgtcgccacctccacgatggcggcagaagagattaaagagctgtgtgcagaccacaatattgaactggatttggtgcagtgccgggtcaatgaaatcgaaacctacatggacggggcggacctgatctgcaccactgcgcgcgtggagcggaccttcggcgacattccggtggtgcacggcatgccattcgtctcgggcgtcggcattgaagccttacaacagaaaatcctcggcatcctcgcggagtaaacgccatgtttagcgaaatcatgcgttatatcctcgatctcggtccgacggtgatgctgccgatcgtgatcattatcttctccaaattactggggatgaagctcggggattgttttaaatccggtctacatatcgggatcgggtttgtcggcatcgggttggtcattggcctgatgctcgactccatcggcccggcggcaaaggcgatggcggagcatttccagattaatcttcacgtgatcgatatcggttggccgggttcatcaccgatgacctgggcgtcgcaaatcgccctggtggcgatcccggtggccatcgcggtcaatatcgtgatgctggttacccgtatgacccgcgtggtgaatgttgatatctggaacatctggcatatgacctttaccggcgcaatgctgcatatcgcgaccgggtcgtactggataggtattctcggcgtggtggtgcatgctgcttttgtgtataagctgggcgattggtttgccaaagatacccgcgatttcttcggcctcgagggtattgcgatcccgcacggcagttcggcgtatttagggccagttgccgtcctcgtggataccatcatcgacaagatccccggtcttaaccgtattcactttagcgccgatgacattcagaaacgcttcggccccttcggtgaaccggttaccgttggcttcgtcatggggctggtgattggcgcgctggcgggttacgacctgaagggcattcttcagctggcggtgaaaaccgcagcggtgatgctgctgatgccccgggtgatcaaaccgattatggatggcctcaccccgatagccaaacaggcgcgtaaacgtctgcaggctaaattcggcggccaggaattcctgattggtctcgatccggcgctgctgctcggtcatacctcggtagtctcggccagcctgattttcatcccgctgaccattcttatcgccgtcgtggtccctggcaaccaggttctgccatttggtgacctggccaccatcggcttcttcgtagcgatggcagtggctgtacatcagggcaatctgttccgcacgttgatttccggggtcatcattatgggaatcaccctgtggatcgccacccagaccattggcctgcacacccagctggcggcaaacgccgggaccctgaaagccggcggcatggtggcctcaatggaccagggtggttcgccgattacctggctgctgatccagctctttacctggcaaaatgtggttggcttcgcggtcatcggcatcatctatctggccggcgttttactgacctggcgtcgcgctcgcggcttcatcgccgcggaaaaagcagaaaaaagcgctgccccgcaacaaagtacaggcatgtcttgatctaaaaggggagcgttcgctcccctgaatcttatagctggagaatgttatgaaatcagtggtaatccatgctgaggggaacgtctgcgttgaagaacgccctatccccacgctgcaaacggaaaacgatgtcctggtcaaagtggtcagttccgggttatgcggctccgatatcccgcgcattttcgccaaaggggcgcattactaccctattacgctggggcacgaattcagcggttatgtggaatcctacggcgcggcggtaaccgacctgcagcccggcgatgccgtcgcctgcgtgccgctgctgccctgcttccagtgcccgcaatgccagcgcgagtatttctctttatgtaaacagtatcagttcgtcggctcacgcagcgaaggcggcaacgccgaatatgtggtggtaaagcgcgccaacctgttccgcctgccggaccagatgccaattgatgatggcgcgtttatagaaccgataaccgttggcctgcacgcttttcatctggcgcagggctgtgaaggtaaaaacgtgattattatcggcgccggcaccatcggcctgctggcgctacagtgcgcccgcgaactgggcgccaacagcgtcacggcgatcgatatcaatccgcagaagctggagctggccaaaaccctcggcgcaacccatgtgttcaacagtcgcgagatgagcggccaggcgattcagcaggcgctggaatccattcagttcgaccagttagtcctcgagaccgccggtacgccgcagaccgtcgcgctggcgattgaggccgccggtccgcgggcgcagctggcgctggttggcacgcttcatcacgatttaaccctcccggcagccaccttcgggcagattctgcgtaaggagttgaatattgtgggtagctggatgaactactctggcccgtggccgggagaagagtggcaaacggccacccgtctgctgactgaaaaacgcctgcagctggcgccgctgatcgcccatcgtggcgacgcagaaagcttcgctcgtgcagtgcaggcgctcaacggcgcgccaatgcaaggcaaaatcctgctcaaactctcttgaccgcccgagccagccatcagcgctggctcatccaacctttcgaaaattatcgttcacctttcgttacccttcgattacactgagatgagttaattatcaggcaaatcaagatgaactcatttgaacgaaggaacaaaattgtcgatatggtgaatacgcagggtagcgtattggttctagacctttcgaatctctttggcatctctgaggtaacgatccgcgccgatctccgcttactggaagaaaaaggactgttaacccgttttcacggcggcgccgcccgtgcgggtagcgacctgaccgacgccgagaatcaggaagtggtgcttgaagaccgctatcagcttgccagcgatcccaaaaagcgcatcgcccatgccgcggcagcgatgatccgtgaaggtatgacggtgatcctcgatagcggtagcaccactcttcttatcgccgaagcattagtacggatgaccaatatcaccgtcatcaccaacagcctgcccgccgcgtttactctggcagaaaataaagatatcaccctggtggtgtgcggcggtaccgtgcggcacaaaacgcattcgatgcacggcacgattgccgaacgttcgctgcaaggtatttgcgccgatttgatgtttgtcggcgccgacggtatcgacgccaccaatggcatcaccacctttaacgaaggctactccatcagcagcgtgatggccgccgccgcgcatcaggtgatcgccgtgctcgacgccagcaaattcaatcgccggggctttaaccaggtactgccgatggaaaagatagactgcgtgatcaccgacgacggcattagtgaaaatgaccgtgcagcgttaagcagcaaaaaggtggaactgaagatagtgtaattgcacgctgagtggaacatcatggcggctggttctacttaaccagccagcttccaccttttttggcgcctatgcgaatcaatctccctttcgcctgtagcccttgcagatgacgctcaaccgtacgtgctgatatccccaagatctccgccagcgctctcgccgttaattccggcttttcggttagcaaacgcaaaattgcgttttccggtggggctaatttgacgtcgatttcttccgacatttcttccgacatttcttccgacatttcttccgacacgatgaatgaagtttccagaccttctttcagcgccgccaggatattttgcaacatccaggtcacgaatagcgtgcaatcactggttttatcacaagcacctaaaatgtcgtaataacgttcttgctgatggtggatcagcgtttcaaccggcagccaggccaattcctgacgccactggcttagaatcaacgtctgccataaacgccccatccgaccattgccatcagcgaaagggtgaatgaactcaaactcgtagtgaaaaactgaactggcaattaaaggatgtagctcggtgtgttccagccaactgagtaaatcagcgatcaatcttgggacctgggcagcaggcggagccatatgtatcacctgcgtaccgcgataaatgccgacgtttccgccacgtaaagcgcctggacgatcaaccagcccggtcatcagcgttttatgcgccgtcagaagatcgctaatgtttgccgcatgccatccgggcattaattcataagcacgaatggcatttctcacttcctgaatatccttagccggcgccagaacccgtttgccttccagcagcgccgttacctgttccatgctcaggctattatgttcaatcgcgagtgacgcctgaatagtacgaatgcggttttctttacgcagcaacggcgatgcttgtccacgtttcgccgaccaatgcccaagcaattccccaatctcaacgacaaggttgaggaccgagggtgtgatgctaaacggcggttggtaacggctcatcgtttactccccctgctgctccagggcgtacttatacaacgcatttttcttcacgccgtggatttccgcggccagcgcggcggctttcttcagcggcagctccgcctgcagcagcgccagagtacgcagcgcggccgccggcagcgcctcttcctgagccttgaaaccttcgacgatcagcaccatctcgcctttgcgacggttttcatcttccttcacccacgccaccagctcaccaatcggcgcgccatggatcgactcccaggttttggtcagctcacgagccagcaccacatagcgggattctcccagtaccgcgcagatatcctccagactctccaccagacggtgggtcgactcatagaaaataagggtgcgcggctcttcttccagcgctttcagggtatcgcggcggcctttcgatttcgccggcaggaagccttcataacagaaacggtcggaaggcaggccggcggcgctcagggcggcgatagccgcacaggggcccggcagcggcaccacgcgaatattcgcttcgcggcaggtgcgcaccagatggtaaccaggatcgttaatcagcggcgtgccggcatcggaaaccagcgcgatgttttgcccttctttcagtttggcaagcagggtttccgccttttgctgctcattatggtcgtgaagcgcaaacaaacgggcgtttatcgcaaaatgttgcagcagcaaaccggtatgacgggtatcttccgctgcaattaaatcaacggcttgcagcacttccagtgcacgctgcgtgatatcagacagatttcctatcggagtgggcacaatatagagctgcccctgagaattatccgctgattcgtgttgtttcattgtctcgtccgtattgccgatttaatattgagcattgagccaaaaaaatatcactggacacttatggtaccgtcaacatttcttcgttctaagcccgcgcgctgcctgcccgtattgctggcgactcttatttttgctggctgcggcacccacacgcaggatcaaagcgcggcgtttatgcagggtacgtcgcaggccaactccagtttctacttacagcagatgcagcaaagcacgaatgatagcaagaccaactggcaattactcgccattcgtgcactactgcaggaagggaagaagcagcaggctatcgacctgtttaaccagctgccggcgaacctgaacagcactcaggcccgtgaacagtcgctgctggcggtggaagtgaagctggcgcagaacgattatcaggccgcccgtaatctgctggctaagatcgatccgacaagccttgagcagcctcaacaggcgcgctactggcaggcgcaaatcgatgccagccagggcaaaccatcgctgaccctgctgcgcgccttaatcgcccagcagccgctgctgagtgacgccaaacagcgtcagaaaaatattgatgcgacctggcaagcactcacctcgatgccccaggaccaggccaatgcgctggtgatcaacgccgatgaaaatatcctccagggctggctggatctgcagcggatgtggtttgacaaccgcaacgatccgacgctactgaaagcgggcgttaaagactggcagacgcgctatccgcaaaacccgggcgctaaaatgctgccgacggcgcttgtgaatatgcaaaactataagcctgcgtccatcaacaagattgcgctttttctgccgctaaacggtcaggcgtcgatcttcggccgcacaatccagcagggctttgaagccgccaaaaacggcgcgccgtcggtgacgggcagcgcggttcccgcccaggtcgcccaggcggcgaatgtctccggtaatgatgatgtggtgagtccgtcgcaggcagaaatcagcgatcttaccgccaccggaagccgcgcggatccggttcaggccccgacgcaggaccaggcagcgcctgctgcggaaccggcagcccaggcgccggcaacatccaccacgccgcagactaccgcttccccggccacccagccggttaccgcgccggccgcacagccgcagcccgtggtcgcaaccgccgctaacccttctgcggaactgaaaatttacgacaccaccagccagccgataagccagctgctcgcccaggcgcagcaggatggcgccaccctggtggttgggccgttgctgaaagaaaacgttgaagaggttatcaagagcaacacgccgctcaatgtgctggccctcaaccagccggaaaaagtcgaaagccgcgctaacctctgctatttcgcgctttctccggaagacgaagcgcgtgacgccgcccgacatatccaccaacaggggaaacagaccccgctgctgctggttccgcgcggcgcgctgggcgatcgtgtggttagcgcttttgccgacgagtggctgaagctgggcggcgccagcgtcctgcagcagcgttttggatccacggccgagctgcgcgccggcgtgaacggcggcgggggcattgcgctgagcggcaccccggtctccaccctgccatcagcgcagaacagcatcctcggcagtgcggatgagatgccggtaagcagcggcggcagcgtcgatgcggcctatatcctcgccaccccggaacagattgcctatatcaaaccgatgatcgccatgcgcaacggcagccagagcaatgtcaccctgtacgccagctcgcgcagcgcccagggcaccgcggggccggatttccgtctggagatggaaggcttgcagtatagtgagatcccaatgctggccggcagcaatccgtcgctaatgcagcaggcgctgtccgcggtgcgtaatgactactcgctggcgcgtctgtatgccatgggcgctgacgcctggtcactggcaaatcacttcacgcaaatgcgccagacgcctggcttcgagctgaacggcaataccggcgatctgacggccaaccaggattgcgtgattaacaggaaactgtcatggctcaagtaccagcagggaaaaatcgttccggccagctaagcaaacagaccggcgatgcctgggaaaaccaggcgcgccgctggctggaaggccagggcctgcgttttatcgccgccaatgcccgcgagcgtggcggcgaaattgaccttatcatgcgcgacggcacggtcaccgtttttatcgaagtgcgctaccgccgtagcgcccggtacggtgatgcggcagccagcgtcactccgcaaaaacaacaacgactgcttaaagccgcccgtttgtggctctgccgacagaatgggagctttgagactgtggattgccgtttcgatgtggtagccttcaccggaaacgacatccaatggctaaaaaacgcctttggcgaatagcgtaataccagaagtaagggatcccgtgctcgacagaatcaaagcctgctttaccgaaagcattcaaacccaaattgccgcagcggaagcactcccggacgccatctcccgggcggcgatgacgctcgtccagtccctgcttaacggcaacaaaatcctctgttgtggtaatggcacctccgccgccaacgcacagcattttgctgccagcatgattaatcgctttgaaacggaacgccctggtttacctgccattgcactaaataccgataatgtggtcttaaccgccatcgctaacgatcgcttgcatgacgagatctacgccaagcaggtgcgcgccctgggacacgccggcgatgtgctgctggcgatctctacgcgcggaaatagtcgggacatcgtcaaggcggtggaagccgccgtgacccgcgacatgaccatcgtcgcgttaaccggctatgacggcggtgagctggcgggcctgttaggtcaacaggatgtcgaaatccgcatcccctcccatcgcagcgcgcgtatccaggagatgcacatgctgaccgtcaactgtctgtgcgatttgatagataacactctttttccacaccaggacgattaaggagaacacatgaaggctctctcgcccctcgccatcctgctttctgcactactgctgcagggctgcgttgccgccgcggtagtcggaacggcagcagtcggcaccaaagccgcaacggacccgcgtacggtgggaacccaggtcgatgacagtaccctggaactgcgcgtcaatagcgccttgtcgaaagatgaacagattaagaaacaggcccgtatcaacgtcaccgcttatcagggcaaagtcctgctgaccggccagtcgccgacgccggacctctccgcgcgcgccaagcaaatcgccatgggcgtggaagggaccacggaagtgtttaatgaagtgcgccagggccagccgattggtttaggcaccgcctcgtctgatacctggattaccaccaaggtgcgttcgcagctcctgagcaccgatcaggtcaaatcctcgaacgtgaaagtaaccacggaaaacagcgaagtcttcctgatggggctggtgaccgaccgcgaaggccgggcggcggcggatattgccagccgggtaagcggcgtatcccgggtgaccaccgcctttacctacattaaataaagctgcagtttcccggctggcgctgcgcttagccgggctaccgccccctgtacgttgtgtgccgggtaaggcgtagccgccacccggcatccaatccggctatgcgtacgtttacggcaaactacaccagcgccagcgcaccgacaatcgccccgcacagcgccaccagtccgcccgtcagccacagcgctttggccgggaaggctttacgcagcataatcagcgacggcacgctcactgccggcagagtgatgagcagcgccagcgcgggcgccgtccccatacccgccagcatcattgtctgcacaatcggaatttccgccgcggtagggatcacaaacaggcagccggcgatcgccatcgcgataacccagaacaacgtattatccaccacgccatcggcgtgcgggaacagccagacgcgcgccgctcccagcaccagcaccgcgaggatataaaccgggatcgtgttccagaacagcgtccacagcgcccgcagccagcggctaaagaagccgccctgagtcgcttccgacggtgcagcaggcaccgctaccggctgcgtcgccgcctctttcacccatttctgcaccagcgtcgccacagttaatactgtcgccaggcccgccaccaggcgaaccagcgcaaactgccagcccagaacaaagcccataaacaccagcgtcgccgggttgagcagcgggttccccatccagaacgccagcgccccgcccatcgacacctgctgtttgcgcatcccggccgcgaccggcgcggcgcagcaggtgcacatcatgcccggcagcgagaaaatcgctcccagcagcgtgccctgaaaccgcgattgtcccagggtgcgtagcagccagtcgcgcggaatgagtacctgaatcaacgacccgagcagcacgccgagcaccgccgctttccagacggcaaggaagtaaaccatcgcatagtcccacgccgccatcagcgggttagcgtcggcctgggcgagaatagatttaccgatactgtgggtttccgcagcggtgaaggctttcccgtagtacggctgccatttgacgtaccacagaccaacaatcacgacgagaaagaaaagcgcgggtttccaccattgaaatggtgacgccgcctgagatgaagactgaccagccatagcattccccagcaagaaatgtggatatgaattgaagccgtgaatactacgccggaagcctgcgtttgcaaaccgctattcagcctgccgcgcggcgcgctcccgtagttccgatgatgtcagaattcgcaccccttcgtgggtgggcgacagcgcctccgccagcagggcgatcgccacatcgcgggccgcaatggatttccagttccccggcaagagccggaacaatggtgcgaggaaggtctcattggcccgctttttttcccgctcgcctgacagcatcgacggcctggcgatggtcagccgcggccagtcttgctcaatcagcgccgcctccatttcccccttcacccgattgtagaaaaacggcgagtgggcgttggcgcccatcgcgctaaccaccagcatatgttgcgcacccagtcgtttgccggtcagcgcggtatcaaccaccagcgtgtagtcagcatggacgaaggcctctttgctcccggcctcccggcgcgtcgttcccaggcaacagaagacgatatccaccgggtcaaccacctgcgccagggcatcggtcagctggggatcgtgaggattaaaaacacctttcgctggcgccagcgggcgacgcgtcggcgcggcgatggtgcttatacggggctcattctgcagcagccggagtaagtgaccgccaactaacccggtcgcgccggttaataatacctgactcattggttctcctttacagaattctccgccttgcactttcgggctcatgttccaggcttaataccttacaaggtaagtatccaccatcatcatggaattacctcattgaccatccagacagtggaggaagcatgagtaaaaagatagccgtcctcattaccgacgactttgaagattctgaatttacctctcccgccgaagcctttaagctcgccgggcatcaggtcatcacgatcgaaaagcaggctggcaaaacggtgaagggtaagcagggagaagccgaggtcgccatcgacagagccatcgatgacgtcacaccgggtgaatttgatgccttattgctgcccgggggctactctcccgaccagctgcgtggtgatgaacgcttcgtcacctttacccgcgattttgtcaacggcggtaagccggtgtttgccatctgccacggcccgcagctgctgatcagcgccgatgtgatccgcggacgtaagctcacggcggtgaaaccgattgtggtggatgtgaaaaacgccgggggcgagttttacgaccaggaggtggtggtcgataacgaacagctggtcaccagcagaacgccggacgatctgccggccttcaatcgcgaagcgctacgcctgctcggcgccggcatcacgccgccagtgtaatttcttcccgaaacccagcgtgttgtcggtaaatttgatttcgtccggacgaatctcccataccggcgccgacagcatgcgggccaccgggaagcgcttgacgtagcgctggcgcattcgcgcctcttcgtcaccgctcagacgacggatctcgcctttgaactgcacgccgcggatcagagccacggtttttggctggccgttgaccgtgccggccaccttcgccctctgtccggtcatctggccatggcgggtgtgctcctcgctgagcagataaaaggccacggtatccgggtcatagacgtaaaaggcattcgcgcaccacagctcgtcttcacgggagacgcaccaggtgacgacgtgctgtttactcagccagcgaccaatggcggcaagcgtatccatctttcttctccattatgctatggtgcacacaccttaccatagtgactttgtgaccgtgtgctggtttctgtatctcattcgaaccgcggataatcgcctttataccggcatcaccaccgacgtgccacgccgctttcgccagcatcaggcgggaaaaggcgcaaaggcgttgcgcggcaaaggcgacctgcagctggcctttagccacgaagttggtgaacactcacttgcattgcgactggaatatcgcgtcaagcagctaacgaagcgcgaaaaagagcgcctcgttgccggagaggatgccttcgaaaccctgctggcaaggcttaaagacgattaaagtgctcgctgtattctacctggccatggacgccgtcgagggcgtcatccgccagacggtgaacctggaacgcctcggcgctgtccggccagcggcagcggagatcgaagcgcgcggccgattcaaagccgaagcgacggtataaatccgggtcgcccagcgtcaccaccgcggcgtagccaaactcattcagcgagtccagcccttcataaaccagctgccgaccaatgccctgtccgcggtagcgttcatctaccgccagcggcgccaggccgacccactgcagctcttcaccttccaccgccaccgggctgaaggcaacgtagccgatcacctggccttcatcatccgtcgccactacccccagcgtgatcagtccatcttcacgcagatcgtgcaccagctgcgcttcggcatcgcggccgaaggtacgacgcagcagcgcgtcgattcccggtgcatcaatcccaatctccactcgaatcagcatgcctcacctaccgatgtctgttcaggtttctgcgggctcttcagtccagcttcgacaaaatccgccagttgcagcaacatcacgcgcagcgcttttggcatctgctcgagctcaatggcgtccatcaaattttttacatacagccccagctccgtatcgccttcaatgaccagacgacgctggaagaatagcgtatccggatcctgcttgcgcgcggcgatcattaacagatcgctggcgtcggcgctgaagctgacgtcggcgtcggcctgctggctgaccaccagtcgaccatcgactaccgaggtataccacagcagaccgatgtcacgcacatgaatacttaaccaacgcccctcaagaaactccagctccccctccgccagagcctggcgaaactgccagctcagcacttgctccagcacctggcgcttgagggcaaaaggcgccagcttaaccggcacgctcattaaagacgggccaaagtggaccagccgggaacgcagtttatccaacacaagctttactccatgaatgcaatagttccgctattgtgccatatcacataaacaacatagcggcgtaaatcaacaaaaacgcgatgacggccgccagttattggcgccgccaatacacttttaactgcctcaaatcaaaaattgtcaccagaaggttaactaaaatccctgctcgttaaccattcagcgtccctgacgggccgcatttttcaggaaaaattatggagctgctctgcccagccggtaaccttccggcgcttaaggcggccatcgaaaacggcgccgatgccgtctatatcgggctgaaagatgacaccaacgcccgccactttgccggccttaatttcaccgaaaagaaactgcaggaagccgtcagctttgtgcatcagcaccgtcgtaagctgcatatcgccatcaataccttcgctcatcccgacggctacgcccgctggcagcgagcagtggatatggccgctcaattgggcgccgatgcgctcattctggccgatatcgccattctggagtacgctgcggagcgttacccacacattgagcgtcacgtttcggtgcaggcttccgccaccaatgaagaggccattcgcttctatcatcgcaacttcgacgtcgcgcgcgtcgtactgccgcgcgtgttgtctattcatcaggtgaaacagttggcccgcgccacgccggtgccgctggaagtcttcgccttcggcagcctgtgcatcatggcggaaggccgctgctatctctcttcctacctgaccggcgaatcgcccaacaccgtcggcgcctgttcgcctgcccgcttcgtacgctggcagcaaacgccgcaggggctggaatcgcgtctcaatgaagtgctgattgaccgttatcaggatggcgaaaatgccggttatccgacgctgtgcaaaggccgctacctggttgatggcgagcgctatcacgcgctggaggagcccaccagcctcaacactctggaactgttgccggaattgatggccgccaatatcgcctcggtgaaaatcgaaggccgtcagcgcagcccggcttacgtgacccaggtggcgaaagtctggcgccaggcgatcgatcgctgcaaagccgatccgcagaatttcgtaccgcagtccgcctggatggagaccctgggcgccatgtccgaggggacacaaactacccttggcgcttatcaccgtaaatggcagtgagaaacatgaaatattcattagggccggtgctgtactactggccaaaagagacgctggaagatttttaccagcaggcggcaaactgcagcgccgacaccatttatctcggcgaagcggtatgcagcaaacgccgcgccaccaaagttggcgactggatcgaaatggcgaaaacgctggccgctagcggcaagcaggtggtgctctccactctcgcgctggtgcaggcctcttctgaactgggcgagctgaagcgctatgtcgataacggcgaatttctgattgaggccagtgatttgggcgtggtaaatctctgcgccgaacgcaagctaccgttcgtcgccgggcatgcgctgaactgctacaacgccgttaccctgcgcctgctgcggaaacagggcatggtgcgctggtgcatgccggtggaactctcccgcgactggctggctaatttactgacccagtgcgaagagctgggtatccgcaaccagtttgaagtcgaagtgctgagctacggccatctgccgctggcttattccgcgcgctgctttaccgcccgctcggaagaccggccaaaggacgagtgcgaaacctgctgcatcaagtaccctaccgggcgcagcatgctgtcgcaggagaaccagcaggtgttcgtgctcaatggtattcagaccatgagcggctacgtctataacctgggcaaggagctgacctccatgcacggcctggtggatatggtgcgcctgtcgccgatgggcaacgagaccttcgccatgctcgaggccttccgcgccaacgaaaacggcgctgcgccgctggatctcaccagcaatagcgattgcaacggctactggaaacgattgccaggactggtgcttcaggcctgataaaccgctcactttgttaacaacagtgctcagattttaatgcattattaaagatgcagcttttctggctggcgcgtccaggatgcgccaggctggaagaagaccttcaatctgatgacgatgctgtagcaaagtgagcctttatgactgacaaatctgttccattctcggtgctcgatctggcgccgatcccgcaaggatcttctgccaaagaagcctttacccactctctggatctcgcccggctggccgaatcgcgcggctatcatcgctactggctggcggagcaccataatatggtcggcattgccagcgcagcgacctcggtgctgattggctatctcgccgccaacaccaccaccctgcatctcgggtccggcggcgtgatgctgcctaaccactctccactggtgatagctgagcagttcggcaccctgaacaccctttaccccgggcggatcgacctcggccttggccgcgcgccgggcagcgatcagccgaccatgcgcgccctgcgtcgccatatgagcggcgatgtcgataatttcccgcgcgatgtagcggaactggtggactggtttgacgcccgcgatccgaacccgcacgtgcgcccggttcccggctacggggagcgcattccagtatggctgctgggctcaagcctctatagcgcgcaactggcggcgcagctcggcctgccgtttgccttcgcctcgcacttcgcgccggatatgttgttccaggccctacatctgtatcgcagcaatttcaaaccttcggcgcggctggaaaaaccgtacgcgatggtgtgtatcaatatcatcgccgccgacagcaaccgcgatgcggagtttctcttcacctccatgcagcaggcgtttgtgaagctgcgtcgcggcgagaccgggcagttgccgccgccggtggaaaatatgcatcagctgtggtcagcatccgagcagtatggtgtgcagcaggcactgagcatgtcgctggtcggcgataaaactaaagtccgccatgggctagagtcgattctgcgtgaaaccgaggcggacgaaatcatggtcaatggccagatcttcgaccaccaggcgcgtctgcattctttcgatttagcgatgcaggtgaaagaggagctgttggggtaacacacacgtcagcccggtggacgtcgcgccaccgggcaatagctttactgataaaccggcagcagattgacgctcgacaggatatgtacaaccgcattgccgaggccaaagagcaggatcagcacaatcattggcgttccgccccagacgcggaactgtgggctgccgaagcgtttgcgtgaggcgcgagccagcagcgccggtacaatcgccgcccagatcgtcgccgccaggccagcatagccgatggcgtagaggaaaccatcgggtttgaccagtccgccaatcatcggcgggataaaggtcagcagcgcggttttaaagcgtcccatcgcgctatcgtcaaagccaaacagatccgccaggtagtcgaacagccccagcgtcacgccgaggaatgaactggcgacggcaaagttcgagaacaccaccagcagcagatccagactccgactattcagcacgccgctcaacgcctgcaccagcacatcaatgttgccgcccttctgcgcaatgtcgataaactgcggacgagggatgttacccatcgtcaccagcagccagaccacgtacagacccagcgccagcagcgtaccgtaggttaagcagcggatgatggtgcgcggatcttttccgtagtatttcatcaggctcggcacgttgccgtgatagccaaacgaggccaggcagaacgggagcgtcatcagcaggtatggcgcataggaggcattcttctccgcaacgttaaatagcgtcgtcggctcgacgtgcccgagcaggctaccgaaggtcaggaagaaggtgatcaccttagcgcccagtacgatagccgtcatgcggctcaccgctttggtgctcatccagacgataaacgccaccagcagcgcaaagccgaagcccgccgcgcgcgccggcaccttcagcgacagttcactgaaggtgtggtggaggatcgaaccgctcgccgaaatataggcgtaggtcaggatatagagcacaaaggcgattgatacaccgttcaccaggttccagcccttgccgagcaggtctttggtaatggtgtcgaagctggagccgatgcggtagttaagattggcctcgaggatcatcaaaccggagtgcagcatgcagaaccaggtgaagatcagcgccgccagcgaccagaaaaaccacgcgccggacatcaccaccggcagcgagaacatgcccgcgccgataatcgtgccgccgataatcaccacgccgccaaacagagacggacgggttgccgtagtggttagtgtcgccatttaccgaattctccagtcgaaaatacttcgctcacgttgagcatgacgcactgtaccagtacacgagtacaaagggaataaaaaaagccccaatcatgacgatcggggctgtattatttagtttacgctagcgggcggcgttgattacgcatcgccaccgaagcgacggcgaccggctgagtcatcgcggcgcggcgcggatgcatcgtcacgacgcggcgcacggccttcacgacgttcgccgctgaaacgacgtccttcaccacgaccgccttcacgacgttcgccaccgaagccacggccgccttcacgacgctcgccgccgaagccacggccgccttcgcgacgctcaccgccgccacgacgttcggtgcgcggctgcgcatcgcccagcagctgcatgttcatcggcttgttcaggatacgggtacgagtaaagtgctgcagcacttcgcccggcatccctttcggcagctcaatggtggagtgagaagcgaacagcttgatgttaccgatgtaacggctgctgatatcgccttcattggcgatcgcgccaacgatatgacgcacttcaacgccgtcatcgcgacccacttcaatgcgatacagctccatgtcacccacgtcacgacgctcacgcttcggacgatcttcgcgatcgccgcgcgggccgcgatcattacggtcgccacgacggtcgaaacgatcgtcacgatcgcggaattcacgacgtggacgcatcggcgcgtccggcggaacgatcagcgaacgttcgccctgagccatcttcagcagcgcagcagccagcgtttccacgtccagctcttcaccttccgccgtcggctggattttcgccagcagtgcacggtactgatccagatcgctgctttccagctgctgctgaactttcgcggcgaatttttccagacgacgcttgctcagcagctccgcgttaggcagttccacttcaggaatggtcagcttcatagtgcgttcgatgttgcgcagcagacgacgctcgcggttctcaacgaacagcagcgcgcggccagcacgaccggcacgaccagtacggccgatacggtgaacgtaggattcagaatccattgggatgtcgtagttcaccaccaggctgatacgctcaacgtccaggccacgggccgcaacgtcagtcgcaatcaggatatccagacgaccatctttcaggcgttccagagtctgctcacgcagcgcctggttcatgtcgccgttcagcgccgcgctgttgtagccattacgctccagcgcttcagctacttccagggtcgcgtttttggtacggacgaagataatcgccgcatcaaagtcttccgcttccaggaaacgcaccagcgcttcgtttttacgcatgccgtaggcagtccagtagctctggctgatatccgggcgagtcgtcacgctggactgaatgcgcacttcctgcggctctttcataaagcgacgggtaatgcgacggatagcttccggcatggtggcggagaacagcgcggtctgatgcccttccgggatctgcgccataatggtttctacatcttcgataaagcccatgcgcagcatttcatctgcttcatccagtaccaggccgctcagtttggagaggtccagggtgccgcgcttcaggtggtccagcagacgacccggggtaccgacgacgatctgcggaccctgacgcagggcgcgcagctgcacgtcataacgctggccgccgtacagggcaaccacgttcacgccgcgcatatgtttagagaattccgtcattgcttcagcaacctgtaccgccagctcgcgggtcggcgccagcaccagaatctgcggtgctctcagctcaggatcgatgttgttcagcagcggtaaagagaatgctgcggttttaccgctaccggtctgggccatacccagaacgtcgcggccgtccagcagatgcggaatgcactcagcctggatcggagatggtttttcgtaacccagatcggtgagcgcttcaaggataggagccttcaggcccagatctgcaaaagtggtttcgaattcagccatgtagtacgtgtgcctcaaaattaatggcggccagtctacataactcatcgtgaaaatttacggtaattttcattgaaaagtgtgaaccggctcaaagtaggtgtattaacgaacaacaacgccctcacccgcgaaggtgatggcaagcaaaaaactatgggctgatgtgttcgtcagctattgctggtccgattctgccaggtcatcttgctcctggcccaagagcgataattccaacaatgcgtatcggtgctcaacgtagttgtgtacgttgttggcgaccgccagtttgaacagtgccgtagcgctgtccttgtcccccagacttaggtagtacttacctaaatagaagttggtttcactgagatgctcagcgagcgaggtgttatccgttgcgtctgccttcagacgagtcatcagctctttttcgctaatgtcgccaaggtagaactcgacaatgttccatccccattgctctttatccgacttgtttaagcgctctctgagtgcttcaagcgcccgcttctcgtcgagtttacgctcggcgatataaagccacaggctacggaaaggatcattgggatcgtcttgataaaacgccagcagatcatcttgcgctaacttagcccggccgccgtaatacagggcgataccgcggttcaagtgcgcgtagttgtaagttggatcaagctcaagtacagaatcaaacgcttcataggcagcatcaaaattgcctgcctgcgttaagtaaatgcctaagtaattgaatacttccggcatatcgggtcggattgccagcgcttgtgaaaaatcatttcgcgctagtgccctcagaccgagactatcatacaacactccgcgctcatataaaagctgtgcgcgttcgtcatcggataaagcccgactggcaagaatttgttccatgcgtgccagaatcacttcttgctgtaaagtcggttgcaatggtactgcgaggacggcgtccttacgccaggcggtgctactgcatcctgccagcgtgagagctgtcgccacgaaacaccagcgcaaaaaaggcttcatttcccactcccgaagacaacgattggatgaacgtcctgttccccggctgcaaacgaggcgtcctgcccgtaaaacgccctccgcaaaaacggagggctaacggcaaccttactcgccctgctcggcagccggagcttccggcgctgcggcagacggagtctgttcagttgcttctttaatgctcagacggacacggccctggcggtcaacttccagaaccttaaccggtacttcctgacccatctgcaggtagtcagtcactttctcaacgcgcttgtcagcgatctgcgagatgtgaaccagaccttctttaccgccgccgatggcaacgaatgcgccaaagtcaacgatacgggtcactttaccattgtagatgcggccaacttcgatctcagcggtgatctcttcgatacgacggatagcatgctgcgctttgtcgccgtcggtcgctgcgatcttcacggtaccgtcatcttcgatctcgatggtagtaccggtctcttcggtcagggcacggataacagaaccgcctttaccgataacgtctttgatcttgtccgggttgatcttgatggtgtggatacgcggtgcgaattcagagatatcgccgcgcggcgcgttaatcgcctgctccatcacgcccaggatgtgcagacgcgcacctttagcctggttcaatgcaacctgcatgatttctttggtgataccttcaattttgatatccatctgcagcgcagagataccgtcgcgggaacccgcaactttgaagtccatatcgccgaggtggtcttcgtcaccgaggatgtcagacagcacgacgaagttgtcgccttctttcaccagacccattgcgatacccgccacagcggcttttaccggcacgcccgcgtccatcagcgccagagaggcgccgcagacggaagccatggaagaggaaccgttagattcggtgatttccgataccacgcgcacggtgtacgggaattcttcaatagtcggcatcacggccagtacgccgcgcttcgccagacgaccgtgaccgatttcacgacgcttcggagaccccaccatgccagtttcgcctacggagtacggagggaagttgtagtggaacaggaaggagtcggtgcgctcgcccatcagttcgtcgatgttctgcgcatcgcgtgcggtacccagagtcgcggtaaccagcgcctgcgtttcgccacgggtgaacagcgcggaaccgtgagtacgcggcagaacgccggtacgaacgtccagaccacggatcatatctttttcacggccatcgatacgcggctcgccggccagtacgcggctacgaaccacgtttttctcgatggcgtgcaggatttcacccagctcgttagcgtccagggtttcatcttcagcaaccagcgtggcgatggtttcagatttgatcacgtcaacctgagcgtaacgctcttgtttgtcggtgatacggtaagcatcgctcagacgggattcagccagcgcagccacgcgcgcgttcagcgcttcgttgaccgcttccggctgccagtcccaacgcggtttaccggcttctttcaccaggtcgttgatgttctgaataacaatctgctgctgctcgtggccgaagaccaccgcgcccagcatctggtcttcgctcagcagttccgcttcggattccaccatcagcacggccgcttcggtaccggcaaccaccaggtccagtttgctggacttcagttcttcctgggttgggttcagtacgtactggtcgttgatgtaacccacgcgcgcagcgccgattgggccattgaacggaataccagacagcgacagcgcagcggaagcaccgatcatcgcgacgatgtctgggttaacctgcgggttaacggaaacgacggtggcgataacctgaacttcgttaacgaagccttccgggaacagcgggcgaaccgggcggtcaatcagacgcgcgatcagggtttcgccttcgcttggacggccttcacgacggaagaaaccacccgggattttaccggcagcgtaggtacgctcctggtagttaacggtcagcgggaaaaagtcctggcctggcttcgcttttttctgacccacaacggtaacgaataccgcagtgtcatccatgctaaccatcacagcggccgttgcctggcgcgccatcatgccggtttccagggtcacggtatgctggccgtactggaatttacgaacgatcggattaagcaaaattctatcctttttatctataaatcacgccatatccacgacatagcgtctattgacccgatcttctgcatcctcgcgactaatgacaacctttacccgcccctgcggatgaagcctctcattagccgcgcgaacctctgcatgaagatcattactagcaacaatacatgagttttgaatgaattgctgccgcccggtcgaaaaaaggggccgtcaggcccctttttctgaaactcgcagaattagcgacgcagacccagacgctcaatcagcgcagagtaacgggcaacatctttacgtttcaggtagtcgagcagtttacgacgctgagaaaccatgcgcagcagaccacgacggctgtggtgatcttttttgtgctctgcaaagtggccctgcaggtggttgatctgtgcggtcagcagtgcaacctgaacttcggtagaaccgctgtcgttttcgccacgaccaaactcagaaacgatttttgctttagcttcaacgcttagagacattttataactccaaaaattaaaagaaagaaagggtgccgatctctaattcagcgacccctgatgcaacgcccgaaaatgttaaaacacgttagcggacgttaagcggcgatattctactcgtagcaggcttttatcgcaagaaaagcgcttacgccgggtattccaccaccagacgacgcggggccacgcggccttcatcgtcaatttcgcccatgccgagaaacttgccggactcgctctccatcacccgcaccagcccgttaagcggcgcgcctgactgacgtaccgggttgccgttcttaaagtagactgcggaggtttctggaatattaaccagcgggtaatccgaggccgggctgtccatcggcatcagcagtggatcaagcaactgagcggcaggaatatcctgcgccgccgcctcatcgaccagcgcctgcagctgctcgagggtcaccatccgctcgaccgggtatttgcttaccgccaggcgacgcaggaaaatcacgtgcgcgccgcagccgagcttctcacctaaatcatcgataatcgtccggatgtaggtgcctttcgagcagtggatctccagctccagctcatcgccttcgcggcgaataaacagcagctcatagacggttatcggccgggcttcccgcggaacttcaataccctggcgagcatattcgtatagcttcttgccctgatatttcagcgccgaatacatcgacggcacctgctgcgtctcgccgcggaagctgtccagcgccgccgccagctgttcgtcgctaaaagtcagcgggcgctcttccaccacctgaccgtcggcatcggaggtatccgtgcgctggccaagtttggcgatcacgcggtaacgcttatcggagtccagcagatactgggaaaacttggtcgcttcgccaaggcagatcggcagcataccggtcgccagcggatccagcgcgccggtatgcccggcgcggttggcgttataaatacgttttactttttgcagcacatcgttactggaggcgccctgaggcttgtccagcaacaatacgccatgcacgtcgcggccgcgacgacgaggacgactcatcagtcctccttgctgtcgtccgggttcacacgacgctcatcgtcgtgtttcaccacgctggtgaccaggttggacatacgcatcccttccaccagtgagttgtcgtagaagaaagtcagttccggtacgatgcgcagacgcatcgctttccccagcagagagcggataaagccagaagcttcctgcagcgctttgatgcccgctttcaccgcggcttcatctttgtcgttaaggaaggtgacatacaccttggcataggccaggtcacgggacatttccacaccggaaacggtggtcatcatgcccagacgcggatctttaatttcacgctgcaggatgatggcaatctctttttgcatctcctgggccacacgctgcgggcgaccaaattctttcgccataataagttctccagaataaagacaaaaaaggggccaaaagcccctttttaaaatgattgccgggtggcgcttcgcttccccggctgcttagccatcaaatgattaatcgatgctacgctggatttcgatgatttcgaacacttcgatcatatcgccaacgcgaacgtcgttgtagttcttcacgccgataccacattccatgccgttacggacttcgttaacgtcatctttgaagcggcgcagggattccagctcgccttcatagataaccacgttgtcacgcagaacgcggattgggttgtgacgtttgatcgtcccttcagtaaccatacagcccgcgatggcgccgaatttcggcgatttgaagacatcacgcacttcagccagaccgatgatctgctgtttcagttccggagacagcatgccgctcatcgccgctttcacttcgtcgatcaggttatagatgacggagtagtaacgcagatccaggctttccgcttcgataactttacgcgcagaggcatcggcacgaacgttgaagccaaccagaatcgcgttggatgctgctgccagggtagcgtcggtttcggtgataccacctacgccggaaccgatgatcttcactttcacttcgtcggtagacagtttcagtaaggaatcggaaatcgcttcgacagaaccctgtacgtccgctttcagtacgatgttcacttcgtgaacttcgccttcggtcatgttagcgaacatgttttccagtttagatttctgctgacgcgccagcttaacttcacggaatttgccctgacgatacagcgccacttcacgcgcttttttctcgtcacgcactacggtcacttcatcaccggcagccggcacaccggacaggccgaggatttccaccggaatggacggacccgcttccagcacttcgcgacccagttcgtcacgcatcgcgcgcacacggccatattcgaagccgcacagaacaatgtcgcccttgtgcagagtaccttcgcgaaccagaacggtagctaccggaccacgacctttatcaaggaaggattcgatgaccgcgccgctcgccataccgttgcggaccgctttcagctcaagaacttcagcctgcagcaggatcgcgtccagcaggtcgtcgatgccggtacccgctttcgcggaaacgtggacgaactggctctcgccgccccactcttccggcaggatgccgtactgggacagttcgttcttcacgcgatccggatcggcttctggcttatcgatcttgttcaccgccactaccaccggtacctgcgccgctttagcgtgctggatagcttcgatagtctgcggcatcacgccgtcgtctgccgccaccaccagaaccacgatatccgtcgcctgcgcgccacgagcacgcatggaggtaaacgcggcgtggcccggggtatccaggaaggtgatcatgccgttgtcggtttcgacgtggtaagcaccgatgtgctgggtaataccacccgcttcgccggaggcaaccttggtagaacgaatgtagtccagcagcgaggttttaccgtggtcaacgtgacccataatggtcacgaccggtgcgcgcggttcagccgccgcgccggtgtcacggtcgctcattacggcttcttccagttcgttttcacgacgcaggataactttgtggcccatctcttcggcaaccagctgtgcggtttcctggtcgatgacctggttgatggtcgccatggcgcccagcttcatcatcgctttgatgacctgagaacctttcaccgccatcttgttagccagttcgccaacggtgatggtttcgccgattacgacgtcacggttaacggcctgcgctggcttctggaagccctgctgcagagcggaacctttacggtgcttaccgcctttaccgccgcgcacggccgcgcgggcttcttcacgatcagctttcgattcagcgtgtttgttgcctttcttcgccggacgagccgctttgctgctacggctacggccgcgaccgccttcgacttcacgatcgttatcatcttcagcctgacgagcatgctgtgatgtggtgacgtgatagtcgctgctatcttccgggctgtctgaggtttcagaccaatttttttcgttttcttcagccatacggcgtgcttcttccgctacacggcgcgcttcttcttcaagtttgcggcgtgcttcttcttccgatttgcgcttcaattccgcggcttcgttctcgcgacggatcttttcagcctgggcggttttggtcatttcgtcggtatgttgattgctcactttgtctttttccgcagcttcacgtttcgctttatcagcgacttcacgtttagcttgttctgcggcctcacgttcagcttttaattgcgcctcgcgtttcgctgcttcttcagcttcacgacgggcctgctcttccgcttcacgctgcgcctgctcttccgcggccaggcgttcagcctcttgcggatcgcgtttcacaaaggtgcgtttcttgcggacttcgatttgtaccgatttactctttccaccggtacctggaatatttaacgtactgcgcgtcttacgctgtaacgtcagcttgtctggcgccgagccgtgttcacggttcaggtgcgtcaacaaagtttgtttctcttgcgaggtcacagaatcatcagccgatttgcggatgcctgcgtcagcaaattgctgtatcaggcgatccacagaggtctgaatctctgaggccagcgctttaatagtcacatctgtcatgctgttccttcctgctacagtttattacgcttcgtcgccgaaccaacaaatgttgcgagcggccatgatgagctcgccagctttctcgtcggtcatcccttcgatatcagccaggtcatcaacgccctgctcggcgagatcttccagcgtacaaacaccacgggcagccagtttgaatgccagggcacgatccagaccttcgagattcaacagatcatcggcaggtttgttatctcccaggctttcttcctgagccagcgccagcgtagtcagtgcgtttttcgcacgctcacgaagtgcttcaacggtggcttcatccagaccgtcgatttccagcagttctttcatcggcacataggccagctcttccagcgaggagaagccttcttcaaccagcactgtcgcgaaatcttcatcaatatcaagatatttggtgaaggtatcgatagcggcatgcgcttccgcctggtgcttagcctgcagatcgtcaacggtcatgacgttgagttcccagccgctgagctgtgaagccaggcggacgttctgaccgttacggccgatcgcctgcgccaggttgcccgcttctaccgcgatatccatggtgtgtttatcttcatccaccacgatggacgcgacgtctgccggcgccatagcgttaatcacgaactgcgccgggttatcatcccacaggacgatatcgatgcgttcaccacccagctcagtcgacacggcctgcacacgcgcaccgcgcataccgacgcaagcgccaaccgggtcgatgcgcttgtcgttggttttcaccgcgattttggcacgagagcccggatcgcgagccgccgctttgatctccagcacttcttcaccgatttccggcacttcgatgcggaacagttcgatcagcatctcaggtttggaacgggtgacgaacagctgggcgccacgcgcttccggacggacagcgtacagtacgccgcgaatgcggtcgcccggacggaagttttcacgcggcagcatatcttcacgcaggatcacggcttcagcgttgttacccagatccagtgtgatattgtcgcggttcacttttttcaccacgccggtgatgatctcaccttcgtgctcgcggaactgatcgaccaccatcgcgcgctcggcttcgcggactttctgcacgataacctgcttagcggtctgggtggtgatacggtcgaaggtaacagattcgatctgatcttcgacatagtcgccgacgttcatgctttcatcttcgaaacgcgctgcttccagcgtgatctcgcgcgtcggctgggtgacttcttctacaaccagccaacgacggaaggtatcgaaatcgccgctcttgcggtcgatttcaacgcgaacgtcgatctcttgttcgtattttttcttggtggccgttgccagcgcgctttccagcgcttcgaaaattttctcacgcggcagcgctttttcgttggaaacggcttcaacaacagccaaaatttctttgttcatcggggcctttcacctcaatccagactgttaaaagtggggaaccaggttcgccttctggatgttactcagcgcgaacacttcatctttgccttcgacggttaccgtgatcatctcaccgtctaccgctttgataatgccctgccatttgcggcggttctgaaccgccatgcgcagcaccagcgcaacttcttcgccggtgaaacgttgatagtgttcggcggtgaacatcggacggtcaagaccaggcgaagagacttccaggttgtaagcgacagtgatcgggtcttcgacatccatgacggcgcttacctggtggctcacatcagcacaatcatcaacgttgatgccatcttcactatcaatatagatgcgcagtgtggatgtgcgaccgcgaataaattcgatgccgaccagctcaaagccaagcgcttcaaccggcgcagtgagcatctctgtcaatttttgctctaatgtggacaaacccacccccaagacataaaaaaagggcgtatagcccagttattctgaagtcagataacaaaaaaccccgataaatcggggctttagataactgaaccctgagatcgccatggcgatctggaacaccttccgcaagaattctttcaaattcggctacgaaggacacctagtcctcacagtatatttgaaaaagtacttaatgggaaagtggttgcgggggccggatttgaaccgacgaccttcgggttatgagcccgacgagctaccaggctgctccaccccgcgcctgaaacgtggcatattttactctttttgagcaaaagacgcaaatactgctgggatttggtaccgaagacgggacataaaatcgagatgaattgtaacggcgattagtatattttgtcaacatgctttttagcgcccccgattgccgtttgtgctggtatttcaggcttttttagcaaaaagatgatgaagcacttcctgtcgccagtaaaagatggttaaatgaatactcacaattaatgcataaaaatgcagttaaggttgttgggtcgaactcaccacagtctatcgagcagggttttattttatgacgacgattctcaagcatctcccggttggtcaacgtattggtatcgctttctctggtggactggataccagcgccgcgctgttatggatgcgcaaaaaaggcgccgtgccttatgcatataccgctaacctgggtcaaccggacgaagacgactacgatgctatcccgcgccgcgcgaaagagtacggcgctgaaggcgcccgtctgatcgactgccgcaaacagctggtcgcagaagggatcgccgcgattcagtgtggcgctttccataacaccaccggtgggttgacctacttcaacaccacgccgctaggccgcgcggtcaccggcaccatgctggtggcggcgatgaaagaagacggcgttaacatttggggcgatggcagcacctataaaggcaacgatatcgaacgtttctatcgttacggcctgctgaccaacgctgaactgcagatttacaaaccgtggctggacagcgactttatcaatgagctcggcggtcgtcacgaaatgtccgaatttatgatcgcctgcggctttgattacaagatgtcggtcgagaaagcctactccaccgactccaatatgctcggcgcgacccatgaagcgaaagatctcgaattcctgaactccagcgtcaagatcgtcaacccgattatgggcgtgaagttctgggacgaaaacgtgaagatccctgcggaagaggtcaccgtacgctttgagcagggccatccggtggcgctgaatggtaaaacctttgccgatgacgtcgagatgatgctggaagccaaccgcatcggcggtcgtcacggcctgggcatgagcgaccagattgaaaaccggattatcgaagcgaaaagccgcggcatttatgaagctccggggatggcgctgctgcatattgcctacgagcgtttgctgaccggtatccataacgaagatacgattgagcaatatcacgcccacggtcgccagttgggccgcctgctgtatcagggccgctggtttgattcccaggcgctgatgctgcgtgattcgctgcagcgctgggtcgccagccagatcaccggcgaagtcaccctcgaactgcgtcgcggtaacgactactcgatccttaatacggtatcagacaacctgacctataaagcggagcgtctgaccatggaaaaaggcgattccatgtttactgccgaagaccgtatcggccagctgaccatgcgtaatctggacatcaccgatacccgcgagaagctgttcggctatgcacagtctggcctgctgagcgcctcctcggcaaccggtttaccgcaggttgaaaatctggaaaacaaaggcaaataatcgcctgacaatgttgctttccgccggcggatcaccgccggctttttattttgaatgacccaccaacgtaaaaaaaatgccatgacgcattttttccttatcgccagaccagcaaaactgttgactataatagcctcaattgattaattcatatctggtgatacacatcatgaatattaaaccgccgatcaggccgcaaaagaccattgaccgactgatcgatgtacttgagccacacgcgacacccgttaacgcgatcgccagaaaaagactgacatgggaatataaaggcaaaacccagctctttatttttaaaaaaggcgagctgtcgattattcgtaattccgacaggctactgatggtgaccgtctatgagccgcatcttttcggcgtgacggaaatgctgcagcccagccgcagccacagcctgcgagccgaggtatcatgcgaactgctacggatcgactatgacctggcttcggcgctttttcgtcagcataacctgtgggaagaggtgaccagcctgttggcttatcatacctcgtatatggtgtatcgtgacgatctggtcctgcagcagcgtacctattcggtcatccgtaaccatttgctggagatgatgctattaagcgaagagacccgacagcgagtatctattcttgagtatattcaggacaggacccttctgtcgcgtagcagtattctcaatgtattgtcagcattaaagaaaggcggttatattacctttgcccgcggcggttatttacaaaatatcgtctcacttcctgaaaaattctgacccgcactcctcctatcatttattgttatttgctgcagcggggaagatgtttaaatttaaaccaataaccgttaccgctaaaagaacaaaaattttatgctaagcgcctgggtttcccggaagacaatctattactgagttcgccagcagacgaccacaaacggcgttaaccgccgggtctgcaccggctcaggatatgccagcggaaatcggccagacgtgtgcggcggtagcgagagttgccccctcgcctgccgcgaccataacaatgagatgcacgaacccgttaattatgcccgaacgcccatatcgggcttttttttatctgaaggaatttaataatgaagtctattgctgcaaaaatggttgccgtaacgatcgctttgggagccagcagcgctgcctgcgcagccgttaacctgcatggagaagctggcgccgagtttaccaatctgtccgccagctttggcgccggggaaccgggtatgacgttcagttctcagtgggcccatagcgacaacgacggagatagtgtaggactgggaatgggttataactttaaccttggcccttttctgatgaccctgggcggtaaggcggtctatctgaatccaaaagatggtgatgaaggttacgccatcgccgccggtggtggcgctgaactcccccttggtcagtatttcacgcttttcggcgagggctattactcaccggactcaatgtccagcggcgttgaggattatgtggaggccaatgccggggtacgccttaacgtgctcccatctctgaatatcgaagctggctatcgctatattgatatggcagggaaagatggcaatcgcgataacacgctggccgacggcgcttacgccggggttaacttccgcttttaactcttcacagggattgccggtcggcagtccctgtttcattctcagctggtcagcggcacgcttttcagtacgcggttgatctcttgtaggcccgcaacattattctctttgcggtaaacctcattcatggacgccatctgctccaggcgggtcagggcgccatacaccttatacgcctcgctgtgtctgtcgaacacatcgcggcgctccacgtcctgcagataatgacttttcaacgaatggttaaggcgactaatcagtgccgtattgtcctggaaatagcgcctcaccgcctgggcatgattcgctgtagtcccagactcactgggcgataccggtacggttagcgcattaatcgtctccaccgtttgggagggcgatgttgaactgcacccagctaaaccgagcacgccggcgacgataagcaacccgatcttgttcattgtgtcacttcacctctgttaatttgacgaggcgactttaacgacagtaaaaggaggcaaccagcgaagagatgtttataaataaatggccagcggggacaaaaacaaaaaaagacgcttttcagcgtcttttttctggaatattggtaccgaggatgggactcgaacccacaagcccgttagggcactaccacctcaaggtagcgtgtctaccaattccaccacctcggtacagaatacttagtgcgggatatcgctggtcggctgagccggcgcagttggctgagtttgctccgttttcggcgcgctcagattatcccactcacttcctttactggtcttgttgctgttgatattacccagcgccagactgatgatgaagaacagcgcagccaggatgccggtcatacgggtcataaagttgccagaaccgctggacccaaacagtgtgccggaagcgcctgcaccgaaggaggctcccatatcagcgcctttaccttgctgcagcataaccagacctacaaggccaatcgctacaataaggaaaacaaccaaaagagcttcgtacataatcaacctgttccttgcggattcgccgcataccaagtgcttcgaccaataaagcgggacgttttaacgtttcccactgaagcgggtgtgaatactaaccaaagcgaatgaccttcgcaagggcaatttcgacacattgtatcaactgcagaaaaaaacagcaaaaagccaattttcgatcataaaaaaggcggcaagcgccgcctttttaaccacttagccggcaaagctaaacgctttttaccgcctcagcgatgcggtgcgcaaactcgtgcacctgatcttcatgctcgccttccaccatcacgcggattagcggctccgtacccgatttacgcagcaggacacggccgcgttttcctaacgccgcctccacttccgcggtcaccgctttgacatgctcattctccagcggattaccgctgccctcggtaaagcggacattcaccagcagctgagggaacattttcatcccgctgcacaggtcatgcaggctcatgtggttgcggaccatcgccgcgaccacctgcaggctggcgacaatgccatcgccggtggtggttttatccagcaggatcacatggccggagttttccgcaccgatgcgccagcctttttcctggagcatctccagtacatagcggtcaccgaccttcgcgcgggcaaacgggatgcctaactgcttgagcgccagctccagccccatattactcatcagcgtgccgacggcgccgccgcgcagctgcccctgacgcaatccttcccgggctatgatatagaggatctggtcgccatcgactttattgccttcgtggtcaaccataatcacccgatcgccatcgccgtcgtaggcaatacccagatcggctttttccgccagcacgcgcgcctgcagcgcccgcacgtcagtggcgccgacctcttcgttgatgttgagaccatctggctcgcagcccatcgcgataacctgggctcccagctcgcggaagacattaggggcgatgtgataggtcgcgccgtgcgcgcaatccaccaccactttcagcgttcccaggctcagttcgttgggaaaggtacccttacaaaattcaatgtagcgccccgccgcatcgacgatacggctggctttgcccagctcagccgaatccacgcaggtgagctctttctccatttcggcttcaatcgcctcttcgacatcatccggcagtttggtgccctcaatggagaagaatttaatgccgttgtcgtagaaagggttatgtgaagcagagataacaatccccgcctcggcgcggaaggcgcgcgtcaggtaggcgatggccggtgtcggcataggcccggtgaacgacgcagagagccccgctgccgccagtccagcttccagcgccgattccagcatatagcccgaaatacgggtatccttgccgatgataattttacgcgaaccgtgacgcgctaacactttgcccgccgcccagcccagcttgagcacaaactccggagtgatcggcgcatcgccgacgcggccacgaataccatcggtgccaaaatacttgcggttactcataacgtttttttcccttagcggcgagggtggcttccaccacgcgcagcgcttctaccgtttctttgacatcatggacgcggataatctgcgcgccctgcattgctgcaatgacggcacacgccaggctgccgttcagccgctccgacggcccgacgttcagcaactgacctaccatcgacttacgtgacataccgaccagcagcggcagaccaaagtgatgaaactccccaagcctggccaacagttggtaattgtgggagagatttttaccgaaaccgaatcccgggtcgagcagcaatttttcttttgcgatccccgcctgttcgcagcgcacaatgtgctcattaaaaaaaagctcaacatcggcgaagacgtcctcatacttcggcgcctcctgcatggtttttggttgtccctgcatatgcatcagacacactggcagtccggtttccgcggcggcctgcagcgcgccgggctcggtcagcgaacgaatatcgttgatgatatgcgccccggccctggccgattggcgaataacctccgccttggaggtatccactgagatccatacctcaaagcgctgggcaatggcttcaaccaccggtatcacccgcgcaagctcctcttccacactaacctcagccgcccctggccgcgtcgattcaccgccgatatcaatgatggtcgcgccggcgttgatcatcagattggcatgcttcaccgcctcaatcagcgaattatgggcgccgccatcggagaaggagtcaggcgtcacatttagaatacccatcacgtgggggtgagagagatcgagggttgagccctgggctacaagtttcatcacaaaatccctgagactgaagaggttaaaaaagaaaaaccccggagcggacgcccggggttttaaggttaaacaagcatcaacagcggtagcttacttgtcgcccagctgctctgacatggtgttgcccgggttcggcgtacgcggttcatcaaccggacgcggcgcacgaggcgtgccattgttgtcagagttgttagaagaaccaggttcttcccaacccgctggcggacgaacttcgcgacgagccatcaggtcgtcaatctgcggcgcatcgatggtctcatacttcatgagcgcatctttcatcgcgtgcagaatgtccatgttgtcgttcagcagctggcgagcacgaccgtagttacgctcaatcagcgatttcacttcctggtcgatgatacgcgcggtttcatcggacatatgcttcgctttcgcgacgctacggccgaggaagacttcaccctcttcttccgcatacagcagcggaccgagtttgtcggagaagccccactgggtcaccatgttacgcgccaggttcgtcgccactttaatatcgttggacgcaccggtagaaacatgttccggaccgtagataatctcttccgccagacgaccgccgtacagggtggagatctggctttccagtttctgacggctggcgctgattgcatcgccttccggcaggaagaaggtcacacccagcgcacgaccgcgcgggataatcgtcactttgtgcaccggatcgtgctccggcaccaggcgaccaataatcgcgtggcccgcttcatgataagcagtagactctttctgcgcttccgtcatcaccatggagcgacgttccgcacccatcatgattttgtctttcgctttctcgaactcaaccatcgacacaacgcgtttgttaccgcgggcagcaaacagcgccgcttcgttgaccaggttggccagatccgcaccggagaagcccggggtaccgcgcgcaatgattgccgcatcgatatccggcgccagcggaacgcgacgcatatgcactttcaggatctgctcacgaccgcgaacatccggcaggccaaccaccacctggcggtcaaaacggcccggacgcaacagcgcggggtcaagaacgtccggacggttagtcgccgcgataacgatgataccttcgttaccttcgaagccgtccatctcaaccagcatctggttcagggtctgctcacgttcatcgtgaccaccgcccaggcctgcgccacgctggcggccgacggcgtcgatttcatcgatgaagatgatgcaaggcgcggctttcttagcctgttcgaacatgtcacgcacacgagaagcgcccacaccgacgaacatttcgacgaagtcagaaccggaaatggtaaagaacggtaccttcgcttcaccagcgatcgctttcgccagcagcgttttaccggtacccggagggccgaccatcaggacgcctttcgggattttaccgcccagtttctggaagcggctcggctcccgcaggtattctaccagctcgccgacttcctctttcgcttcgtcacacccggcaacgtctgcaaaagtggttttgatctggtcttccgtcaacatacgggctttgcttttgccgaaggacatcgcgcccttcccgccgccgccctgcatttgccgcataaagaagatccagacgccgatcagcagcagcattgggaaccaggagatgaagatggaagccagcaggctcggctcttctggtggttcgccaacaactttgacgtttttagtcaacaggttatcgagcagcttcggatcgttaaccggaatgtaagtcgtgtaacggttactatctttcttggtaacgttgatctcacgtccgttgatacgcgcttcgcgaacctggtcctgattgacctcttgcaggaaggtagaataatccaccttgcggccattcgactcgctgggcccaaagctctggaatactgacatcagcacaacggcaatgaccagccagagtattaggtttttcgccatgtcactcaagggattaacctcttattacaactgtgttaaaaacagcgtcaggatactctatatccagtttctttcaaactttcgtttgaaatctgccggttatggtttacgcccggtcgctacaatatacacttcacgcgaacgagcgcgggaagagtccggcttacgaactttgaccttcgtaaacagggagcgaatttctcgaagatactcatcgaagccttcgccctggaacaccttcactacaaaactaccacctggcgctaatacatcacgagacatttcaagcgccagttctaccagatacatagcccggggaatatccaccgccggtgttccgcacatattcggcgccatatcggacatgacaacttggactttactgtcgcccactcgctcaagtaacgctttcaggactaattcatcacgaaaatcgccctgaaggaagtccacaccaacgattggatccattggtaaaagatcgcaagcgatgatgcggccgctgttgccgatctgcgtgaccgcatactgcgaccagccaccgggagcagcaccgaggtcgactaccgtcatccccggcttaaaaattttgtcactttgctgtatttcatcaagtttaaaccaggcacgggaacgtaacccctttttctgtgcctgttgaacatatttatcgctaaagtgttcctgaagccagcggcttgagctggcagaacgctttttacctgtcatttaacattcccgttcgggttcatcgtactttactgcgtaaaaatcgacgcggtagtttggcgatatatgggagatggcggtagaatgacccgttttcaatcccaacgtaagcaaaaaaatacgatgaatctgagtactaaacaaaaacagcacctgaaaggtctggcacatccgctcaagccggtagttatgcttggcaacaatggtttgaccgaaggggtactggccgagatcgaacaagcgttagggcaccatgaactcatcaaggtgaagatcgcctcagaagatcgcgaaacaaaagccttgatcgtggaagccatcgtacgcgaaaccggcgcctgtaacgtacaggtcatcggtaaaacgctggttctgtaccgcccaacaccagagcgtaaaatctcgctgccacgctaagaatatcctgaatctcgacacaactttgtgtaaaacgagggatttctgcggccaggcgagcaaaatgccatgctcctgacgttgataaaaggccgctatgcggcctttttcctttctttacaatctataaacatcgtagcgggaaatacgccttacaggtattcaaccttggtaatttcgtattccacttccccacccggggtacggatagtcacgacgtcatcctgctctttgccgatcagaccgcgggcgatcggcgagttcacggagatcagattctgcttaaaatcagcttcgtcatcgcccacgatgcggtaggtctgttcctcgtcggtatcgaggttcagcacgctgacggtagaaccaaaaatcacccggccgttgttcggcattttggtgatatcgataacctgcgcattagacagcttcgcttcgatatccttgattcgcccttcgcagaaaccctgctgctcacgcgcggcgtgatactcggcattctctttcagatcgccgtgttcacgggcctcagcaatagcggcaatgatttcaggacgacgcacagacttcagataatccagttcttcgcgcagtttttcagcgccacgtaaggtcatcggaatcgcttgcattagttatacctctttatcattccttcagggaacggatagctccgctccgccacctgtcctgcccacgggcaggacacgagcaaaaagaaaccgacccgggaaacactccccaggtcagcagcaatttttcatttgatgggtattttaccccgaagttcattatgggtcatcgtttactttactgggcgttgcaccgtagtatgacggcctggcttcaggttgttagcgcgagattatgcgatttcccagatttatcatcggattgaccgccggtatagcgcttagcgctcaggcggcgaatattgacgagtacatcaaccagcttcccgccggtgcgaaccttgcctttatggcgcaaaaggtcggcgcatcgacgccggaaatcgactatcacagccagcaaatggcgctcccggccagtacgcaaaaggtcatcaccgcgctggcggcgctgctgcaactggggcccgattttcgctttaccaccacgctggaaaccaaaggttcccttgacggcggcgtgctgaaaggcgacctgattgcacgcttcggcggcgatccgacgcttaaacggcaggatattcgcaatatggtggcgacgctgaaaaaagccggcgtgcagcgtatcgaaggcaatgtgctcatcgatacctcggtcttcgccagccatgacaaagcgcccggctggccgtggaacgacctgacgcagtgcttcagcgccccgccggcggcggcgattgtcgaccgtaactgcttctctgtctcgctgtatagcgcgcagaaaccgggcgatgtcgccttcattcgcgttgcatcctattatccggtcaccatgttcagccaggtacgaacgctggcgcgtggctcatcggaagcccagtattgcgagctcgacgtggtgccgggcgatctcaatcgctatactctcaccggctgcctgccgcagcgtagcgagccgctgcctctggccttcgccattcaggatggcgccagctatgccggagcgatcctcaaagccgagctggcccaggcggggatcacctacagcggcacgctgctgcgccagacgctggccaatgagcccggcaccgtgctggcaaccagccagtcggctccgctgcacgatctgctgcggatcatgctgaagaagtcagacaacatgattgccgacaccgtctttcgcaccatcggccacgcccggttcggcgtacctggcacctggcgggcgggctccgatgccgtacggcagatcctgcgtcaacaggctggggtcgatctcggcaacactatcatcgccgccggctctggcctgtcgcgccacaacctgatcgccccggcgaccatgatgcaggtgctgcagtatatcgcccagcacgataccgagctcaacttcatctccatgctgccgctggcgggccatgacggatcgctgcagtatcgcgccggtcttcatcaggcgggcgtcgatggtaaagtttcggcgaaaaccgggtcgctccagggggtttataacctcgcaggcttcatcactaccgccagcggacaaaagatggccttcgtgcaatatctctccggatacgccgtggagccagctgatcagcgcaatcgccgcatcccactggtccgctttgaaagccgcttgtataaagatttgtaccagaacaattaaaacaaaagggccgcatcagatgcggccctttttgatccagagaagtcaggattagcgtttgtagatgaattcgacgccttcttcgtcgtcctcatcccagtcgtcatcccagtcttcgtcatcttctgcttcggcttcggcctcttcaagctgctgacggtgatagtcgtcccacataaactcgactttctccggcttctgctcttcttccgcctggacgatcgggttttcgatgatgaaggtcatcacgtcccagcacagctctttcacgccctgctggctggccgcggagatcaggtagaatttctcttcccaacccagcgcttcggcaatcgctttggctttggcttcggcttcggccttgtccatcaggtcaatcttgttgaaaactaaccagcgtggtttggaggctagcttctcgctgtatttctccagctcgccgatgataatgcgcgcattctcaaccggatcggagccgtcgatcggatcgatatcgatgaggtgcagcagtacgcggcagcgctcgaggtgcttgaggaagcggataccgaggcctgccccttccgctgcgccttcaatcagccccgggatatcggcaactacgaagctcttttcattgtccatacgcaccacgcccaggcttggcaccagggtggtaaacggatagtcagccactttcggcttggcggcggagaccgcacggatgaaggtggatttgccggcgttcggcatgcccagcatcccgacatcggccaacagcatcagctccagctgcaggtcgcgtttatcacccggggtacccatggttttctgacgcggcgtacggttaacggacgatttgaaacgggtgttgcccaaaccgtgccagccgcctttcgccaccatcagacgctgaccgtgtttggtcatatcgcccatggtctcgccggtgccctgatcgataacccgggtgccgaccggcacttttaccgtcacgtctttaccgcgcttaccggtacagtcgcggctttgaccattctgcccacgttcggcgcggaacgatttttcaaaacggtagtcgatcagggtgttcaggttctcgtccgcttccagccagacatcgccgccatcgccgccatcgccgccatccggaccgcctttcggaatatacttttcgcggcggaagcttacgcaaccattgccgccgtcacctgctacgaccaggatcgttgcttcatctacaaacttcattttactctccgtaaatcattcgcctgagcggggcagcggtactaccgcctctcgcttacgccaacgtccccaaagacgatgaccgatggcggaatacatcgcgcccgcaaccacgacaaacgcaccgagataaccaatcaggtttaacatcggtctggcgaaaacatcgggccaggccattgataataaatcagaaaacagtagcgtaaacagtggcgtcaaggtgattaacgcgctgacctgcgccgcctgccagcgcgccatggcttccgccagcgccccgtagccgaccagggtattcagcccgcaaaaaatcaggcatgccagttgccagctgcttaaccgggaaatcactccgggctcagcaagcggcaataatgcaatcgtacacaaagtgtacagcaaaaatagtatctgctgtgatgccagacggcgcaataacaccttttgcgcgacgccgtagcttacccacaccgtagcggcagcaacgccgaaaattaccccccacgtgtagtccgtcaggcgggtaaagatttcaatcagactggtattgaagaacatcaccagcccgctgagcagcatcaacgcgcccaccacctgggtgccgcgcatgcgctctttcagaattacgacgctagccaccatcatccccaccggcgacagctggccgatgacctgagaagccgtggggctgaggtattgcagggaagaactaaacaggatgaagttaccgaacagaccgccggtggcaatcgctaataacaccagccagcgcggcttgcgaaaaattcgcatcggcggcagtttgcctttgatcgcgaggatcgcgccaagcccaatgctggccatcaggaagcgataaaagaccaccgtaggcggcgccatcacctcgagaacctgtttcattgcaatcggcaacgctccccaacacatcgcggtggtaagcgccagaataatgccaatcccagcctgctgcttcatgcctgtttccctgcaaaaattttccggtagacgaatgtaaaaagccccgcaacgtgttgcggggctttcatccgttaccgggacgcgaaaaacttattcagcaacgatgctgatgaatttacggtttttcgggcctttaacttcgaacttgactttaccgtcagtcaaagcgaacagagtgtggtcacggccgcaaccaacgttggtaccagcgtggaatttagtaccacgttgacgaacgatgatgctacctgccagaactgcttcaccgccgaaacgttttacgcccagacgtttagcttctgaatcgcgaccgttacgagtcgagccgccagcctttttatgtgccatttaaatctactcctcaggtcttaggcgctgatgccagtgattttcacatcagtgaaccactgacgatggccctgctgcttacgatagtgtttacgacgacgaaacttaacgattttaactttctcgccacgaccgtgagcaacaacttcagctttgattacgccgccctcaacgaaaggaacgccgatcttgatttcttcaccgtttgcgatcatcagcacttcagcgaattcaacagcttcgccagttgcgatgtccagcttttccaggcgaacggtctgaccttcgcttactcggtgttgtttaccaccactttggaaaaccgcgtacatataaaactccgcttccgcgcacctctttatgtgattcagagtgcgctataaatattcacaatagggcgcgaatattacgcaaaacgcgagcctttgacaagagcgattagcgatcaatgcagaaaaaaaacacaactttcacgacaacgtttatctacggcaatttttcagtacaatcatatcttcttttaattctgtcttaatccttctgtgatcccacctggattcatggtaacaggacatttggcccggcttttgcgatgaatttagaaaaaatcaatgagttaaccgcgcaagatatggcgggtgtcaatgcgacgattcttgagcaactcaactccgatgttcagcttatcaatcagttaggctattacatcgtcagcggcggcggcaaacgcattcgcccgatgattgctgtgctcgccgcacgcgcggtgggctatcaggggagcgcgcatgtcaccattgccgcgctgattgaatttattcataccgccaccctgctgcatgacgacgtcgtcgatgagtctgatatgcgtcgcggcaaagccacggccaatgcggcgtttggcaatgccgccagcgtgctggtcggcgattttatctatacccgcgcctttcagatgatgacccagctgggctcgctgaagatccttgaggtcatgtcggaagcggtgaacgtcattgccgaaggcgaagtgctgcagctgatgaacgtcaatgacccggatatcaccgaagagaactacatgcgcgttatctacagcaagacggcgcgtctgtttgaagctgcctcgcagtgtgcgggactgctggccgactgcactgcggaagaagagcgcgcgttgcaggattatggccgctatctcggcaccgctttccagctaatcgacgatttactcgattatagctctgacggcgagcggctcggtaaaaacgtcggtgacgacctgaacgaaggtaaacccacgctaccgctgctgcacgccatgcaccatggcacacccgatcaatcagcgatgatccgcggtgcgatcgagcaaggcaacggccgccatctactggatgctgtgctggaaacgatggcgacctgcggttcgctggaatggacgcagaagcgtgccgaagaagaagctgacaaagccattgccgcgctgcagatcctcccggacacgccctggcgcgaagccttgattgggctggcgcatattgcagtccagcgcgatcattaatcccccctcctttcccgcgcgacgcgcgggaaagttccagtaaaatgccatttctctccctaaaattccgaatatcttgatagattctgaatattccggcgctttaacagaacttgttagaaccctacatagtacgcgggtatagtgtctctatcgcccatgtgggacgatctggacctttaacaccaggagaatttatggataagttcatcgactggcatcccgcagatattgttgcgggattacgtaaacggggaacatcgctggcggcagagtcgcgacggcacggactaagttcttcaacgctggcgaacgccctgacccgcccctggccgaaaggcgaattgattatcgccacagcgctggaaacgcagccgtgggtcatctggccgtcacgctaccacgacccggtgactcatgagtttatcgacagaacgcagatgatgcgtcagaagaagatcgacaagtgatgtgattgctcgacagcgccccggaacaacgtcccggggcgctgtcaggacgcggttactcgcccttcacgcgttgaatattggcgcccagggcctgcagtttatcttcgatacgctcatagccgcgatcgatatgatagatgcgatcgacgatggtggtcccttcagcgatacagccggccagcaccaggctcgccgacgcgcgcaaatcggtcgccatcacctgcgcgccagaaagctgcttcacgccgtgacagatagcggtattgctctcgatctccgcgtgcgcgcccatacggatcagctccggaatgtgcatgaagcggttttcaaagatcgtttcggtgatcacgccggtcccttccgctaccaggttaagcagcgtgaactgggcctgcatatcggtcgggaagcccgggtgcggcgcggtacgcacgttgaccgctttcggacggttgccgtgcatatcgaggctgatccagtcttcgcccgtttcgatgtcagccccggcgtcgcgcagcttcgccagtacggcatccagggtatccggctgcgcgttacggcagaggatcttgccgccggaaatcgccgcggccaccaggaaagtcccggtttcaatacggtcaggcagcacacggtagacgccgccgcccaggcgctgcacgccttcgatggtaatgcgatcgctaccctggcctgtgatttttgcgcccagcgcgttcaggaagttggcggtatcgacaatctccggctcgcgagcggcgttttcaataatcgtcgttccctccgcaagcgtcgctgcgctcatgatggttacggtggcgccgacgctcaccttatccatcacaatatgcgcgcctttcaggcgaccgctgaccgaggctttgacataaccttcttccagtttgatctcggcgcctagctgctccagaccgctaatatgcagatcgaccggacgcgcgccgatagcgcagccgccaggcagagaaacttgcccctgaccgaaacgcgccaccaacgggcccagcgcccagatagaggcgcgcatggttttcaccagatcgtacggagcacagaatacatcgaccgggccggcgtcaatccataccgaaccattgcgctcgaccttcgcgcccagctggctcagcagcttcatggtggtatcgatgtctttcagcttaggtacgttttggatctctaccggctcttcggcaagcagcgcggaaaagaggattggcagggcggcgttttttgccccggagatggtgacttcaccctgaaggcgagtcggcccctgaacacggaatttatccattgattctgttctctattaaaaattcacatacgctgcaggggatcccccacagcttagaagccattgagtttgcggtctcgcgcccactcctgcggagtaaaggccttgatcgacagcgcatggatgcggttgtcggcaatatattccatcagcggcgcgtaaacgctctgctgctttttcacccgactcatgccatcgaacatctcacccacagcaataacctgaaagtggctgccatcgccagagacgtggacttcctggagggggagtgcgttcatcagcacggtctgaatttcatgattttccatgggctcaaatttatctgatagtgaaaacagcccaacatcttagaggaaagtggcgcggtcttaaacaagcaaaaagccccggcgaaaagattgccagggctttcggaatagcttcagtgctaaggcactgaaaagattatcagatcagatcggcaggcaggttgtaaagaccgatcagcgtttgcaggttttcgctcttgccgaccagctgcgcttcccggccctgacggcgaatcagcgccataaaatgcactaacagcgccaggcccgcggtgtccacgcgcgtggtctgactgagatcgatgatcgccgttcccgccgtcgcctgggcgcgcgcctcccagagcgggaccagcagatcctgatccagctccccgtgcagcgccagcgtctcgccctcgcgagtccagctcagctgcccgctcattattttttctgttccagggtgatcggctgcgcagagatcgctttcagctgcgcggtcaggccatcaacgcccttggtgcgcagcagatcgctccactcattctgtttggtggtgatcatgctcaccccttccgcgatcatatcgtaggcctgccagttgccggtctgggtatttttacgccactggaagtcaagacgtaccggcggacgaccgttcgggtcgatgatagtgacgcggatcggaacgatggttgcgctgcccagcggctgctccggagcaatctggtaagtctgcccatggtacatcgccagcgcctgaccgtaggcctgcttcaggtattcacggaaggcggcaaaataggcctcacgctgcgcaggggtcgcttctttgtaatagcggcccagcaccagcgcgccggcatatttcacctgtacatacggcaataactcctggtcgacgatgtcgcgcagatagttaggattagctttaatcttcggctgttcattcttcaggcgatcgaaggttttctgcgccgcttcattcatcagcttatacggattggactgatctgcggcctggacggcggtcagcggggcaatcaccagcatggcgaccatgagtaagcgtttaaacatatcgtatttctcctgaaattaatgcgtcgtgccggctgccggcgtcgcgtcagtatgaccttctgcctcggccttatcattgccagaattctgattgtcgccgcccttactgttataaaggaactgaccaatcagatcttccagcaccatggcggacttggtgtcctggatagtgccgccgtctttaaggatagtcgtcccgaggtccgggtcttcaaaaccgacgttcagcgccaggtactgctcgcccagcaggccagaggtgcggatcgccaacgaactggtatccgggatatggttgtagcgctcatcgatatcgagctccacgcgtggcagataggttttcggatcgagcgtaatgtccgctacccgccccactaccacgccgccgatgcgcaccggcgagcgcgccttcaggccgccgatgttatcgaaagtcgcataaaggcgataagtcggctcggtgcgtagcgaggtgacgttcgccgccttcaggcagacaaacagcgccgccagcagcgccaccagtaagaacacccctacccagatttcagtttttttcgtttgcatgaactcaattcccaaacatcagcgcagtcagcacaaaatccagccccagaaccgccagcgacgcatgcaccacggtacgcgttgtcgcccggctaatcccggcggaagtggggatagcgtcataaccattaaataacgcaatccaggttaccgtaatagcgaacaccagactcttaatcaggcagttcaccagatccattcgccagtcgacggcattttgcatcgcggtccagaaaaaaccaccgtcaatgcctttccagctcacacccaccagcgcaccgccccagatccctaccgcgacgaagataatcgtcagcagcggcagcgaaatgacaccggcccagaagcgtggggaaatgacgcgacgcagcggatccaccgccatcatctccatactggagagctgttccgtggcccgcatcaggccaatctcggcggtcagcgccgacccggcgcggccggcaaacagcagcgcggcgaccaccggccccagctcacgcagcagcgacagcgccaccagcatgccaagactggtctctgcgctgtaggtggttaacaccagatacccctgcagcccgagcaccataccgataaacaagcccgatacaatgataatcagcatcgacaggacgccgacgttatagagttgacgaaccagcagcggcgcgtgcttgcgaaactctggtttgccgacaacggcgttgaaaagcattaatccggcgcgtccaaacgtcgcggtggttttaataccgcgatgacctagcgcggccagcgcattaaacagcatgagtcgctcaactccctatgcctaataaatcatggtgatagtcgccagcaggataacggaacggcaccggaccgtcggcaataccatcaatgaactgacgaacccgaggatcggtattctcccgtagcgactgggcgctaccgtgggcgacaatctttttatccgccacgatatacgcgtagtccgcaatactaagcacctcgggcacatcgtgcgaaaccacgatgcaagtgacacccagcgtgctgttgagttcagaaatcagcttcaccagcacgcccatagtgatgggatcctgcccgacgaacggttcgtcgaacataatcagatccggctccagggcaatggctctcgccagggcggcgcggcgcgccatcccaccggaaagctcagaaggcattaacttcgccgcaccgcgtagccccaccgcttccagcttcatcatcaccgtcgtatgcagcagcgcaggcggcaaatgcgtatgttcgcgcagcggataggcaacgttgtcaaagacattgagatcggtgaacagcgcgccggactggaacagcatgctcatccgcttacgcaccgtataaagacgcgaacgcgtcatctgcggcacgttctcgccatcaaacaggatctctcccctgtccggcgggatctggccgccgatcaggcgtaacagggtagtcttgccgatccccgaaggtcccatgatcgcagtaattttaccgcgcggcaccgacagcgagatgtcgtcgaagatcacacgatcgccgcgtgaaaagcggataccgcgcacttcaactaaattcgcctgagtttggctcataaaatcatccttactaaacacctgacgggcaagcatggccctttcttgcgccacaatcacaacatttttacagaatcttacctgcacaggttagcgaaagctggcatttgttttacttttggcacacataaagtcaaaattaagaattcgttacgctgcgtagggataacccagcgaggcgacgattatacctgaagaaaggactttagatgctcttagcgacggctctgttaattattggtttattgctggttgtctacagcgccgatcgtctggtctatgccgcctccatcctgtgtcgtatgttggggatcccgccgctgatcatcggcatgacagtggtcagtatcggcaccagcctgcctgagatcatggtcgccaccgcggcctcgctgcacgggcagaccgatctggcggtcggcaccgcgctcggatctaatatcaccaatatcttattgatcctcggtctcgccgccttactcaggccatttaccgtgcattctgatattctgcgccgcgaattaccgctaatgttgctggtcagcgtgctggcgggactggtgctctacgatggacaactgacccgtctcgacgggctatttttactggcgttagcgcttctgtggctgctgttcaccatcaaaatcgctcgcctggcggagcgccagggaagcgatagcctgacccgcgaacagctggcggagctgccacgcgaagggtcgctgccggtcgccctgctctggttaggggtagcgatgatcgtcatgccgatggcgacccgcatggtggtggataacagtacagtgctggcaaactatttcgccatcagcgaactgaccgtcggcctaacggtggtggcgataggcaccagcctgccggagctggccaccgccatcgccggggcgcggaaaggggaagatgatattgccatcggcaatatcatcggcgccaatatccttaatatcgcactggtgctgggtttaccggcgctgatcgcgccggggagctttgcgaccgaagccttcactcgcgattatggcgtgatgctgctggtcagcctgatcttcgcagtgctgtgctggcgccgtcagcagcagccgggacgactggttggcgcgctgctggtcggcggctttgtggtttggttggcgatgctgttttggacagcaccgctcttcgttgaatgattcgggataacatcatgtcgcaaatagatttgcccacggattttgactttcaacaggcaggccgtcaggtgctggaaattgaacgtgaaggtctggcccagctcgatcaatacataaatgaagactttacccatgcctgcgaaacgattttccgctgcggcgggaaagtcgtggtgatggggatgggcaaatccggccacatcggccgcaaaatggcggcaaccttcgccagtaccggcacctcggcattttttgtccaccccggcgaagcggcgcacggtgatttaggtatggtcacccctcaggatgtggtaattgcgttgtcgaactccggcgaatcgaatgaaatcctcgcgctgatcccggtcctcaagcgccagcaggtgaagcttatctgtatcaccagccggccggagagcagcatggcgcgcgcggcggatatccatctgtgcgtgaaagtgccgaaggaggcctgcccgttaggactggcgcccacgtcgagcaccaccgccgcgctggtgatgggtgatgccctcgccgtcgccctgctggaagcccgcggctttaccgctgaggatttcgccctgtcgcatccgggcggcgcactcggccgtaagctgttgctgcgggtcaatgatattatgcataccggtgatgaaatcccgcacgtcggcctgcaggcgaccctgcgcgatgcgctgctggaaatcacgcgtaaaaatttaggcatgaccgctatctgcgatgacgatatgaacatcatcggtatttttaccgacggtgacctgcgccgggtcttcgataccggcgttgatatgcgcgatgccagcattgccgacgtcatgacccggggaggtatccgcatccgccccggcactctggcggtggatgcgctaaacctgatgcaatcccgtcatatcacctgcgtgctggttgccgatggcgaccatctgctgggtgtggtacatatgcacgatctgctgcgcgcgggcgtagtgtaagtaaggaaaaaataatgaataatgctgatgctcagttagcgacctgctacgggccggtaagccaggcgtttgtcgatcgcgcggcgaagatccgtctactgatccttgatgtcgacggtgtattatccgacgggcttatctatatgggtaatcacggcgaggagctgaaagcgtttaacgtccgtgatggctatggtatccgctgcgcgctgacctcgggtattgaagtggcgattattaccgggcgaaaagctaaactggtagaagatcgctgtcagacgctgggcatcacgcatttgtaccaggggcagtcggacaagctgctggcgttccgcgatctgacggacaaactgcacgtgcggccggaagaagtcgcctacatcggcgacgatcttattgactggccggtgatggccgaagtgggccttagcgtcgccgtcgccgatgcgcatccgctgctgctaccgcgggcgaattatgtcacgcggattaacggcggacgcggcgcggtacgcgaagtctgcgatttgttactattggcgcagggcaagttggatgaggccaaagggcaatcaatatgagtaaaaccagacgttgggttatcattttactgtcgctgctcgcgctgatccttatcggcctgaatctggcgaatacggacgacacggcccagccggaggtcaatcctaacgaccctacgtataaaagcgaacataccgacaccgtggtatacagtccggaaggcgccctgagctatcggctgattgccgagcacgtggaatatttttccgatcaggaggtctcctggtttaccaaaccggtgatgaccacctttgatactaacaaggtgcctacctggtcggtcagagcagacaaagcgaagctgacgaatgaccggatgctctatctttacgggcacgttgaggtgaatgcgctcgcgccagattctcaactgcgcaaaattacgacggataacgcccagataaatctggtaacgcaggacgttacctccgatgacatggtgacgttatacggcaccacatttaattccagcggcctgaaaatgcgtggaaaccttcgcagcaaaaatgccgagctgattgaaaaggtgagaacctcttatgaaattcagaacaaacaaactcagccttaagattgcgctcgccggcgcgttactggccgccagcctgccggccctcgccaagacgggcgataccgatcagccgatccatatcgaatccgatcagcagtcgctggacatgcagggcaatgtcgtcaccttcaccggtaacgtggtcgtgacccaggggacgatcaagattaacgctgataaagtggtggtcacccgtccaggcaacgagaaaggcaaagaggtgatcgaaggtttcggtaacccggctactttctatcagatgcaggataacggcaagccggtaaaaggccgggcgtcgaaaatgcgctacgagctgcagaacgattacgtcgtgctgacgggcaacgcttatctggaacagctcgacagcaacatcaagggcgacaagatcacctatctggtgaaagagcaaaaaatgcaggccttcagcgataaaggtcgacgcgtcaccaccgttctggtgccgtccgagctgcaggataaaagcggcaaccagcaaaagaagagtaactaatccgttatggcaaccttaactgcgaagaatctcgctaaagcgtataaaggccgccgcgtggtggaagatgtcagtctcaccgttaactcgggcgagattgtcggcttgctcggcccgaacggcgccggtaaaacgaccaccttctacatggtggtcgggattgtgccccgcgacgcaggcaatatcatcatcgatgacgaagacatcagcctgctgccgctgcacgcgcgcgcgcgacggggcatcggctacctgccgcaggaagcgtcgattttccgtcgcctcagcgtctatgacaacctgatggcggtcctgcagatccgtgacgatctaaccagcgaacaacgggaagatcgcgctaaagagctgatggaagagtttcatattgagcacctgcgcgacagcctcggtcaggcgctctccggtggtgaacgccgccgcgtcgaaatcgcccgcgcgctggcggcgaatccgaaatttattcttctggatgaaccctttgccggcgtggatccgatctccgttatcgatattaaacgcatcattgagcacctgcgcgacagcggtctcggcgttctgattaccgaccataacgtccgtgagaccctcgcggtctgcgaacgcgcgtatattgtcagtcagggacaccttatcgctcatggtacaccgcagcagatcctcgaagatgagcaggttaagcgcgtgtatcttggggaagacttcagactctgatagggtagaggttacagacgttttagccggagatatttaccctgaacatgaagcaaggtttgcaattaaggcttagccaacagcttgccatgacgccgcagctgcagcaggcgattcgtttgctgcagttgtccacgttagaactccagcaagagctccagcaagcgctggaaagtaacccgttgcttgagcaaaccgatcttcacgacgaggtagaggcaaaagaggtggaggaccgcgagtccctcgataccgtcgatgcgcttgagcaaaaagagatgcccgacgaactgcctctcgatgccagctgggatgaaatctataccgctggcacgccgtcgggtaacggcgtcgactatcaggacgacgagcttcccgtctatcaaggcgagaccacccagactctgcaggactatctgatgtggcaggttgagctgacgcctttcaccgacaccgaccgcgctattgccacctctatcgtcgacgccgtcgacgatacgggctacctcacgattcagattgaagatattgtcgacagcatcggcgatgacgagatcggcctggaggaggtggaagcggtcctcaagcgaatccagcgttttgatccggttggcgtcgcagcgaaagatctgcgcgactgcctgctgatccagctgtcgcaatttgctaaagagacgccgtggctggaagaggcgcggctgattatcagcgaccatcttgatctgctggccaaccatgatttccgcactctaatgcgagtcacccgcctgaaagaagaggtgcttaaagaggcggtcaacctgatccagtccctggatcctcgccctggccagtccattcagaccagcgaaccggaatatgtcatcccggatgtgctggtgcgcaaggtgagcggccgctggaccgtcgagctcaacgccgacagcattccacggttgaaaataaatcagcagtatgcggcaatgggcaacagcgcccgcaatgacgccgacggccagttcattcgcagcaatctgcaggaagcccgctggctgattaaaagtctggaaagccgcaacgataccctgctgcgcgtcagccgctgcatcgtagagcagcagcaggcttttttcgaacagggtgaagagtatatgaagccgatggtgctggccgatatcgcccaggccgtcgagatgcatgaatcgacgatttcccgtgtcaccacgcaaaaatatctgcacagtccgcgcggtatttttgaactgaagtatttcttctccagccatgtgaataccgaaggcggaggcgaagcctcgtcgacggcgattcgcgcgctggtgaagaagctcatcgccgcggaaaaccccgcgaagccgttgagcgacagtaagctcacctccatgctgtccgagcagggtattatggtggcgcgccgcactgtcgcgaagtacagagagtctttatccatcccgccgtcaaaccagcgtaaacaactggtctgacataaccgataaggaagacactatgcagctcaacattacaggacacaacgtcgaaattacgcctgcgatgcgcgaattcgttacggcgaagttcagcaagctggagcaatttttcgaccggatcaatcaggtctatattgtgttaaaagtagagaaagtgacgcaaattgcggacgcgaatctgcatgtcaacggtggcgaaatccatgccagtgcggaagggcaggatatgtatgcggctgtcgatggtcttatcgacaagctggcaagacagttaacgaagcacaaagataaactaaaacaacactaattgtccgggcccccttgcgcccgccgctggatatcatcggcgacgggcgcgggggcgctcaggtgaaattatgatgaacaacgattcggctctacaactgagcaacgtcctgaaccaggaatgtacccgtagccaggtgcactgccagagcaagaagcgtgctctggaaatcatcagcgaactggccgccaaacagttaagtttgccgccgcaggtggtgttcgaagcgatcctcacccgcgaaaaaatgggcagtaccgggatcggcaatggtatcgccattccccacggaaaactggaagaggatacgctgcgtgctgtcggcgtttttgtccagctggaaacccccatcgccttcgacgcgatcgacaatcaacctgtcgacctgctgttcgcgctgctggtgccggccgaccagacaaaaactcacctgcatacgctctccctggtggccaaacggctggcggacaaagcgatttgtcgtcgcctgcgagcggcgcagagcgatgaagagttgtatgagatcatcaccgaagcaggaagcagcgatgacgcataacggcagtcgcaccttatcctttatcgtactgaggagaaacggtacatggtactgatgatcgtcagcggccgctcgggctcggggaaatccgtcgctctgcgagcgctggaagatatgggcttttactgcgtggataacctgccggtcgtgctgctgcccgacctggcgcggtcgctggctgaccgcaatatctccgcggccgtcagcatcgacgtgcgtaacatgccggaatccccggagatcttcgagcaggcgatgcagaatctgccggaatgtttttctccgcagctgctgttccttgatgccgaccgcaataccctgatccgccggtacagcgatacccgtcgcctgcacccgctctccagcaagaatctgtcgctggaaagcgccatcgacgaagagagcgatctgctggagcccctgcgctcccgcgccgatctgatcgtcgatacgtcggaaatgtcggtgcatgagctggcggaaatgctgcgtacccgactgctgggtaaacgcgagcgtgaactgacgatggtcttcgaatccttcggcttcaagcacggtattccgatcgatgccgattacgtctttgacgtgcgctttctgcccaacccgcactgggatccgaaactgcgtccaatgaccggtctggataaaccagtggccgccttcctcgatcggcacactgaagtgcacaactttatttatcagacccgaagctatcttgagctatggttaccgatgctggagaccaacaatcgcagctatctgacggtggccattggctgtaccggcggtaaacatcgttcggtttatattgctgaacaactggctgactacttccgctcgcgcggcaagaacgtgcagtctcgtcatcggacgctggaaaaacgtaaatcatgaccgtaaagcagaccgttgaaatcaccaataagctgggcatgcacgcccgcccggcgatgaagctgttcgaactgatgcagaatttcgatgccgaagtactgctgcgcaacgatgaaggcacggaggcggaagccaacagcgtgattgccctgctgatgctggactcggcgaaagggcgacagatagaggtggaggccagcggtccgcaggaagttgaagccctcgccgcggtgattgccctgtttaacgctggctttgacgaagactaaacgtgacgcttcccggcgagggacgactggcgactgtaccagccccggcgccggagtaacccgctaatagagcttatgctcgcgcatgaacccttccccgcccagctgtcgcatctggcgtaagatccaggcctgacgactgcgcacatagcctgacggcgcatcggcgcgatagcggatcgggttcggcagcaccgcggccagcagagccgcttcccccggcgtcagctgactggcgggtttatgaaaatagcgctgggcggccgcttccacaccaaatatcccatcgccgaactcggcaatattcaggtagacggtcaggatccgctttttactccacacggtttcgatcccgactgtcagcccggcttccagccccttacgcagccagctgcggccatcccataaaaacaggtttttcgccgtctgctgcgacagcgttgacgcgccgcggatgcgggtctcgtgacgttcattgtgcgccagcgctttctcaatcgccgacacgtcgaacccccagtgtttcgggaacttctgatcttcggcggcaatcaccgccagccccatccatggagagatcttatccatggcaacccagtcggaatgcgccagataatggaaatcgccggacagccaggcgctcacctgccgctcaagcatcaccgccgaaaacggcaccggcagcacgctaaacagcgcgatccccccgccccagaaaacggcggcgatcagcagcagacgcaatgccagacgttttaatagcgcaaggggcgcaacgcggagcctcatgcgctcagcgccagcacgcgggccaccagcttctcaattccggtggcggcttgcgcaatgtcctccgccagcatatacgccggagtggtgaccactttgttgtcttcatccaccacgatgtcgtcgaccgggcaaggcacgtgctctgcccccatctcttccaccacatcggcggtatcaagatcggtcccaatggtcatccgcagcggaaacgcaaagatcttcggcagcatcgccggggcaatgcacataaagcccagcggcttgccggtctgatgcatcgccagcgccagggcccgcagatcgggatccacctggcattcgctgccctcggcggcgaagctgcttagatttttcgccgcgccgaagccgccagggacgatcagcgcgtccagcgtctccgcacgcgcctgcgccagcggcaggatgtcgccgcgggcgatacgcgctgcttccaccagcacattgcgctgctctggcatcgcctccccggttagatggttgatgacatcgcgctgcggtttatcgggcgcaaagcacactgcctgcgcgccgttgcgcgcgatcgccagcagggtaatcaccgcctcatggatttcactgccgtcgtacacgccgcagccgcccagtaccacaccaatttttttcatcgctttcgctcctccatgcaactcgctgaaaccagtcaaaaatgtcgattaactcgctatgcttcacatattttactgattcatgtaacaaattagttaagctttgctatcttaatgagcgagcaatccacttcttcggttgcgccacgtaacaacatcactcaaacaacactggctcaaccaccagttccctggtgttggcgcagtattcgcgcaccccggtctgtccggggtcattttttgctggctttcgccacccacgccttcagtaccgctacatcgttttgccactcggatttcatctcttcaacccattcagcgacattatcagaccaggcaggcagatccggagtctggatctgctggcccagctgctggatgtggcgcagtccgatagaaccggccgcccctttgatcttatgcccctcttcgacaatccctttttggtcgcgggcggtcagattagactccagaacggacatgtagcccggcatcatcttctcaaacaccgcgagaccatcgttgataagcttcggtcccaccagctcgatatattgctccagcatatcggtatccagcaccgcgtcggctttatgcagatcggccgccggcgcttcctgcgcttcctcatccggtgcatcccagaatttcttgatcatggccgtcagcgctggcaccgatagcggcttactcaacacatcgtccattccggcgtcgagatactctttcttattcttcagcacgttggcggtcagggcgaccagcggcggtagctcgtcagcggcaaagcgctgtttcagttcccgggaaatatccagtccggtcatgtccggtaactgaatatccaacagcacaaggtcatattcgcctggctcaaacatctccagcgcggctttcccggtcatcgccacatcaacgctgttacccagtttttccagcactgaacgggccacaataacgttgagctcaatgtcctcaaccagcagcacgttgagcgccggtaatggcatgtcgtcttccgccagcgtatcttccacttcttccgcaatggctggcgcatggacggtaagcgtaaaggtcgcccctttacccggctggctggtaacgctgatatcaccgcccatattacgcgccaggcgacgcgagacggcgagaccaatcccggttccggtggccggtttgccgccgtggctgtctttgacctggtaatacatggcgaaaattttgtcctgttccgcttcaggaataccaattccggagtcttccacttcgaagtgcaggatatcgccttcgtcatagcgcacgcggacgttcacccctccgccctgcggggtaaacttcacggcgttgctgataagattccacaggatctgccgcaggcgggtcccatccgtgattaccttatgcggcagcggcaggctcggctccagcacaaagcgcagccccttctgctgtgcctgcaggccggataggttttcaaggtcggcaaggaagctggtgaagtccaccggctggttatcgagctgcaccttgcggcgctccattttgtccatgtcgataatatcattgaagatattccccagcgtcaccgccgagacatggatagttttcaggtatttttcctgctcgctggtcagttcggtatccagcaaaattcggctcagcccgacgatcccgtttagcggggtacgcagctcatgactgatggtggaaataaaggtggttttatcccggctggcgcgctcaagagcgtcctgatagcgtttacgttcggtgatatcgcggccgaaacccatcaggccgcgacgcttaccgacgcgatcgtagtaggggaccttgcggatttcaaagcacgctttgcggccatcgggatagtccagccactgctcataggtcagcgatacattatggcggaacaccttctcgtcggtctccagtaccttttccgccgcctcttcgctatagacgtcctgcggtttgaggtggatcagctgtttttcgcttttgccggtcagcagctccatcgcccggttacagcctgaaaactccttatcctcattgcgatagaagaccaggtccggggaagcatcaaggaaagagcgcagaaaggaggattgctgttcgagctggatctgcgtctcttcgcgctctttcatctcaatcttcaactgctcgagggtggtctcgcgctcggcttccgctttttcacgttcgccaatctcctgattcaactgcgcgatgttatctttcagttggacgttcagctttagatcgcgctcacgcatctcctccagcttgtccaccagccgcgaaagacgctgacgggactcttcgagctgctccaccaccaccgagagaaagtagaccgcccaaggcgtgatcagcaggccaaagaagatagagcggataacgtcgatactttcaacctggccatgcagcaccatggtaaccgccatctgtaccacgatggccagcaccaccagcgcaagagccaacagcatcgaaaagcggaccagacccagcttcatcatcaggtcgacataatactgcgccagcatacgaatttgcttcataggggattccttcacgacaactccgcacaataatactcaattctgagcaatgcgctgtaagttgtgcaaaaaatgcgggcaggagtcgatacggcggccggccgctgaggcgaaccagccgcaaaagagggggatcaggagagggattaacgcttgcttaacgcctcccagagtcctttcaggtaggtcacgccgagggcgcggtcgaacaagccatagcccggccgtccggtctctccccagataaagcgaccatgatccgggcgaatatagccgtcgaatccgttgtcatacagcgcttgcatcactttgtacatatccagggagccgtactctgacggatgggcgcactcgtaaaagtctttatcctgcatcagctttatattgcggacgtgggcaaaatgaattcgcttacgccgcgtaaattcggccaggatggcgtacacgtcattatcaggatcttcggcaatcgagccggtgcagagcgtaatgccgttggcgggtgaatcgacagcccggcagatccagtccagatcgtcgcggtttttgaccacccgcggcaggccaaaaatggagtacggcgggtcgtccgggtggatcgccattttcaccccaacctcttcgcaaaccgggatcaccgcctgcagaaaataaaccaggttctcccgcagcttctgatcatccaccgcgctatatttggcaaacagggtctgcacctccgccagccgttccggctcccagcccggcaaggcgaagccgtttgaattctcaagcacctccttcaccacgtcctccagccgcttatcgatatctttcttctcaaacgccatcgtcagcgagccatccggcaggacgtagttcatatccgtcttcatccagtcgaaaaccggcatgaagttatagcagatgactttaacgccaaagcgggcaaggttgcggatggtctgctggtagttggcaatatagcggtcacgggtaggtaggccgattttgatgtcgtcatggatgttgacgctctctatcacctccattttcaggcctgcggcatgggcctgaccgaccagacgctcaattttatccaccggccatacttcgcccaccgcgacgtcgtagagcgcgccgaccaccccctcaacgccaggcacctggcgaatatgttctaatgaaaccttgtcttcctctggtccaaaccagcgcattgtcatctgcattgtcttcacctgctcaacttagtttaatttaccctactaccataccagtaatcatagatgattgagcgttggctgtcgtgatagcgatcacattcctgccgaccggctcgccagcggcgaatgcgtcggcgcattcataatttttttcaatttatttcaatagattaatcatgctatggctttttctgccgagctttctcaaatgtgatccaggcctgattatgatcttttgcatacttgtatggtaataaaagtagcgtaatttgttcagaaaaaagacaatggaaggaatcaaaatgagaagcgtcgtcgtcaaagagccaggccaactgaacattgaatcacgttcggttccagttccgggcgcccatgaagtacgggtgaaaattgcttttgctgggatctgtggttccgatgtacacatctatcacggccacaaccctttcgcgaaatatccccgcgtcatcggccatgaattctatggcatcatcgacgccgtcggcgagcaggtatctccggcacgcatcggcgagcgtgtcgcggtggaccccgttgtcagctgcggccattgttatccttgctcggtaggaaggccgaatgtctgtacgcagctccaggtcataggagttcaccgcgacgggggatttagcgactatgcctgcgtgccggcgaaaaatgcctggcgcatccccgaggctatcagcgaccgtcaggcaacgatggttgagccttttaccatcgcggcaaatattaccgcccagctgcagcccacggcgcaagatattgccctggtttacggcgctggcccgatggggctgacaatcattcaggcgctaaagggggtatatggcgttaagcaggtgatcgtcgtggatcgcattgccgaacgtctgcagatggcccgggaaaacggcgccgatctgacgctcgataacactgaccagccgctcacggaacagctggcgcagcggcagcttgcccccacgctggtcattgatgccgcctgccacccggcgatcctgcaggaagccattctcctcgcctcccccgccgcccgcatcggtatactcggtttctccggcgaggcctcaaccctcactcagcaaagcatcaccagtaaagaaatttctattttctcctcccggctgaacagcgggcgttttccgctggtcatcgactggatggagaaaggccttattcgtccggaggcgttaatcacccattgtatgccgctggagcaggtgaaagaggccatggagatttttgctaacgaccgtaagacctgctgcaaagtgctgctgcagttgggttaaaccggcatcgtatagaataacggccgacggatatctgcgtatccgccgcgcctgatataaataatataatgagcatggtgttatcatgggaaaaaatatccgctggattatcgtcctgttattatttttagtatatatgataaattatcttgaccgggtggcattatccattacggtcccgatgattgaaaaggaccttgcacttaacgctgaacaattcggcattattttcggcagctttttcttcggctacgcggtatttaattttattggcggtttggccgtggataagtttggcgcaacgctggtaatgggcctggcggtcggtctgtggtcgctgttttgcggcttaaccgcggtagccaccggcttttattccatgctggtgctgcgggtgcttttcgggatggcggaaggcccgatctgcgcatcggcgaacaagatgatcaacggctggtttcctaaaaagcaagcggctaccgccgtcggctttctcagcgcaggctctccgctgggcggcgcggtcgccggccccatcgtcggttacctggccctggcattcggctggcgcccggcttttatgattattttcgctatcggtattgtatggatgatagcgtggtttttcattgccgctaattcgcccgaaaagcataaaaaagtcagccaggaagaacttaagctgattaataaaatgaaagaagaagaagtcgcgctggaaacaatagaaaatcaaacagctcactcgctgggttattatttgaaacagccaattattctggtaacggcctttgccttcttctgctacaactatattctgtttttctttctcagctggttcccgtcctatctggtacaacagcaccatctggatattaaacagatgagccttaccactatgatcccatggatagtcggctttgtcggtctggcgcttgggggctatatttccgataaaatttttaaactcaccgggcgcctgctgctgtcgcgcagaattgtgctggtggtatgcctgctgatggccgctatctgcgtgggactggcgggtaccgtcagcagcgtcgtgcctgccgttctgctgatgtcggtctccatctttttcctctatgtaaccggggcgatctactgggcgattatccaggacgtggtgcataaatcccgcgttggcggcgccagcggctttatccatcttatcggcagcgtctccggcatcgtggggccgattgttaccggctatatcgtgcagtctactggtaaatttgacagcgctttcgtactcgccggcactatcgccgcgcttggcgccctgctggtgctgttcgtgatcaaaactccgcgtgtgacgatgaaagccagccaggcataaatggcaggagcgcgatgtccggcattgttccggacatcacgctcgtacttctcactcagcctggggaacaacccagctacggcccagcgccgagccctgagcgccctgctgattcagataacgatccagttcaaccatgccggtccagcgattttcacaccacagcggcgccaacagcgtgggccgacgggcgctggcggaaatacggtggtagatcacctccggcggcgtatggcggatcatctctccagcggtgacggtatacgcctccagctcaatgccatcgagacgcccggcctgccacgctttggccataatgctgcctttcacaatatgcagtggatgcaatttgatcccatccacgccggtcgccactacctgctccagcgtctgcagacaatgcccctggctctctccgggcagaccgacgatcagatgcgcacagactttcagcccccgctctcgcgccaggcgcgcggtacgctgataacaggcgaaatcgtgtccacggttaatgcgatgcagggtcttatcatgagcagtttgcagccccagctccagccatacctcatacccttgctgatggtattcactcagcaggtcaaggaccgcctgcggaacgcagtccgggcgggtgccgacgcacaggccaacgatatttgcggcactgacggcctgacgatacattgaacggagcacctgcacttcagcgaaggtgctggtgtaggcctgaaaataggccagatagcgcttcgcccggttgacgagctgcgcctgatgagcgagctgttcggcgatagagcgatgctgctgcgcctcatcggcaaacgatgccacgttacagaaagtgcaaccgccgcggcccagcgtgccgtcgcggtttgggcagctaaaaccgccgtgcagcgttagcttatggaccttttcgccatagcgacgcataagatccccaccaaacatattgactaatttctgtaactgcataatctgatagaccgccctcaacaaagggggccaagcctgccacttttcgtcaccgacggcgatgacctggatcaatcgtcagcgcggcgatcaaccctattgcataaacaatcaagattactgcaatttcattcaaccaccaggtgatgagttttccttatattttatcttcgcattgccctaatctgctttctggtaaaaaacggtattaatgtccagtagttaaaaatattgcagtcaaatatgctaataatgaaatgtatttcagcgcatattggtaatgcaaagccgcgtgcacagtgagacagatcacactagccgcaccaccagcaggcgtattcaaagcataaaaattgccattattttctttaataacaattagttaacttgtgtatagcacatttttgtattaataagattgccatttgacgtaagtgtggattcccgataagttgggaatccgctggaagctttctggatgagcactctgctcatcatatttatgcagtaattgagattccctcttaacagcaagtcctcaaacttgtgtaccgatgcgaaaaggatttaaagagggcgaatgcgaggtgtaaaccccgtcgccatgctctttctgtgcctgtgcgcaatcggtatcggagggtgtccgtagagcctggggaggttcactgatatgttgtacgacaaatcccttgagagggataactgtggtttcggcctgatcgcccacatagaaggcgaacctagccacaaggtagtgcgaaccgcaatacacgcactggcccgcatgcagcaccgtggcgcaatccttgccgatggtaaaaccggcgacggttgcggtctgctgctgcaaaaacccgatcgtttcttccgcatcgttgccgaagagcgcggctggcgtttagccaaaaactacgccgttgggatgctgttcctgaataaagatcctgagctggctaaagcggcgcgccgcatcgttgaagaagaacttcagcttgagaccctgtcgattgtcggctggcgcgatgtgccgaccaacgaaggcgtgctcggtgaaatcgccctctcctcgctgccccgtattgagcaaatctttgtcaacgccccggctggctggcgcccgcgcgatatggagcgccgtctgtttattgcgcgtcgtcgcattgaaaaacgcctgcaggaagacaaggatttctacgtttgtagcttgtccaatctggtcaacatctataaaggtctgtgtatgccggcggatttgccgcgcttctacctggacctcgcggacctgcgcctggagtcggctatctgcctgttccaccagcgcttctccaccaacaccgtaccacgctggccgttggcgcagccgttccgctacctggcgcacaacggtgaaattaacaccattaccggcaaccgccagtgggcccgcgcccgtacctataagttccagaccccgctgatccctgacctgcacgacgccgcgccgttcgttaacgaaaccggctccgactccagttctatggacaacatgctggagctgctgctggccggcgggatggacatcgtgcgcgccatgcgtctgctggtgccgccagcctggcagaacaacccggatatggatccggagctgcgttcgttcttcgactttaactccatgcatatggagccgtgggacggcccggcgggcatcgtcatgtcagatggccgctacgcggcctgtaacctcgaccgtaacggtctgcgcccggcgcgctacgtcattaccaaagataagctcatcacctgcgcctccgaagtcggcatctgggattaccagcctgacgaagtggtcgagaaaggccgcgtgggcccgggcgagctgatggttatcgatacccgtgccggacgcattctgcactcagcggaaaccgatgacgatctgaagagccgccatccgtataaagagtggatggagaaaaacgttcgtcgcctggtgccgttcgaagatctgccggacgaagaggttggcagccgccagctggatgacgacacgctcgccagctaccagaaacagtttaactacagcgcggaagagctggactccgtcctgcgcgtgctcggcgaaaatggccaggaagcagtcggttcgatgggcgatgacacgcctttcgccgtgctctccagccagccgcgcattatctacgattacttccgtcagcagttcgcccaggtgactaacccgccgatcgacccgctgcgcgaagcgcacgtcatgtcgctggctaccagcatcggtcgcgaaatgaacgtcttctgcgaagcggaaggccaggcgcatcgtctgagcttcaaatcgccgatcctgctgtactccgattttaaacagctgacgacgatggaagaagagcactatcgcgccgacgtcctcgatatcacgttcaacccggcagaggcctccctcagcgagacggtgaaagcgctgtgcgataaagcggagcaaatggtgcgcgacggcaccgtgctgctggtgctctctgaccgcaacatcgccaaagaccgtctgccggtaccggcgccgatggccgttggcgcgatccagacccgtctggtcgataaaagcctgcgctgcgatgccaacatcatcgttgaaaccgccagcgcccgcgatccgcaccacttcgccgtgctgctcggctttggggcgacggctatctatccatacctcgcctacgaaacgctggcgaagctggtcgacagcaaagccatcgataaaccgtaccgtgcggtgatgctgaactatcgcaacggtatcaataaaggtctgtataagatcatgtccaagatggggatctcgaccatcgcctcctaccgctgctcgaagctgttcgaagcggtcggtctgcatcgcgatgtctccgagctctgcttccagggcgtggtcagccgcatcggcggcgccagcttcgacgacttccagcaggatctgctgaatctgtcgaaacgcgcctggctggcgcgtaagccactggcccagggcggtttgctgaaatatgtgcacggcggcgaatatcatgcctacaacccggacgtggtgcgcaccctgcagcaggccgtgcagagcggcgaatacagcgattatcaacaatacgcgaaactggttaacgaacgtccagcggccacgctgcgcgacctgctggcgctcaacccaggcgaagacgccatcagcatcgacgaagtagagccggcgaaggagctgtttaaacgcttcgataccgcggcgatgtcgatcggcgccctgagcccggaagcgcacgagtcgctggcggaagcgatgaacagcatcggcggcttctccaactccggtgaaggcggtgaagacccggcgcgctacggcactaataaagtgtcgcgcatcaagcaggtcgcgtccggccgcttcggcgtcacgccagcctacctggtcaatgccgacgtcatccagatcaaagtcgcccagggggcgaaaccgggtgaaggtggccagctgccgggtgataaagtcaccccgtacatcgccaaactgcgctattcggtaccgggcgtcacgctgatttccccgccgccgcaccacgatatctattctatcgaggatctggcgcagctgattttcgacctcaagcaggtcaatccgaaagcgatgatttcggtcaaactggtttctgagccgggcgttggcaccatcgccaccggcgtggccaaagcctatgccgacctgatcaccatcgccggctacgacggcggcaccggggcgagcccgctctcttcggtgaaatatgccggctgtccgtgggagctcggcctggtggaaacccagcaggcgctggtcgctaacggtctacgtcataagatccgtctgcaggtggatggcggcctgaaaaccggtctcgatatcatcaaagcggcgatcctcggcgcggagagcttcggtttcggtaccggcccgatggtcgcgctgggctgtaaatacctgcgtatttgccacctgaacaactgcgctaccggcgtggcgacccaggatgacaaactgcgtaagaatcactatcacggtctgccgttcaaagtgaccaactactttgaatttatcgcccgtgagacccgcgagctgatggcccagctgggcgtcaagcgtctggtggatctgattggccgcaccgatctgctcaaagagctggatgggttcaccgccaagcagcagaaactggatctgggtaaactgctggagaccgcagagccgcatccgggcaaagcgctgtactgcaccgagaacaacccaccgttcgataacggcgtgctcaacgcccagctgctgcagcaggcgaaaccgtacgtggatgaaaagcagagcaagacgttctggtttgatatccgtaacaccgaccgctccgtgggggcctcgctgtccgggtatatcgcccagacccatggcgaccagggactggcgggcgacccgatcgtcgctcactttagcggcaccgcgggccagagcttcggcgtgtggaacgccggcggcgtggaactgcatctgactggcgacgccaacgactacgtcgggaaaggcatggcgggcggtctgctggccattcgtccgccggtgggctctgcgttccgcagccatgaagccagtattatcggcaacacctgcctgtacggcgcgaccggtggtcgtctgtacgccgcaggccgcgcgggcgagcgtttcgccgtgcgtaactccggcgccatcaccgtggtggaaggcatcggcgacaacggctgcgaatatatgaccggcggcatcgtctgcgtgctcggaaaaaccggcgtcaactttggcgcagggatgaccggcggctttgcctatgtcctggatgaagatggcgacttccgcaaacgcgtgaacccggagctggtggaagtgctggacgttgattctctggccatccatgaagagcacctgcgcggtttaatcaccgagcacgtacagcttaccggttcgcaacgcggcgaagagatcctcgccaactggccggccttctccgcgaagtttgcgctggttaaaccaaagtccagcgatgttaaagcactgttgggtcaccgtagtcgttccgcagctgagctgcgggtgcaggcgcagtaaggggttaagatgagtcagaacgtttatcaatttatcgacctgcagcgcgttgatccgccaaagaaaccgctgaagatccgtaaaattgagtttgtggaaatttacgagccgttttcagaaggccaggccaaggcgcaggcggatcgctgcctctcctgtggcaacccgtactgcgaatggaagtgcccggtgcataactacatcccgaactggctgaagctggccaacgaggggcgtatttttgaagcggccgagctgtcgcatcaaaccaacactctgccggaagtctgcgggcgcgtctgcccgcaggaccgcctgtgtgaaggctcctgtacgctgaacgatgagttcggcgcggtgaccatcggcaacatcgaacgctatatcaacgataaggcattcgagatgggctggcgtccggatctctccgacgtgaagccgaccggtaaaaccgtcgcgatcatcggcgctggcccggcgggcctcgcctgcgccgacgtgctgacccgtaacggcgtcaaggcggtggtatttgaccgccatccggaaatcggcggcctgctgaccttcggtatcccagcgttcaagctggaaaaagaggtgatgacccgccgccgggagatcttcaccggcatgggcattgagttcaaactcaataccgaagtgggccgcgacgtgcagctcgacgacctgctgaaggagtacgatgcggtgttcctcggcgtcgggacctatcagtcgatgcgcggtggactggacaacgaagacgccccgggtgtttacgacgcgctgccgttccttatcgctaacactaagcagatcatgggctttggtgaaaccgccgatgagccctatgtcagcatggaaggcaaacgcgtggtggtgctcggcggtggcgacaccgcgatggactgcgtacgcacctccgtccgtcagaatgcggcgcacgtgatctgcgcctatcgccgtgacgaagagaacatgcccggctcaaaacgcgaagtgaaaaacgcgcgcgaagaaggcgttgagttccagtttaacgtccagccgctgggcgtggaagtaaatgccaacggtaaggtttgcggcgtgaagatggcgcgcaccgaaatgggccagccggatgcgaagggccgccgccgcgcggagctcgtccccggctctgagcacgtggtgccggctgacgccgtagtcatggcgtttggcttccgtccgcacagcatggagtggctggcgaagcacagcgtcgagctggactcccagggccgtattatcgccccggaaggcagcgaaaacgccttccagaccagcaacccgaaaatcttcgccggtggcgatatcgttcgcggttccgatctggtggtcaccgcgattgccgaaggccgtaaagcggcggacgggatcctcaactaccttgaagtctgattaggtccggagcctcacgcataaaagcccgatggttaacgtcatcgggcttttttattgctcattcgccgggtaaaccgccgctttcagcgccgtattataccagccgcagatatgctccaggcgggtaatcgccgagccgacggtcaccgcccacgcgccgcagcgcatcgcctccgccgcctgggcaggcgtgttatagcgcccttcggcaatcactctgcagcccgccacgctcaggcattgcaccagcgccagatccggctcatccggcgtctcttctgcggtatagccggagagagtcgtcccgacaatctcagcccccaactgccagcactcgagagcatcgtcgagagatgagcaatcggccatcgccacttttcccagccgatgaatttctgctaatagcgccgacactgacgccggacgctgacgctgggtgccgtcaatagcaataatatccgctccgccctgcgccagcgcgtcgatatcttccagccacggcgtaatacgcaccgggctatcaggcaaatcgcgtttgatcaacccaataacgggcaccgtcactaacggacgaacggcctgcaggttggcctggccttcgatgcgcagcgctaccgcccccgcctgctcagccgccagcgccattgccgcgacgatagcgggattatccagcggactgcccggcaccggctggcaggagacaattaatccgccatgatgacggatacgctggtccagttgtgcgagtaaagacatgtctgctccctaaaaactacctgtggcgatgacgataccagccatgggacgcctcgtttgtggcagagttaacaaagcggacagacaaaaaaacaggccccgcagggcctgtcagagaagggattcacttcaccacgcgcagcgccgggcgaccaccgcgcggcggcggcgtgtcgtcaggatcgtcgtcgtgattatccggcttatcgccatcgatcaccgacatcaccgtttcgctttcactctccggcgcgacgtcatcatcgttgaggctgctgacgtcttcgtcataggccgcttccggttcgaacatcgtaccagcgccgttctcacgggcgtagatggcgagtaccgcagccagcgggacagacacgttgcgtggtaccccgccaaagcgcgcgttgaagcgcacttcgtcgttcgccagctcgagattgcctaccgcacgcggggcaatattgagaacgatttgcccatcgcgcgcgtactccatcggcacgagcacgcccggcagcgtcacatccaccaccaggtgcggcgtcagctggttatccagcagccagtcataaaacgcccgtaacagatacgggcgacgcggcgtcagctgtgatacatccattatttagccccgaccgaggcgcatttcacgctcggcttcagttaaagaagcgaggaaggaatcacgctcaaatacgcgagtcatatagcctttgagctctttcgcaccagcgccaaccagctccacaccaagaaccggcagacgccacagcagcggcgccaggtagcagtccaccaggctgaactcatcgctcaggaagtaaggtttctgggtgaagaccggcgcgatggccagcaattcttcacgcagctgcttacgcgcagcatcagcttgcgctgcggtaccgctctggatggtgttcatcagcgaataccagtccttctcgatacgttgcatatacaggcggctttcaccacgcgccaccggataaaccggcattaacggcgggtgcgggaaacgctcatccagatactccataatgatgcgggattcccacagagtgagctcacgatccaccagcgtcggtacgctttgattcgggttgaggtcaatcagatcctgaggcgggttatccttctccacgtgctctatctcaaaactgacacccttctcggccagcacaatgcggacctgatggctatagatgtcagtaggaccagaaaacagcgtcattaccgaacgtttgttggcagcgacagccatgaaaacctccaggtatattcagaattttgtactgctgccggccactcatgaccagccagatgtaaaaaccccattagcgcgatgtcaccttcgttcacgaataaaacaaaaaatgaacaatcaccagcatttgggcagaaaattggatgatagtttaccagattttgaagacgttgtggtgaggggattctggaaatgctgaaaaagtggcgagaaccggcgctatgcttgtggataacagccgttttatccataaaaaaacccgccgaagcgggttttttcgcaaattgttctgcgtgagcagaaaacaattaacgtttggagaactgcggacgacgacgtgctttacgcagaccgactttcttacgttcaacctgacgagcgtcacgagtaacgaagccagctttacgcagttcggaacgcagggactcgtcgtactccatcagagcgcgggtgataccgtgacggatcgcaccagcctgaccagagataccaccacctttaacagtgatgtacagatccagtttctcaaccatgtcgaccagttccagcggctgacgaactaccatgcgggcagtttcacgaccgaagtactgttccagagaacgctggttgataacgattttaccgttgcccggtttgatgaaaacgcgagctgcggaacttttgcggcgaccagtgccgtagtattgattttcagccattgcctataatcccgattagatgtcaagaacttgcggttgctgtgccgcgtggttgtgctcgttacccgcgtaaactttcagtttacggtacatagcacgacccagcgggccttttggcagcatgcctttaaccgcgatttcaatcacacgctcaggacggcgggcaatcatctcttcaaaggtcgcttctttgataccaccgatgtggccggtgtggtggtagtacattttgtcttcgcgcttgttgccggtaacagcaactttttctgcgttcagaacgatgatgtaatcaccggtatcaacgtgcggagtgtattccgctttgtgcttaccgcgcaggcgacgagccagttcagtagccagacggcccagagttttaccggtcgcgtcaacaacataccagtcgcgttttacggtttctggtttagctgtaaaagttttcattaaaagcttacccaaataataagttacacgttggtgaacacccaaacgtttagtcagttgaggttcacacgacattgtccagcaaacctaccccttcgaatagcctatgccggcgcatagaaagtttcgggaaaaaaaccttctcgtaacgtggggtcgcaagattatagagaagtcggggtcaaagatcgacccctttatgagatttttcaggccgcgcccggggcggccttacggccctgaatccgcctgaaaaagtcacctgtcagggcatatgcggacgtttgaggtactcttcgctctgcatctcctgcagacgcgagagacagcgctggaactcaaacttcagccgctcgccctggtaaatgtcgtacagcggtactgccgcgctgaccaccagctttacatggcgctcgtagaactcatccaccagagcgataaagcggcgggcctcgctctccagctgcgcggtcatcaccggcacgtcgaacagcatcaccgtatggaacagtcgggagagcgcgatatagtcatgctggctgcgcgcatccacgcatagcgtggcgaatgacgccgccagcgtctggttttctacgccgagggtaggcagctcgcgatggttaatctccagcgtcggcccggcagcgcgcggcgcgcccgccagcgcgagccacaatttatccatctgttcgcgggtgtcgttattcagcggcgacagccacaggtgcgcctgcgtcagggtacgcagtcgataatcgatgccggcatcgacgttcataatatcgcaatgctgcttgatggcatcgatcgccggcagaaaacgggcccgctgcaggccattacgatagagttcatccggcggaatattggaggtcgccaccagggtgatgccgcgggcgaacagggctttcatcagcccgcccaacagcatggcgtcggtaatatcggagacaaaaaactcgtcgaaacagagcacgtcggtttccgctttaaagcggtcggcgacgatctccagcgggtcgctatgtccctgcagggtggtcagctcttcgtgtacgcgcagcatgaaacgatggaaatgcaggcgctgtttacgctcgcccggcaggctctggtaaaacaggtccatcagccaggttttgcctcgccccacgccgccccacatatacaggccgcggacaggtgccgtcccggcagccggctcgcgcttacccagcagtttgccgaatttcgcgcgcaaaccgccgcctgacgcgaccggcgcgggctgcgtctgcagttcctggtaaatggtatcaaggcggctcaccgcttcttgctggacgtcgtcgggttgatggctgccctctttcagggctaaaaggtaacgcgatgttggagacaggctttgcatgatctaattgttattccttgaaaaccgtaatgccgaagctcacgattgacgaaaaaaaggccgttctacactacgcgatgatacgccaggattccacttctgtggaattagcggttatagtggcactatcgggcgcaggcggagagcctaagagccaccctacggaaccacaatacaacgggagatgttcatgacctgggaatacgcgctaattgggttagtcgtcggtatcatcattggtgccgtcgccatgcgtttcggcaaccgcaaactgcgccaacagcaggcgctgcagtacgaactggaaaagaataaagccgagcttgaagagtaccgtgaagagctggtgagccactttgcgcgtagcgccgaactgctggataacatggcgcacgactatcgtcagctatatcagcatatggcgaaaagctctaacaacctgctgccggactcgatggcagacgccaacccgttccgcaaccgtctggaagagtctgaagccagtaacgatcaggcgccggtccagatgccgcgcgactactccgagggcgcatccggtttactgcgcggaggcgcaaaacgcgattaagcctcgctgcgattaaaatattctccgggcgcgcccgtcgcgcccgctccttcccccacttcccggctacaatttaaaccagtccccacgttgttacctgtgcaaaaattcaataacatcaggttattcaggacatttttccatacacctcaggttacgagagccagcatctaatgaagaaacagactttgctgttgagtgcgttagcgttaagcattgggttatcgttgtcggtcctgcctccggcagcggcatccttaccgactcaggtgcccggccagggcgcgttaccaagcctggcgccgatgctggaaaaggttctgccggcggtggttagcgtacaggtggaaggcactgcctcgccgacgctcaatatgccggaagagctgaaaaaatattttggcgataacgccccgcaggagcaggcgcagccgtttgaagggctcggctccggcgttatcatcgacgcggcgaaaggctatgtgctgaccaataaccacgtcatcaatcaggcgcagaagatcagcgtccagctgaacgatggccgtgagttcgatgccaaactggtcgggagcgatgaacagagcgatatcgctctgctgcagctgattaagccagaccacctgacgcaaatcgccattgctgactctgataaacttcgcgtcggcgacttcgccgtcgccgtcggcaacccgttcggccttggccagaccgccacatccggcattatctctgcccttggccgcagcggcttgaaccttgaagggctggagaatttcattcagaccgacgcctcgattaaccgcggcaactccggcggcgcgctgctgaacctcaacggcgagcttatcgggatcaacaccgcgatcctcgcgccgggcggcggcagcatcggcatcggctttgccattccaagcaatatggcgaaaaccctcgccgaccagcttattcagtttggcgaaatcaagcgcggcctgttgggcattaaaggcatggaaatgagcgccgacatcgccaaagcgatgaatctcaacgttcagcgcggcgccttcgtcagtgaagtcctgccaaactccggctccgccaaagcggggattaaatccggggacgtcatcgtgagtctgaacggcaaaccgctgaacagtttcgccgaactgcgttcgcggatcgccaccaccgagccgggtaccaaggtcaaactgggcctgctgcgcgatggaaagccggtcgatgtcgaagtgaccctggataagagcacctcctcaaccgccagcgcggaactgattatcccggcgctgcagggggcctcgttcagcgacggccagatgaaagatggcaccaaaggagtggtgatcgataatgtggataaaggcagcgccgccgcccaggtcggtctgcataaggatgacattatcattggccttaaccggcagcgtattcactcaattgccgaactgcgcaaagcgctcgaaggcaaaccgccggtcatcgccctgaacgtgatccgcggcaacgaaagcatctatctgctgctgcgctgattgtctctccgggcatcgccgccatgtgcgatgtccggacaactcatgctatgctgcgcctgaccattcattaacgatatctgcatcatgcctggaaagttattacgttcagtactcatcggtttgcttgtcgggggtctgctgctggccctgatgccctcgctgcgccagtggcagttggcgccgactacccagaacgatacggcagacgactccccggcgagctataacgccgcggtgcgccgcgcggcgcccgccgtggtgaacgtctataaccgcgcccttaacagcaccagccataatcagctgacgcttggctcaggggtgattatggatcagcgcggctatatcctgaccaacaagcatgttatcaacgatgccgatcagattatcgtcgccctgcaggacggccgcgtcttcgaagcgctgctggtaggatccgattccctcaccgatctcgccgtgctcaaaatcaatgctaccggcgggctgccggtgatcccgatcaatccgaaacgcacgccgcacatcggcgacgtggtgctggcgattggcaacccttataacctggggcagaccatcacccaggggattatcagcgccacagggcgcattggcctcaatccgaccggccgccagaacttcctgcagactgacgcctcgatcaaccacggtaactccggcggggcgctggtgaactccctcggcgagctgatggggattaacaccctctcctttgacaagagcaatgacggcgaaacgccggaaggcattggctttgcgatcccgttccagttagcgaccaaaattatggataaactgatccgcgatggccgggtgatccgcggctatatcggcattagcggccgggagatcgccccgctgcacgcgcagggcggagggatcgatcagattcaggggatcgtcgttaacgatgtggctccggacggtccagcggcgcaagccgggatccgcgccaacgacgtaatcatctccgtgaatgacaaacccgccgtctcggcgctggagacgatggatcaggtggccgagatccgcccgggatcggaaattccggtggtcatcatgcgtgatgataagaaaatcacgctccatatcgccgtccaggaatacccggccaccaactaaacggctccccgtttggggagccacgttaatcgctaaataccggaccggccgggaatctgaccagaaacccggtttccatgaatgctggacaataaaaagccggaacagcggttccggctcttctgttagggcgagattacttgttgacgaagtcttcgccgagcgcgatatctttcttcagggtgtccagcatgccctccagcgcctgctgttcaaaggcgctgagtttgccgatagactgtcgctcttccacgccgtttttccccagcagcagcggctgggagaagaaacgcgcatagtggccgtcgccttccacgtaggcgcactccaccacgcctttttccccctgcatggcgcgaaccagagagagaccaaaacgggcagccgcctggcccatcgacaaggtcgccgacccgccgcccgctttcgcttccacgacttcggtaccggcgttctgaatacgtttagtcaggtcggcaatttcctgatcgctaaagctgacgccggggatctgcgacagtaaaggcagaatggtgaccccggagtgaccaccaatgaccgggacttccacctcggttgccgatttacctttcagctccgccacaaaggtattggaacggatgatgtccagcgtggtaacgccgaacagtttgtttttatcgtacacgccggcttttttcagtacttcggcggcgatagccacggtggtattcaccgggttggtgataatgccgatgcaggcctgcgggcaggttttggcaatctgctgcacgaggttcttcacgatacccgcattcacattaaacaggtcggaacgatccatgccgggcttacgcgccacgcccgcggagatcagcactacatccgcgccttccagcgccggagtagcgtcttcaccggaaaatcctttaatttttacatctgtggggatatgacttagatctaccgccacgcccggcgtaaccggagcgatgtcgtacaacgagagctctgaacctgaaggcagttgggtcttaagtagtagggcaagcgcctggccgataccaccggcagcgccaaggactgcaactttcatcctaaactccttattatggttaatttagtctttcgttattccgtcgcctggaccttaattcacaagatgaacaattacaatgattatggctgaagaatgcattattgtgcgtagcaatagaacagcggcgcactttatgcttcctgactgaccatccagcaaagcgaagaaccggatcgactattggttacaatacacccagccagttgcgcaaaacaacaccaactcaataacatttcatttacttttacatggctttaagcgttgtgatgagaacatgttccttatacggtttttttgctaaaatatgcccccttcataacattattgacctatcctttcgcggattatttgcataaaaattcatggttatgcataatgatgttgattttaccaccataatctgggtgacttatgcgaagttcggcaaaacaagaagaactggttaaagcgtttaaggcgctgcttaaagaagagaaattcagctcgcagggagagatcgtccaggcgctgcaggaagagggcttcgagaatatcaaccaatcgaaggtttcccgcatgctcaccaaatttggcgcggtgcgtacccgtaacgccaaaatggaaatggtctattgcttgcctgccgagcttggggtaccgaccacctccagcccgctgaagaatttggtgctggatatcgactataacgatgccgtagtggtgattcataccagccccggcgccgcgcagctgatcgcccgtcttctcgactcgctgggcaaagcggaaggcattcttggcagtatcgccggggatgacaccatctttaccacgcctgcacgcggttttacggtgaaagatctgcacgacgccattctggttctgtttgagcaggaactctgagtaattcccctctggctaccgtcagagggcgactcctctttcttttgcctctccccccttctggcacaacaactatttaacacttagtgtcatttacgccgtctatacgttcttttactaacgcgaaaatcgtaaaacgcacaaaagatcaaattcgtatacctttatgaatttattagaaataaatcttatcgctgtcgctaacgtgtcatttttaattcttatccgttataaaaagcgcaatctattgtaactattaacgcacaaaacaattagcatggtattaatatttttagtgattagtgtatacttggttttgtgatgagggtcacgaaacaaagacccccaacaaaaagattcgacgaggtgaacatcatgaaaatcaaaaccactgtagctgctatcagcatcctgtccgtcgtgtcgtttggcgctttcgccgctgatattatcaacagcgagcaggcccagggccgcgaggccatcggcacggtttccgtcggcgcggtagcatcttccccgatggatatgcatgaaatgctgaacaaaaaagcgcaggaagaaggggcttcttcttaccgcattatcgaagcccgcactggcgaccactggcatgccactgctgagctgtataaataagttttagacgtcaacgattaacctgacaaaaattctctaccgcggcccggcgacatacatcgccccgccgcggcaaaacaaagactggagtaaagattatgaaacgcgcaatgatcatcgcatcccttggcctggcttcccttctctctttcggtgccagcgcggctgtccagcaagtgaacgcagagcaagcccaaaatctgcaatccatgggcaccatctccgtatcccaggtaggtagtgcgccaatggacatgcgtcaggaactggcggctaaagccgagaaagaaggcgccagcagctaccgtattattgaagcacgtaccggcgatagctggcacgccaccgctgagctgtacaaataaaccctcgtcgtcttatttcgacgacttgcccccgcctgccgggggcttttttatgcttgtcgggcattaaaacgcaactccccctccagctcttcctctgcttcatcaaacaataaaatcaatgcgccaaagcgccggcgctgcttgtcatttaaatggatgaattcaatatccagcggcagcggtagcaggccaccggtcactgcgtcccatagcgaatccaggttgttgaccttatcctgagccagctcgaaggttcgggaaaactcccggtagaaatcctgttgttcggcgatttcgtcaaaatcaaacgtataggtggtcatgacagcccctcccgcttctctttctgtcgccgttaagtatagcgataaaaaaaccgacgcctgggcgtcggtttatgggttagctgctggtcagcacatgctggtacttatgcaacatctcaaccagtcgccgtaccggctcggtgacctgcggcgaggcctcccagacccgcagcttctcctgatagacatcaagctccgccagcaactgggtaaaatagcgccgacgcttatcatcgctgccggcggagatcacatggtccgcggtacgtcgcagctgacgatggaaggcggagagatcgtcgttcaccggcacgggcgcatcgcgcaagcgctgatgggcgatgattaacgtcaacgccagacggaaacgggcgacgtcacccgggaatttattgagtaataaaaacagctgctgatagagcgcgggcagatgattctctttgcgacgcgccgagttggtggtcagcgaagagaccgccgcggagacaaactggttcagcagcacccgaccggttctggcccgggagttatccctgacaatgagaataaccatcagagcgaggaaacagccgacgatctgccccagcgcgctatcgaggaactggctgaactggaactgcatcgggttatccagcaccagaatgttgatggtgctcgccagcgcccccagcgatccgagacgccttttttgtacttcgatcccgataaagaacgccatcgccgccaggctgatgcaaagcaacagcatgctctgctgcgtcgccggcatgatcaccaggaagtacaaggtgcccaacggtaacgccgccagggtgccatagaggaagtctatcgccaccatacgcgggtttggcaggcgcatcgccagcgcggtaaccacggcgatcattaccatcgcgccgctgcctgaggtccagcccgtccacagccagaatagcgttccgagaatacaggagacagaggtgcgccagaagttcaccatcgcgtgatgacgttcggcggactccactttaaccaccgtttcgccgcgcaacacgccatcctcgatacggctgattttagtattccccaccacgccgcgcttaagcagcaggtaacgcgtggcggcgcccacccagctataaatcgtgaccggggtattatgctcgcctttccaggtcaggaagcggcgcatgcgcttcagctgctggtgaacatcctgcaccgtctcaaccggctcggcgaacagctcgcgatagtcgtccgtgaccatttccgggcgtgagttctgaatcagataggtttcgcaagcctgggtgataagggttagcgaaagggtgttgatcgccttcaggcgctgattggcctttgcccagcgtgaggattccataatcaggttactacgcataccttccagcgccgtagtgcggcgtaccagcgctccccaggcttgatccacttcctctttttcaccgtgcgcgacgcataactgcatcagcttatactgtgcaattagcagattatcgagctcgaggtcgatctcttttttaatcgaacgcggcgaaaacaggagatcggcgacgatggcgctgacaataccgatgacaatttcgctgcagcgttcgacagcaaactgcggcgccagcatcggattggtatggatggtaataatgataatcagcgcggtgtacccggccagcccccaggcataggagttttcgaccttgaccagcgacgaaacccaggtacaaaacccggcccacagacagcagaccagcatcatcagcagaggcgcgcggatcatcaggatgatgataaccagcgccgcaatacagccaataaaggtcccggcaatacgcaacataccgcgatagcggatcgcgccggagtacggttcgccgccagcagcaaaggccggcccggcggcgacgatcgctgccgtcagtaccgcccagcgcggcgtttcgagctgaaaatggaaaccgacaaacagcgccagcacccccgcgcatgcaagcttaatggcaaagcggagatgccggggagcaatggtatatgtccccatagcgattaaccaaattcgcgcaggcgcatagccagtttctggaagaagttggcctggctggtatcacgatcttcttgaccggtgatcactaccgtcgccgtggtgcccgatggccacagattcccctgctggtgatcgaggcgaatacgcaccggcacacgctgcgccagacgcacccactcaaggttggagtcgaccgaggccatccctttcgagtcgctgctgctgctggcgttggtcacccccgcagcgatactgtccaccgtccctttaatggttttgctgctgcccagcggggtaatctccgcacgatagcctggacggacgccctccagtttggtctcttccagataggccatgacgtaaaacgtattctctttcaccagcgccaccgccgtggagccacgggtgataaattccccagtgtagacgttaaggttagtcacccagccatccgcaggggcgcgaatgaccgtccgctccagatctagcctggccaggtcgcgactagccaccgctttcgccagctgatgttcaacggtttgcagtacgttgttcgcctgatcaatctcttcccgcgacatcgcctgtacgccaagcttattacgccgaccggcttcgacgcgtttttcctgagctaacgtctgataataggcgacatcagcttccgcctgcgccagcgctttttggtaacgaggttggtcaataacgaacaatacctggtctttcttaaccagttggttatccttgacgtttacctgagaaatcagcccggagacgtcgggggcaatcgccacaatgtcggcgctaaagcgcgcatcacgcgtccacggcgaggcggtgtaataaacccaggcgcggaaaatcgccacgaaggccagaatgaccagtatcacggtaatggcagtacggaggatatttcttgttagtgttttcacatcaacctcaaacgaacaagcgcgatatcaaataaaaaaggcagcaatagagcgccgtattaaacagtgctgggtgccagacaaaatcgtaaatgccggtcggaaccagcagtcggtgcaccagccaaaagatagccagcgacaaaagcaactcgaagaagatcggcggaaacgataagccgaaaatcacgatgacaggaaacagactcatgatgaccttgaataagaagcgtacaggtagtgagcagatgcgtttattatgtagctaacaatatattaacgtaacgattgccgcattatctacaatgtgtgatctaaatcacttttaagccagagtgaataatggaacgattaaaacgcatgtccgttttcgccaaagtggtcgaattaggttcattcaccgcagcggcccgccagcttcagatgagcgtttcctcgatcagtcagaccgtcgccaaactggaagatgagctgcaggtaaagctgctcaaccgcagcacccgcagccttggcttaactgaagcaggtaaaatctattaccagggctgccgtaggatgctgtttgaagcgcaggatgtccatgagcaattatacgcatttaacaatacccccatcgggacgctgcgcatcggctgctcttcaactatggcacagaatgttctggcgcgcataacggcgaaaatgctcaaagaataccccgggctctctgttaatctggtcaccggcatacctgcgccagacctgatcgccgacggccttgacgtggtgatccgcgtgggcgccctgcaggattccagccttttttcccgccgcctgggctcaatgccgatggtattatgcgccgctaaaagctatctggcgcaggctggcaatccagagaaaccggccgaccttgccggacatgcctggctggaatatagcgtgcggccggacaatgagtttgtcattatcgcgccggaagggatctcgacccgcctcaccccgcaggggcgcttcgtgaccaacgaccctatgacgctggtgcgctggctgaccgccggggtgggtatcgcctatgtaccgttaatgtgggcgatcgaagagatcaaccgcggtgagcttgagatcctgctgcccagctatcagtccgatccgcgaccggtctacgccctgtatacggaaaaggataaactgccgctgaaagtgcaggtctgtatcaactatctgacggagtattttgtcgacgtggcgaagatctatcagggcatgcacgggcgcgggatcgcccggtgaagcggttcccggcagcgccgggaaccaggtcaggatcaggcggtgccgccgacggtaaggttatcgaccttcagggtcggctggccgacgcccaccggcacgctctggccctctttgccacagacgccgacgccgttatccaggcgcaggtcgttgcccaccatcgaaatctgctgcatggtctcaatgccggagccaatcagcgtggcccctttcaccgccttcgtgaccttccctttttcgatcagataggcctcggaagtggagaagacgaatttaccggaggtgatatccacctgcccgccgccgaagttaggcgcaaagataccgtagtcgaccgattcgataatctcctgtggcgtcgactggcccgccagcatataggtgttggtcatacgcggcatcggcagatgggcatacgactcacgtcggccattgccggtcggtgcgacgcccatcaggcgcgcgttgagtttatcctgcatatagcctttcagaatgccgttttcgattagcacgttgtattgccccggcgtcccttcgtcatcaatggccaccgagccacggcgatcggcgatggtgccatcatccactacggtgcacagctcagaggcgactaattcccccatatggccgctaaagaccgaggtgccacgccggttgaaatcgccttccagcccatggccgaccgcttcatgcagcaggacgccaggccagccggcgccgagcaccaccggcagcatccccgcaggggcggcgaccgccgagaggttgaccagcgccatgcgcaccgcttctttcgcccaggcatcggcccgcacgtcgccctcctgggaggcgaggaaatagtcataaccaaaacgcccgccaccgccgctactgccgcgctcacgcttgccatcctcttccaccagcacgctgacggaaagacgaaccagcggacgaacgtcggcggccagagtgccatcggtggcggcgaccaggatcagctcatacaccccgctcaggctggctgaaacctcctgcacccgctggtccgccgcccgggcgactttgtctacccggcgcagaatatccagcttctcttcccgggtcatactctgcagcgggtcgatgctggtgtacagggcacgatgctctacggcgccgagggtctgcactttgccattgccggtgtcgcgcacaatggtccgcgccgcctgggcgctctgctccagcgccagtttgctgatctgatcggcgtaggcaaagcccgttttttcgccgctgacggcgcgcacgcctacgccctggtcgatattgtacgacccatctttaatgatgctgtcttccagaacccaggattcgtgatagctcgactgaaaatagagatcgccgtaatcgaggcggcgctcggtcagttgaccaagaatggcaaacaggtcctgatgattcaggccatttgccgacagtaattgttcacttaccaggttcagactcatcgttatgctactcgtttgttgccgcctgacaggcggaaatacagaaggctatctattgagattgcggcaattcccggcaatcgtcaaatcattgctttttattgctgcgcgccaggcgcagcacttcattgatctgcggctggtcaatcgggccggtgatgcggtagcgcagaatcgaaactttattccacagcggacccagcactttgctggcggcaaataccgccgcgccgacgatggggttgacggcaaaggccgccgccacgccgacggtcgcggagatctccggcgccaccaccgcctgcagatccagctggcgacgcaccagatcgaccgaccctttcatagcaatatccgcttcaaggccatccaccagcgtatcatcggtatgcagtacgccatccttaatccatgccgtactgttaatcgaatcgaagtaaaagccttcgctgaaggtatcgctgaaatcgaaacgcagtttacgcagcagggcatccacactcagcagacgcagcagctggccagcgtgcccggtactcaggtcggtaaactgccccttgcccaggtggcttttaatgatgccattgagcgacgcgacatcgggtgaccagggcggcgcgcgccagtgcagatcgtagtcgatatcaaacggcgaatccttcaccggcgtggagacgccaaagaaatccgcaaatgcatccgtcttattgccgtgcagtctgcctttcagcgaggttcgaacccctgaaggggcgttcacccacacgccgttggtcgtcagccggccaaacccggtatccaccaggccgttggagagcgttaaggtatcccctttgatcgccacatccccatcgatgcggccatatttttgtccccacagccagcattccgcgcagcgtagctgcagatcgggccagccatggaaatccagccgcgtcgccgtctggggggccacattctctgttgcgttctggccgctggcgctggccggattgaaatagagataacgcacatttgccagccacggagcattgtcgcgcatcgtcaatgtggcattgatctcacgcccctgcgcctcaacctgcgagccgccggcgaccggctgtgacatcagactgacgttgttccactgttgacccgcgagggccagcgacggcgtacgcagcacaatgcgcggtggaaagagcacgctgctgctcacttcatttgccgcgccgttctcgaagagcgccagccactgcgcgccatccatcggcggcaggttgagctcgataccggactgatcgggcagcggagagtaccctttgctgtcagtggtaaggatcgctctatccagcgtcagcttatgattgagcaaccagcggctgttaatatgattcttcgccccgatggagccggtcaggtcgaagctgctcaggccgccggcgacgttaattttgaccggaaggggttcgccggcgggcttactgactggcgaaggtaagcgactgctcacattcttcagatcgccgttgatatcgaccttatagctggcattgccatggtacggcagttcgatggcgaccttgccatcccacgggacgctaccgctcaacgcctcactcacggctttcggcagcagcccggtgcgcgacggctgccagttggcattcatcccgacatccaccagaaacgctttttcaccttcgcgggtggaaaaattgaggttcagcggctgattaaaccaggtcgcgctcaacgtttgactattgagatcgccattcacaaagctgaaattaccgctcaggttctgcagtgtagtatctaacggtttgataaacaggctattattctgcaggcgcacatcgcctttcgcggtggtcatctcgccgtcgagggggatattaagatgtaagcgagcgctcacatccccatccagctgcagggaatccagcgccgccccgagcgactctttcagcggcgtagtattaaagtaaggtccaacctcttttcccgggcctttgatatcggcatcaatcagcagtttttcctgcgcatagtccgggatcgcggcatcgagattgctggcggtcacgttgccaagcatcgctttatccgcctgcatccacaggccgttgttgataaaattgagatcgatgttcagcccggttagcgccggccagtccggttggaaggcaaaagtggcgttcttcagcggaacataaacctggaattggccttcattatgcggataagggaataaatgcggattgccgccatacaccagcgtcgcatcgctggcttgccccgctttaatcgcgccgctcagatagtccaccagcgctttgcccatcagattttccgggaaataacgccatgcctggccaccgtcattggtgctgatgcccgccagaatgcccagccagggatcgtccccctgcggttgcagatagcggaagccgccgcgggcgcgtacgcctgtcgcctgcacgtctatatcgcggccatcaagcataaaccctttgtcgtttttcacccaactgagcgtggcttcgccagcggctatctccagcggcgcgcggaagacgccggcatacggcatcagcgccttcgccatatgggcgcgtaattccccgtgctcaacgctgccattcagactgccggagaagtgttctgccccaggcaggagtttccactgcttccacgccagatcgctccactgcgcctgaaaacgcgttttctccgtcgcctgcagggggatatcgagagccagcaaattgattttgccgccaggctgcgtggtacgccagagttcgcccagagaaggcgccagcttatcagcaaacggctgtaacccgctcaggccgctgagggccaaattgctggcgcgaatacgtaactcatcgctacgctgacgatcgtcgccaccaacgtcctgcgccgggatccacgccatcgccagggctccgcttggccagggtttatcatcgatagcgatccgcgtatcgggaatataaaaggcccagctttgcttatcatgggagagatgcgccgtcaggttatccaccgacaaatgatggacttcgttatcgccctgccagctggcgcccccttttttcagccatacgtcgccgctggccacatcacctttttcaatggtcatccagccttcgaggctgaagcgggcgcttttcagggcgatattgtcctgcatccagcgtcccagccacggtttgacgtcgatatcatccgcctgcagccagacccggcctttattcagcaggccatcctcatcgcgaagatccatccgcacctgcatgacgccatgctggccggtgaggctggagaggctgagctgcccctcggcgcgatgacggttcctgccgttaagccatgtcagctgcggaaccgccagctccgcccgctgaccggaaagagtcaggaagctcagatggctgtcgcgcagagtaaagtgatcgaactgacgtaaaaagagatcgctgatgcggtcggttttcaggctttcgccaccgtcattggtctgaataggggtattggtatggacctgcagctgccagaaggtgaggtcgcggaactgccagcgcatatgcagcaggctctgccagacatccagcgccagggttacgcgcttgaccgccattgtgccgccatctttcagcccgacatggatatcgcgggcgtctaacgtcggaccaaaagtctgccagctggcggtgatctgcgaggcgtccaccggcgtaccggtgagggtggagatcttctccagcagctgcggacgccaggcgtcgagctgtggcaacacgagacgcaagccactcaccagcagcgcgacgataacaatcaatgttgccacggtgagcaataaaatcccgggcagtcgcctcacgcctctctccttgtcagccgcacaatgacgcggtgtcttacatcataaccacatcgaactgctcttgattatagagcggctcaatttgtaccttcacctgcttgccgacaaagatttccacttccgccagcgcatgcgactcttcccctttcagggtttccgccaccgcaggggaagcatagaccaggaagcgatcggaatcataagcatgatgtacgcggacgatctcacgcataatctcatagcacaccgtttccaccgactttaccgttccacgtccgtggcaggttgggcactcgttgcacagcacatgctccacgctttcacgggtgcgtttacgggtcatctccaccaggcccagctgggagaagccgttaatgctcgtcttcacccgatctttactcagcgcctgctctaaagagtgcaacacccgtcgacggtgatcttcattgttcatgtctatgaaatcaatgatgataatgccgccgagattacgcaaacgtagctggcgggctatcgcctgggtggcttcgatgttggtattgaagatcgtatcgtcaagattgcggtgcccgacaaaggccccggtgttgatatcgatggtggtcatcgcctcggtctggtcgatgatcagatagcccccggatttgagctcgactttacgctccagcgcgcgctgaatttcgttctcaacgtcaaagagatcgaatatcggctgacggccgctgtagtgttccagcttgctggtcatttccgggatatattcggcggtgaattcgagcaacgcctcataggtcaggcgcgagtcgacgcgaatgcgatccagttgcgcatcggcaaaatcacgcagcacgcgctgggccagagccagctcgccatacagctgatagcgggtctggttgcgctttttgcgctccatcaccttggtccatacgcgcttaagataagcggcatcggcggccatctcctgctcgtgaacgccttccgcagcggtgcgaatgataaacccgccctgctcatcgcaatattctgcgacgaccttttttaggcgctcgcgctcggcttcgctttcaatccgctgagagacccccacgtgggaggcgcctggcataaagaccagatagcgggaaggcagggtaatatcggtggtcagacgcgcgcctttggtacccagcggatctttaaccacctggaccatcagatcctggccctggcgcaccagctccgaaatatcgcgcacggtaaactgcttttgctcctcaccggcgacgcactcggtatgcggcatgatatcggaggcgtgaaggaacgccgccttatccagaccaatatctacaaaagccgcctgcattcccggcagcactcggctaacacgacctttgtagatattgcctactattccgcgtcgcgcttcacgctcaatatggatttcctgcagaataccgccatcaatatacgcaacgcgcgtttcggatggcgttacgttaactaataattcagccgtcatctttatccctttcctttacgcagtgagttaaagttactgagcaactcatacgtttccaccagcggtaagccgactacggcgtgatagctgccattaatcttcctgacgaagcaaccacccaacccttgaataccgtatgcacctgctttatctaaaggctcgccgctggccacataatcggcgatatcctgctcgctgagccgccggaaggtcacttccgtgaccaccagacagtccagcgtttgctgcttatccgccagcgccaccgcggtcatgacctgatgggtgtggccggaaagcaaacgcagcatcgctgcagcgtgttcggcgtcgcgcggtttttccagcacttcgccgttcaaaatgacaatcgtatccgctcccagcaccggcaaatcgcgggtggccatcgccaccccggcctgcgctttttcgcgcgccaggcggacgacatagtgctgggcgctctcctgcggctggcgctgctcctcgataccaggaaccagacgctcgaaagcgagaccaagctgagtcagcagttcctgccgacgcggggaaccagaagcgagatacagagttgtcatatcaaccttattgcactgcaaattgctgacgcactttacgcatcagcaggaagagccatggccagaggatgccgtttactacactactccagaatacttccggacggaaagagacgttgatcactaaaaactctgcccagaaaacaatgatatccacggccagggataacaacattaccaccagcgcctgttgccacagcgccaggttacggaacagctgatacttcagcgcgaccagataggcgacgatgcttaaagacagcgcgcgaacgccgagcgttgaaccgctgatgagatcaagaatagcccccatcacgaaacccgtccccacgtttccccggtgcggcaacgcgaggatccagtacagcaggatcaataatacccagttgggccggaaaacgctgatgtccgccggccagggcataatttgcagcaatagcgcgataagaaacgagagccagataacccagcgtccctggctacggtaacttgccactattgcccccctgcaggctgcgacggctgaggcggcgtcaacccggtggcgggcgccggcatctgcggccccatcgcatccggcgcaggcagtacctgcggcatcatctgcatcagacgttcgttagccacccgatgaacctcttccggggtcatcgggttagcgccattacgatcggcgccccacagcagcaacagatagcgcaagcgctgcagcccggccgtcggacgcgcctgaatcacggtataggcgcgctgggtgtccagtttcaccgaggagactaccccgaccggatacccttcagggaaacgaccgccgagaccggaggtcaccagcacgtcgccgacgcgaatatcggtattcgccggcagatgctcaagctggagatcgtccgtgcagccgttaccggcggcaatgacgcgaatgtcgttacgcagaacctggatcggcagcgcatgagtggcatcgcagatcagcagcactcggctggtcattttcgccacggccacgacctgccccaccacgcctttatcgctgataaccggctggccttcatagacgccgttcacgctgcctttgtcaataaccacctgatcgctgtaagggtcgttgaccgttgagatgacctgcgtcaccattttttgctcgtcctggcgcagcggcgagccaagcagttcacgcaggcgcgcgttctcctgcttgtactggcccagcatcagcagatcgctgtttttcagcaacagctcctggcgcagcgcgcggttttccagttcgagctggtcgcgggtagctagcgtctgcgatacgctgtcgagcagttcccggggaccattagagacaaagtagaaagggctgacggctgtatccatgtacgttctgatttgactgaacgtacccaggcggctgtcggcgataatcacgccaagcgccaccagcaccgccagaataaggcgaatctgtagcgaggggccacggctaaaaattggcttcataggctatgcgtattctcgtgtcagtaaagaccaggggcagctcgtatgccgccccggaccttcaggctgactactcttcgctaaacaggtcgccgccgtgcatgtcgatcatctccagcgccttgccgccgccacgcgctacgcaggtcagcggatcttcagcaaccacgactggaataccggtttcttccattaacagacggtccaggttgcgcagcagcgcaccaccgccggtgagaaccatcccgcgttcagagatatcagacgccagttccggcgggcactgctcaagggcaaccatgaccgcactcacgatgccggtcagaggctcctgcagcgcttcaagaatttcgtttgagttcagggtgaagccgcgtggcacgccttccgccaggttacgaccgcgcacttcaatttcgcgcacttcatcgcccgggtaagccgaaccgatttcatgcttgatacgttcagcggtcgcttcaccgatcagggagccgtagttacgacgcacgtaattgataacggcttcgtcgaagcggtcaccgccgatacgtacagaagaggaatagaccacgccgttcagggagataaccgccacctcagtggtaccgccaccgatatccaccaccatggagccggtcgcttcagaaaccggtaagcctgcgccaatcgctgccgccatcggctcttcgatcaggaagacttcacgggcgcctgcgccctgcgcggattcacgaatagcgcgacgttcgacctgggttgcgccaaccggtacacacaccagcacgcgcgggctcgggcgcataaagctgttgctgtgcacttgtttgataaagtgctgcagcatcttttccgtcacgaagaagtcagcgataacgccgtccttcatcgggcgaatcgccgcgatattacccggggtacggccgagcatctgcttcgcttcatgacccacggcggcgacgcttttcggcgatccggcacgatcctgacgaatggccaccacggaaggctcattcaatacgatgccttgtccttttacgtaaataagggtattcgcggtacccaggtcaatggacaggtcattggaaaacatgccacgaaatttttttaacatactaagggataatcctgaaagctggggcggaaaacaaaatccgcttactttaccaaccacacgcagcagcgacaaggcgcaaaaatcacctgctgcggtgaaaattagtgcagttcatttcctttgttacaaattttcccgactccgttcattgctgaaatcttcagcagcgctccacgcctgaatttgtaacctgtcaaaggagggtcactggcatttacattgcgatgatccggcaggtagacaagcacacccccttcacgatggcgcgcgttattctacgtgaaatcacgctaaacggcagatcaaaccgagtatctttgcgaatattttttcacatttgtgtcaagtggctgtgaggcggcaaaaaattccccctgcccgcccgtgacaccgcattgggacagtaccaaccactcgctgcggctgcgtacgcccgtcgcaaaaacttgcataggcatgcctttacaggcttccaccaggctttgcaccagcagttggttctcgctgcgcttttcgatgttgcgcgccagccccggatgcagtttgatcagctccgcatccagctgcttgatccagctggttccaaccagggttaaccccgcctgaaccactgccacccgaacgcccagagcgttaaccaatcgcataaccggctgcagacggccgatatattgacaaacatctgcctctgcaagttcaaaaataatccgctgacgctgcgatttttcacactgcatcaaggcatcgcgcagccagcgctggaaacgcggacggatcagcgactccaccgacagttggagcgccagattctcctcgggccagaagcctaaaaacggcagcaggcgcgttacctgcaggcggtcatactcctccgccaggccaaactgcagcaccatcggcatgtattccgctgcaatcacctcttctttaccgtcgtacatccgcgacatcagttcacgatgatgtacccgcccgtcgcgggtgacagctggtttttggtacaaccgcggcccgccgcggctcagcatctgttcgatcagcgttcgccagcgaacgttgccgcgacctttctccggaagggtgtcatcatagaccgaccagctgttgctgccctgcagcaccgcgttgcgcgtcgccgcttccgcatgttccatcacctgcgccgccgattgcccgctgcggaacgaacagatgccgatatgcatcatatcgtcgcgatcgaggatacgcgttggaggcagcgcatccatcgccttcagcaacaggccggcgatactatccgcctctttcaacgtacggtgcggcagcagcacggcgaagtcgctacggtgatagcgcgccaacagcgcgccggggtaacgcataataaaggtagagagcaggttgataagcgtaaagtaatgttcttcggccgccgcccgtccccagttgtcccgtagcagatcaaactccggcagacggatcatcatcacgatgccgtaggttcccaccttctcctggtcttccagcagcgtggccagctgattgtcaaaaaacaggcggttattcagtccggttttcgaatcctgcgccgcgtaggagcgaataagcgtatccatccggctgcgctgatcgctggcgaactgcagctccgacagcagcatatccagcgcgctactggtgctggccggccattcatagaccgacccgcgcacctgcggcccgcgctcgccgctcaggatacgcgtggaacgcagctccagcagctcctggccggccagctggcggcggatccagcggacggcgaagaaaataattaccaccatgaagccaatggagatcgacagcggggcagtgatcgacagcgaacggaaatagttcaccatcgggtcaacgtagaccagatgcagcgtaataccaggatgtttaagcgactgaaccgtgatctcacggaattgctcatggctgccgagcgggcgatagctatcgggtcgggaatggctgtagagcggtttgccgttgagcatgaaatcgatatgcacgatctcgatcggcgtcatcagctcatccaactgcggttcaagcttatcgaaagaggtggtgatgagccggttatccagcatggtcgccaccgcctgaacgcggttttcgaccttgttctcaatgccgttataaaaactcagcgaagcgccaatcagcgtgacaaagatggtcaggctagttagcagcgtaataaaggctgagaacttcgtcgttaatcgcatccctgtgttaactccgcgagtgaatgactacccgatgaaccatcaggctcccgtgccggcgcgcaccttgccgcaagcattaaccttttaaagcgcgacgcatactatcaaagatggcgagtctggcaatggaatgcgtattatcggtaaaagtatgccgatagcgagtatagtttgcagaaaaaatttgccaatcgtcgcccgcctgcggcctgcgccagaagcgctttaattttagacgcaggatggcaaccccgcgccggcggcgcaaattattaccggtttaccgtttggcctgcttgccgccctctttttccctgctaaagatgccgggtcatgcgcggtaaaggaaacgtcttgcgccactttccgatgattcctggacgaccgcgcctctgcttcggcggcggctcctcatcctaatgtgcaatttttcgtgacatattcgccattcatcgccgtctccgtcatgcttaggaaaacgcatgacggaggacaccatgaaaagaaaaaaactgacggaagccgacgtcacggccgaatccgtttttatgctcaagcggcgccaggtgctgaaaatgctgggtatcagcgcgacggcgctttcgcttcccgccgccgcgcaggccgatctgctggactggtttaaaggaaatgaccgcccgccggccccggcgggcaaggccctggagtttgctaaacccgccgagtggcaggctaatctgacgcttaccccggaagataaggtcgccggttacaataatttttatgaattcggcctcgataaagccgatccggcggcgaacgcgggtagcctgcgcaccgatccctggacgctcaccatcggtggcgaagtggcgaaacctctgacccttgaccatgacgatctgaccaaacgcttcccgctggaagagcgcatttatcgtatgcgctgtgtggaagcctggtcgatggtggtcccctgggtcggcttcccgctgcataaactgctggcgctggtggagcccaccagcagcgcgcgctatgtggccttcaaaaccctctatgctccggatcaaatgcccggccagaaagaccggtttatcggcggggggctcgcttacccttacgtggaggggctacggctggatgaagcgatgcacccgctgacgctactcaccgtcggggtgtatggcaaagcgctgccgccgcaaaacggcgcgccggtccgcctgaccgtgccgtggaagtacggttttaaaggcataaaatccattgttagtatcgagctgacccgcgagcggccgccaaccacctggaacctggcggcgccggacgaatacggcttcttcgctaacgtcaatccgcacgtcgatcacccccgctggtcgcaggctagcgagcggtttatcggcgccggcggcgtgctcgatgtgaagcgtcaaccgacgttgctgtttaatggctatgccgacgaagtggcgtcgctgtatcgcggcatgaatctgcgggagaacttctagtgcgtttcaccgtcaaacagatcgtctggctgaagattttacttcaccttgcggggtttttgccgctggtctggttattctgggccgggcaccagggctactttagcgccgatccagccaaggatatccagcactttaccggcagaatggcgcttaagtttctgctggcgacgctgctggtctctccgctggcgcgctatgcgaagcagccattattgattcgcgttcgtcgcctgttaggtttatggtgttttgcctgggcgacgctgcacctgaccagctataccctactggagctgggcattaacaatctggcgctgctgggctcggagattatcacccgcccctatctgacattgggcatgatcagctgggcgattctgctggcgctggcggtgacctccacgcaagcgatgcagcgaaaactggggcgtcgctggcaacttttacacaacttcgtctatctggtggcgatcctcgcgccgatacactacctgtggtcagtgaagatcgtctcgccgcagcccgttatatatgccctgctggcagcggggctattgacatggcgttacaagaagttccgccagtggtggcgcgcaatccggtaatgtgcagtttcccgcagatcctttatcaaccgcgactctttttcagatagcggttgataatcttccctgataagaccagtatttagctgccaattgctacgaaatcgttataatgtgcgactttggttttcctgacggggttttctgaccctgaaaaggtgacaagggcgcattgaaggtatatgttgttttttacccgaaaatggcaggagatcgccacacaatggcagtgaagtttcacattttgcttttgaatggtccaaacattaacatgctcggtacccgcgagcctgagaagtatggccctctcacgctggctgaaattgttaaccgtttaacatctgaagcggcggcgctgaatgtgagtctggatcacctgcagtccaacgcggagcatgcgttaatcgaccgaattcatcaggctaaagacaacgtggactatatcctgattaatccggccgcgttcacgcataccagcgtagcaatccgtgacgctttgctcgccgtgaacatcccgtttatcgagattcacctgagcaatgtgcatgcacgcgaacccttccgccagcactcgtatctgtcagatgtcgccgctggcgtcatttgcgggctgggggcggatggttattcatacgctttacagacggcggtaaaacgcctgtcacaatcacactaaacaaagagtacggaacccactcatggatattcgtaagattaaaaaactgatcgagctggttgaagaatcaggtatctccgaactggaaatttctgaaggcgaagagtctgttcgcatcagccgctctgcaccggccgcaagctatccggttatgcagcaggcttatgctgcgccgatgatgcagcctcaggcgcctgccgccgcgactgccgcaccagctgctgcggctgaagcgccggcgaaagcggaaatcagtggtcacatcgtacgttccccgatggttggtactttctatcgtacgccgagcccggacgcgaaagcgtttgtggaagttggccagaaagttaacgtgggcgacaccctgtgcatcgtcgaagcgatgaaaatgatgaaccagatcgaagccgacaaagccggcgtggtgaaagccattctgatcgaaagcggccaaccagtagaattcgacgagccgctggtagttatcgagtaacgaggcgaacatgctggataaaattgtcatcgctaaccgtggcgagatcgcactgcgcatcctgcgtgcctgtaaagaactgggcatcaagactgtcgctgtgcactccactgcggatcgcgatctaaaacacgtattgttagcggatgagacggtctgcatcggtccggctccgtccgtaaaaagctatctgaacattccggccattatcagcgccgctgagatcactggcgcggtagcgattcacccgggttatggcttcctctctgagaacgctaattttgctgagcaggttgagcgttccggtttcatcttcatcggcccgaaagccgacactatccgcctgatgggcgacaaagtgtccgccatcaccgccatgaagaaagctggcgttccgaccgttccaggttctgatggcccgctgggcgacgacatggacgctaaccgcgcccatgccaaacgcatcggctatccggtgatcatcaaagcctccggcggcggcggcggtcgcggtatgcgcgttgtacgtagcgacgctgaactggcgcaatccatctccatgaccaaagcggaagccaaagcggctttcaacaacgacatggtctacatggagaaatacctggaaaacccacgccacattgaaattcaggtgctggcggatggtcagggtaacgcgatctatctggctgaacgcgactgctccatgcagcgccgtcatcagaaagtggtcgaagaagcgccggcgccgggcatcaccccggaactgcgtcgctacatcggcgagcgttgcgcgaaagcctgtgtggatatcggctaccgcggggcgggtacctttgagttcctgttcgaaaacggcgagttctacttcattgaaatgaacacccgtatccaggtagagcatccggtaactgaaatgatcaccggcgttgacctgatcaaagagcagctgcgtatcgcagccggccagccgctgtctatcaagcaggatgaagtggtggttcgcggccatgcggtggaatgccgtatcaacgccgaagacccgaacaccttcctgccgagcccgggcaaaatcacccgtttccacgcgccgggtggctttggcgtgcgctgggagtcacatatttacgccggttacaccgtaccgccgtactatgactccatgatcggtaaactgatctgctacggcgaaagccgtgacgtggcgattgcccgcatgaagaatgcgctgcaggagctgatcatcgatggcatcaaaaccaacgtcgatctgcagatgcgcattatgagcgacgagaatttccagcatggtggcaccaatatccactatctggagaaaaaactcggcttgcaggaaaaataattctgctctctcagcaaaaggccgggtaaaccggccttttttctttttctctctcctcatctataccatgcggtacaatccccgctttcttcatcctcaagggacaaaaaatggacaaacgctttgttcaggcccacaaagaagcgcgctgggcgctgtggctgacccttctctaccttgccgcctggctggccgccgcctatttgccgggggtggctattggctttaccggcctgccacactggtttgaaatggcctgcctgctggtaccgctgctgttcattctgctgtgctgggcgatggtcaaactgattttccgcgatatttctctggaggacgatgatgcagtttgaggtcattattcccctgatcgcctacctggtggtggtgttcggtttatccctctacgccatgagaaaacgcgcctcaggtagctttcttaatgagtactttctcggcagccgctcgatgggcggcttcgtgctggccatgacgctaaccgccacctatatcagcgccagctcatttatcggcggacccggcgccgcctataaatacggcctgggctgggtgctgctggcgatgatccagctccccgccatctggctgtcgctgggcgtgctggggaaaaaattcgccatccttgcgcgtcgctataatgctgtcaccctcaatgacatgctgtttgcgcgctatcagagtcgcctgctggtctggctggccagcctgggtctgctggtggcctttgtcggcgccatgaccgtccagtttatcggcggcgcccgcctgctggagacggctgccggtattccttacgataccggcctgctgatcttcggggtcagcatcgcgctgtataccgcctatggcggctttcgcgccagcgtgctcaacgacacgatgcagggcatggtaatgctgatcggcacgatcgtgctgctggtgggcgtgatccacgccgccgggggggttggccatgcggtagagacgctgcaggcgatcgacgtcaagctggtgtccccgcagggcgcggaggatatcctctcgccaacctttatggcctcgttttgggtactggtctgcttcggcgttattggtctgccacataccgcagtgcgctgtatctcctacaaagacagcaaagccgtgcatcgcggcatcattatcggcaccatcgtggtggcgatcctgatgtttggcatgcatctggctggggcattaggccgggcggtgatccccgatttaaccgtgccggatctggtgatcccgacgctgatggttaaagtgcttccgccctttgccgccgggatcttccttgccgcgccgatggcggcgattatgtcgacgatcaatgcccaacttctgcaaagttccgctacgatcatcaaagatctgtacctgaactggcggccggatcaggcgactaacgaaaagcggcttaaacgcatgtccgccggcatcacgctcctgctgggggtcttgttgctgctcgcggcctggcggccgccggagatgataatctggctgaacctgctggccttcggcggcctggaagccgtcttcctgtggccgctggtgctgggcctttactgggaacgcgccaacgcggctggcgcgctgagcgccatgatcgtaggcggcgtcctgtatgccgtactggccacgctgaaagtgcagtttctgggctttcacccgatcgttcccgcgctgctgctgagtttgctggcgtttgtggcggggaaccgtttcggtcgtcccgccccacagtcccccattttgactactgataaataaagagttttgctatgccatggatccaactgaaactaaataccaccggcgcgaacgctgaagatcttagcgatgcgctgatggaggccggatcggtctcgatcaccttccaggatacgcacgatacgccggtatttgagccattgcccggggaaacccgcctgtggggggataccgacgtaatcggcctgttcgatgctgaaaccgatatgaaagcggtcgttgcccaactggagcagcatccgctgctgggcgccgggttcgcgcataagatcgagcaactggaagataaagactgggaacgggaatggatggataacttccaccccatgcgcttcggggagcggctatggatctgcccaagctggcgcgatgttccggatgaaaatgccgtcaacgtgatgctcgatccgggtctggcctttggcaccggtacgcatccgacgacatccttgtgtctgcagtggctggatggactcgacctcaacggaaaaacggtgattgatttcggctgcggctccggcatcctggcgattgccgcactgaagctgggggcggcaaaagcaatcgggattgatatcgacccgcaggctattcaggccagtcgtgataacgcgcagcgtaacggcgtttctgaacgcctggagctctatcttcctcaggaccaaccggagtcgatgaaagccgacgtggtggtcgcgaatatcctggcaggcccgttacgtgagctggcgccgttaatcagcgtcctgcccgtttcaggcggtttgctggggctttccggcatccttgccagccaggcggagagcgtctgtgaagcctatgccgatctcttcgcccttgacccggtggtcgagaaggaagagtggtgccggattaccggccggaaaaactaagcgcgatgcggcctacgggccgcatttttgtttccagtagccaccaaataatgccaggaaatgagaggcagatcgcactacagagcacttttttggctacaaaaacagcgttttatatcgccatgcggccagtttatccaagaaaaatcgagaagttttatgattttataaatggacacaaattatccatcatccattaaatcaatgattaatataagtatttattcatcccttttacgctagtcccggattcattgatctgcaacagaggattgctcaaagtttggcctttcatctcgtgcaaaaaatgcgtaatatacgccgccttgcagtcacagtatggtcatttcttaactcatgcgcatcggacaccaccagctcagaaatcgcctgatcgcagcgcccatggctggcattactgacagaccattccggacgctgtgctacgagatgggagcgggtttaaccgtttccgagatgatgtcttctaacccacaggtgtgggagagcgacaagtcccgtttacggatggtgcatatcgatgagcccggtattcgtaccgtgcaaatcgccggtagcgtgccggaagagatggctgccgccgcgcggattaacgtggaaagcggcgcccagattattgatatcaatatgggatgcccggcgaaaaaggtgaatcgcaagcttgcaggttcagccctcttgcagtaccccgaccaggtgaagtcgatcctgacggcggtcgttaacgcggtggacgttcctgtgactctcaagattcgcaccggttgggaaccggaacaccgtaactgcgtagagattgcccaactggccgaagagtgtggcattcaggctctgactattcacggacgcacccgcgcctgtttgtttaacggagacgctgagtacgacagtattcgggcagttaagcagaaagtttccattccgattatcgcgaatggcgacattactgacccgcttaaagccagagctgtgctcgactatacaggggctgatgccctgatgataggccgtgcagctcagggaagaccctggatctttcgggaaatccagcattatctggacactggagagctgctgcccccgctgccgctggcagaggtgaagcgcttgctttgtgcgcacgttcgggagttgcatgacttttatggtcaggcaaaagggtaccgaatcgcgcgtaaacacgtctcctggtatcttcaggaacatgctccagatgaccagtttcggcgcacattcaacgccattgaggatgccagcgaacagctggaggcgttggaggcatacttcgaaaattttgcgtaatagaaataaagagctgacagaactatgttcgaacaacgcgtaaattctgacgtactgaccgtttctaccgttaactctcaggatcaggtaactcaaaagcccctgcgtgactcggttaaacaggcactgaagaactattttgctcaactgaacggtcaggatgtgaatgacctgtatgagctggtactggctgaagttgaacagcccctgttggacatggtgatgcaatacacccgtggtaaccagacccgcgctgctctgatgatgggcatcaaccgcggtacgctgcgtaaaaaactgaaaaaatacggcatgaactgatactagtcagttgcttgcttgatataaaaggcgctcttcggcatggggaagcgccttttttattatctgcgccaacagacctcattactgattcaccagccgtagcgcaggccctcccgataaacgcgcagcacagaccaccgccattatattatccaccagcgcaggcgcctgctgataaagatcgaagcgttgcggatcgagcagccagtttttaatcagcccggaaaaagcactgtgtaaaacaattaatatcatctcaatgtttgtttcggctggcaatatattgttacgcacgcagcactgcaggatgccgccaatgagtgaataattaaaaccaatacgttggcgaatttcgtattccgaaagcatatcactggaaaactcacagcgctgataaagaatttgcatcagagcgcgctgtcgaggattcgcagcaatatagcgcaggcctgcaataaaccgctcgcgtaaagcatttagcggctcatgttcgtactctatggcctgactgggctgaatcaaatctctaagcggcggctgctgctgccacatttcattaaacagctccgtcttactggcaaaatgccagtacaccgcgccgcgagtcactcccgccgcatcggcgatatccgtcagggtggtgttggttactccgcgcagggcgaactgctggattgcggactcaatcaggagctgccgcgtgcgctgcgcctcttcttttgtttttcttgccatacaaggccccacttcccgataagcagatcatataggatattcttaattagaattaatctagcatttgccatgaagtattatttagcaaaaatgcagacaagttaatcctgatgcgaaaagagaattaattattcaagtgaatatcaccggaaaatacattcactgaaataatgtctatttatcaacttttacaattgcgataaatcgcaatactacagtgaccatttttttgtttttgcgtgccttgctgattgcttaaaaataagtatctcttacatccaacggcgtttatttgtaggatggcaaactgctttttgattccctctttctttcacagattcgccgcctgattgggtacgtaatctataaggaaccgccatgacgactcacgccagagtgacacttttatccggtttaattatctcggccttattgctaaccggttgcgataattctgacaaccagcaaccccatgcgcaggcgccgcaggtgacggtccatgtcgtgaacagcgcgccgctatcagtcaccaccgaactgccgggccgaacctctgcttttcgcgtagcggaagtccgcccccaggtgagcggtatcattctgaagcgtaactttgttgaaggaagtgatgtcgaagcaggccagtcgctctatcagatcgatccggcgacctaccaggcggcgtggaacagcgccaaaggcgatgaggccaaagccgaagccgcggccgctatcgcccatttgacggtgaaacgctacgttccactgctgggtactaaatatatcagccagcaggaatacgatcaggcagtggccaccgcccgccaggccgatgccgatgtcatcgccaccaaagctgccgtagaaacggcccgtatcaacctggcctacaccaaagtaacctcccccatgagcgggcgcatcggtaaatcgagcgtcaccgaaggggcgctggtcaccaacggccaatcggatgccctggctaccgtccagcagctcgatcccatctatgttgacgtgacggagtccagtaatgacttcatgcgccttaagcaggaaagcctgcagcgcggcggtgatactaaaagcgttgagctggtcatggagaacggccaggcctatccgctcaaaggttcactgcagttttctgacgtcactgttgatgaaagtacgggctcaattactctgcgcgctatcttccctaacccgcagcatgtcctgctgccagggatgttcgtccgcgcccgcatagacgaaggcgtcgatccgcaggctatcctggtaccgcagcaaggggtgacccgcacgccgcgtggtgatgcctccgtgatgctggtgaatgacaaaaaccaggttgaaacccgggaagtggtcgcgactcaggccgttggcgataagtggcttatcaccagtgggctgaagccgggcgataaagtgattgtcagcggcttacagaaagtccgtccaggcgtcactgtcaaagcggaagcggagcgtgcggcgccggccgtgcaataaggatacccagccatgtctaagttttttattcatcgaccggtcttcgcctgggtgctggccatcattatgatgattgccggcggcctggccatcctgcagctgccgatagctcagtacccgacaatcgcccctcctgcggtcgcgatctccgccacctaccccggtgcagatgcccagaccgtacaggataccgtcacccaggttatcgagcagaatatgaacggcatcgacaacctgatgtatatgtcgtcgaccagcgactctgccggttcggtaaccattacgctcacctttaaatcgggtaccgatcccgatattgcccaggtacaggtgcaaaacaaactgcagctggccacgccgctgctgccccaggaagtacagcagcaagggattagcgtcgagaaatccagtagcagcttcctgttggtcgccggctttatctctgataacccgaccaccacccaggacgatatttctgactatgttgcctccaatgtcaaagatcctattagccgcctcaacggcgtgggcgatgtgcagctgttcggcgcgcagtacgctatgcgcgtctggctggatggcaacctgctgaataaatacaacctgacgccggtggacgtcatcaatgcgctgcaggtccagaacgatcagatcgccgcgggtcagctcggcggtacgccagcgctgaaaggccagcagttgaacgcgtcaatcatcgctcagacgcggctcaaagatccgcaggagtttggcaaggtcacgctgcgggtcaacgccgatggctctgtcgtccatctgaaagacgtcgcccgcattgagctggggggagagaactataacgttgtcgccagaattaacggtaaacctgcctctggtctgggtattaagcttgcgaccggcgccaacgccctggataccgccaccgcgattaaagcgaagctggccgagctgcagccctacttccctcaggggatgaaggtggtttatccgtatgatacgacccctttcgtcaaaatctccattcacgaagtggtcaaaacgctttttgaagcaattattctcgtctttcttgtcatgtatctgttcctgcagaacatgcgcgcaacgctcattccaaccattgccgtacccgtggtgctgttgggaaccttcgcggtattgtcgatgtttggctactccatcaacacgctgacaatgtttggcatggtgttggcgataggtctgctggtcgatgacgctatcgtagtagtggaaaacgtcgaacgtgtgatggttgaggagaagctctcgccaaaagaagcgacggaaaaatctatgtcgcagatccagggagcgctggtgggtatcgccatggtgctctccgcagtatttgtcccgatggcctttttcggcggctcaaccggcgcgatttatcgtcagttttcaatcaccatcgtctccgccatggcgctctccgtgctggttgcgctggtactgactccggcgctctgcgccacgttgttgaagccagcctcagctgaacaccatgagaaaaaaggatttttcggctggtttaacgcccgcttcgaccagagcgttaaccactataccaacagcgtcagcggtattttacgtggaactggccgttatctggtgatctacctgctgatcgtcgtggggatggccgtgctgttcatgcgcttgcccacgtcctttctgcccgacgaagaccagggcgtcttcctgaccatgatccagctgccgtccggtgctacccaggagcgcacgcagaaggtcctggatacggtgacagactactacctgcataacgagaaggccaacgtcgaaagcgtctttaccgttaacggcttcagcttcagcggccagggacaaaactccggtatggcgtttgtcagcctgaagccctgggaagcgcgcagcggcgatgaaaacagcgtggagtccatcatcaagcgggccaccgtagcctttagccagatcaaagacgccatggttttcccgttcaacatgccagccattattgagctgggtaccgccaccggcttcgactttgaactgatcgaccagggcggactcggtcataccgctctgacccaggcgcgcaatcaactgctgggcatggtgaaacagcatccggatcagctggttcgggtacgccctaatgggcttgaagatacccctcagttcaaactggatgtcgatcaggaaaaagcgcaggcgctgggcgtatcgctctccgatatcaatgaaacgatatcagccgcgctgggcggatactacgtcaatgactttattgaccgcggccgcgtgaaaaaagtgtacgttcaggctgatgcccacttccgtatgctgccgagcgacattaacaacatgtatgttcgtagcgccaacggcgaaatggtgccgttctccacctttgtcacttcacgctggatatatggctcgccgcgcctggagcgctacaacgggttgccatctatggagatcctcggtgaagcttcgccaggcaaaagtaccggggaagccatggcgctgatggaaacgctggccagtaaactgccgagcggcatcggttatgactggaccgggatgtcttaccaggaacggctctccggcaaccaggcgcctgcgctctatgccatctcgctgatcgtcgtcttcctgtgtctggcggcgctgtatgagagctggtcgatccccttctcagtcatgttagtggttccgctgggggtcattggcgcgctgttagccgccacgctgcgtgggctaaataatgacgtttacttccaggtcggactcttgaccacgatcggtttgtcggccaagaatgcgatcctgatcgtcgagttcgccaaggatctgatggagaaagaagggaaagggatcattgaggccacgctggaggcatcgcggatgcgcctgcggcctattctgatgacctctctggcctttattctcggggtcatgccgctggtgattagccatggtgccggcagcggggcgcagaatgcggttggcaccggcgtgatgggcgggatgctgaccgcgacgctgctggcaatcttctttgttccggtgttcttcgtggtcgttagacgacgctttacccggcacgctgaataactcggctatgtcttgaaggcgccccttgcgggcgctttttttcgcatgcaatattggcagccagctaaacgcgccacagtctggcaaccgccatcgcacgcagcatcgctgaatcacaatctttctctccatcttttctgcatattcccgggcttatcttcacgatatttacgcggctcatatattgagatgatttcggcctccggcccggacaatccgcggtgataaaataagccattccgttctgcactggctttcagtacaacccagcggattatccagaggtaatatcatgaaaaagtatttaatcgtggcgctgctggcctctctgctggcaggctgtgcccatgactctccctgcgtaccggtttatgactcgcaaggccgcttagtccataccaatacctgtatgaaaggcacaacagaagacaactgggaaaccgcaggcgcaatcgccgggggtgcggccgcggtagccggcctcacgttagggatcgttgctctgacccgctagatcgcttccccaaccgcagatacaggtgtatcccctgtatctgctccactccattccccaaagtaagcgatcattcaggctcttcctgacgatagttcgccagctttcttagccgttgttgttgccagagaccgctggcaatgagtcgtccatcgctatcggcaaacttttcagattcagggttcagaaccaacaaacaccaaaggcccggtcgaagagcgggcctttactctgatggtgagcaatgatggcgaacgtcctttccctctctccgggccgttgctgcgcaatgttcatatcgatgccagttagattttccctgggcagcaaagaagctcatcggcaaacaacagataacacaaaagcaaaaggcccagtctttcgactgggccttttgctttatttgatgcctggcgattccctactctcacatggggagaccccacactaccatcggcgctacgacgtttcacttctgagttcggcatggggtcaggtgggaccgccgcgctattgtcgccaggcaaattctttacaacgtgccgaactttaacctaaaaagtggtgctgatacccagagtcgaactggggacctcacccttaccaagggtgcgctctaccaactgagccatatcagcacgctaaatttgatgcctggcagttccctactctcacatggggagaccccacactaccatcggcgctacggcgtttcacttctgagttcggcatggggtcaggtgggaccaccgcgctagtgccgccaggcaaattctgttttatcaatacgtctcaccgacgtatcgattaatctgtatcagagctgaaaattctctcaa

SEQ ID NO: 129 - DNA, 291710 bp, Unknown
  source: /note="Description of Unknown: MKP2_2161_1 Mutant Bacteria sequence"
ttgagagaattttcagctctgatacagattaatcgatacgttggtgaaacgtgttgataaaacagaatttgcctggcggcactagcgcggtggtcccacctgaccccatgccgaactcagaagtgaaacgccgtagcgccgatggtagtgtggggtctccccatgtgagagtagggaactgccaggcatcaaataaagcagaaagcccggtcgaaagaccgggctttttgtttttgcgtttaaaaagaaccccgtcccgaaaggtgcgggtttttttgctgtgtggggtatatctcccccggtggcgctgcgcttaccggggctacggatcctcggccacctgctggccgaggggacatcaatgccgcaaagttaccgacgtcaatcgtagtctgcttcagcctgctgctcatacatcaaattcaataacggatacggttgccccagatcgtccgtttcagagcgccctgtcaccctaaaacccatcttctgataaaacccgaccgcttgttcattctgctcatttacattggtcgtcagcttcggcgttaacgacagcgcatgctcaatcagcaacttccccacgccacagccgcggacatccggatcgacgaacagcgcatccatatgatctccggtcagcagcataaaggcgatcggctggtcttccgtattaaccgccacccacagcggagcctccggtaaaaatgcgcgtaccatctcctccaactcctttcgatacgcttttgtcagaaaatcatgcgtggcgtcgaccgaccgacaccagatcgcagtcagtttatccccttcatcaggccgggaacggcggatgttaataaccatactttctccttttctacattcttatattctaactcaacaagcgccgtgaaattttctcaccgtgtacatgcagactcgacattcacccgattcctggttatcttcagctatctggatgtctaaacgtttatacgtatgctatgaggtaatacagttatgccaattcgggtgcaggacgagctgccagccgtcaatttcttgcgcaatgaaaacgtcttcgtaatgacgacaacacgtgcaacgactcaggaaatccgccccctgaaggtgttaatcctcaacctgatgccgaagaaaatcgagacggaaaatcagttcctgcgtctgctatcaaactctccgctgcaggtggatatccagttattacgtatcgatgcgcgcgagtcgcgtaatacccctgcggagcatctgaataacttttactgtaatttcgatgagatctgcgatcagaactttgacggcctgattgttaccggcgctcctttaggcctggttgagtttaacgatgttgcttactggccgcagatcaaacaggtgctggagtgggccaaggatcacgtcacttcgacgctgttcgtctgttgggcggttcaggccgcgctgaacattctgtacggcattcccaagcagacccgcgccgaaaagatttccggcgtctatgaacaccatattcttcatccgcacgccttactgacccgcggtttcgacgactctttcctggccccgcactcacgctatgctgattttccggccggacttattcgcgactataccgatcttgagatcctcgcggagacggaagagggcgatgcgtatttgttcgccagcaaagataagcgcatcgcctttgtcaccggccacccggagtacgatgccaataccctggcaagtgaatatttccgcgatgtggaagccggtttgaaccctgagatacctcataactatttcccacaaaacgacccgcagaacaaaccgcgcgccacctggcgcagccacggcaatctgctgttcgctaactggcttaactattacgtctaccagattacgccatacgatctgcgtcatatgaatccgacgctggaataatactctatgtgagacgatcctaaagcgtttcagcattttgcctctggcaccttcgggtgccttttttatttccgaaattcacttcatacgcgaggataactttaatttcattgttatcaatgtgttaatgataaattaaaattaaaatggaaattgtttttgattttggaaattaattgagtagtcttaattgtgctgagcgaaaactgcacaacgatctttcgctcgcttccagcggatcaaccaagaggagcagcacaatgacgcagcaggcgacaatcaccgatgaactggcctttagtcagccctatggcgagcaggagaagcagatcttaacgcctgaggcggtagaatttctgacggaactggtgagccgctttacgccggcgcgcaataagctgctggccgcgcgtttgcagcaacagcaggctattgacgacgggcagcttccggattttatttcggaaactgcttccattagaaatggcgactggactattcgcggtatcccggctgatttgcaggatcgccgcgtggaaatcaccggccccgtcgagcgcaagatggtcattaacgcgctgaatgccaacgtcaaagtctttatggcggactttgaggattcgctggcgcctgactggcgcaaagtcattgatggtcaaatcaacctgcgcgatgccgtgaacggaaccatcagctacaccaacgaggccggcaaaatctatcagttgcagcccaatcccgctgtgctggtatgccgtgtgcgcggcctgcatctgccggaaaagcatgtgacctggcgtcatgaggccatccccgggagcctgttcgattttgcgctctatttctttcataactaccaggcgctgctggcgaaaggaagtggtccctacttctatctgccaaaaacacaggcctggcaggaggcggcatggtggaacgatgtcttcagttttacggaagatcgctttgacctgccgcggggcaccatcaaggccacgctgctgattgagacgctgccagcggtgttccagatggatgagatcctgcatgcgctgcgcgaccatattgttggcctgaactgcggccgctgggattacatcttcagctatatcaagacgctgaaaaaccatccggatcgcgtactgccggaccggcaggtggtgacgatggacaaacccttcctcagcgcctactcacgcttgttgattaagacctgccataaacgcggcgcgtttgcgatgggcggtatggcggcgtttatcccgagcaaagataccgaacgtaaccgccaggtgctgagtaaagtcaccgccgataaagagctggaggccaacaacggtcacgatgggacctggatcgcccacccgggcctggcggataccgccatggcggtgtttgaccgcgtgctgggcgataagccgaatcagctctcggtcacccggagcgaggatgcgccaattaccgctgaacaactgctggctccctgcgagggcgaacgcacggaagccggaatgcgcgccaacattcgcgtggcggtgcagtacatcgaagcgtggatctccggcaacggctgcgtaccgatttatggcctgatggaagacgccgcaacggccgagatctcgcgcacctctatctggcagtggatccatcatcagaaaaccctgaacgacggcaccccggtcactaaggcgctgtttcgccagtggctggcggaagagctgatggtgattcaggaggagctgggagagcaccgcttcagccacggccgctttgacgatgcggcgcgactgatggagcagatcaccacctccgacgagctaattgattttctgacattgccgggctaccgcctgctggcctaatcgccagatggtgtggttcgccatttagtccttcacctatgagcctggggagccaggaaattatatggagcatctgcacatgaaaacccgtacccaacaaatcgaagaattaaacaaagaatggacgaacccgcgctgggaaggcattacccgtccctacagcgcggaagaggtggtgaagttacgcggctcggtgaatccggaatgcacgctggcgcagcttggcgcggcgaaactgtggcgtctgctgcacggggaggcgaaaaaagggtacgtcaacagtctcggcgcgctgaccggcggccaggccttgcagcaggcgaaggcgggtatcgaagccatttatctctccggctggcaggtggcggcggatgctaacctggcgtccagcatgtatccggatcaatcgctgtatccggccaactcggtaccggcggtggtggatcggatcaacaacaccttccgccgcgccgatcagatccagtggtcagcgggaattgaaccgaacgatccgcgctttatcgactacttcctgccgatcgtggcggatgcggaggccggttttggcggcgtcctgaacgcctttgagctgatgaaatcgatgattgaagccggtgcagcggctgttcacttcgaagatcagctggcatcggtgaagaagtgcggccatatgggcggtaaagtgctggttccgactcaggaggcgattcagaagctggtggcggcgcgtctggcggccgacgtgatgggggtcccgacgctggtcatcgcccgcaccgatgccgacgccgcggatttaattacctcagactgcgatccgtacgatcgtgagtttattaccggggatcgcaccagcgaagggttcttccgcacccacgccgggatcgagcaggcgatcagccgcgggctggcctacgcgccgtatgcggatctggtgtggtgtgaaacgtcgaaaccggatctcgagcaggcgcgccgctttgccgaggctatccatgcgcgtttcccgggcaaactgctggcctataactgctcgccgtcgtttaactggaagaaaaatctcgatgataaaaccatcgccagcttccagcagcagctgtcggacatgggatacaaataccagtttattaccctcgcggggatccacagcatgtggttcaacatgttcgacctcgcccatgcctacgctcagggtgaggggatgcgccactatgttgagaaagtgcagcagccggaattcgccgccggtccggaaggctacaccttcgtctcgcatcagcaggaggtgggcaccggctacttcgacaaggtcaccaccattatccagggtggcacctcgtcggtaacggcgctgaccggctcgaccgaagaagatcagttttaagccatgcccggtggcgcgacgctgaccgggcctgcaagaggacgcaggccggataagcgagcgcgccatccggcatgacgtggcgccggatgggggaaagcgatgacgcgtggtctggaattactgattgcccaaacgatattgcagggatttgacgcgcagtatgggcgttttcttgaagtcacttccggcgcgcagcagcgctttgaacaggctgactggcacgccgtgcagcaggcgatgaagcagcggatccatctctacgatcaccacgtgggcctggtagtagagcagctgcgctgcatcaccgaagggaaaagcaccgacgtcgattttcttctgcgggtgaaacagcagtacacccaacttttaccggattaccctcgctttgaaattgctgagagctttttcaattcggtctactgccgcctgtttgaccaccgctcgctgacccccgagcggctctttattttcagctcgcagcccgagcgaccctttcgtaccctcccgcgaccgctggcgaaagatttctttccggaacgcggttggtcgcacctgctgggtaaagtactgtccgatctgccgctgcggctaccgtggcaaaacaaagcgcgggatatcggctatatcattgccagtctgcaggaggcgctgggggaggaactgctcgccacctgtcatctgcaggtcgccaatgagctgttctaccgcaataaagccgcctggctggtgggcaaactggtcatgccgatggcgacgctgccttttttgctgccgatccaccgcagcgaagagggtgagctgtttgttgacacctgcctcacaacccatgccgaagcgagtatcgtttttggcttcgcgcgttcctattttatggtttatgcgccgttgcccggcgccctggtggaatggctgcgcgagatcttgccgggtaaaacgacggccgagctgtacatggcgattggctgtcagaagcacgccaaaaccgaaagctatcgcgaatatctacactacattactcgctgcgatgagcagtttattgaagcgccgggtattcgcgggatggtgatgctggtgtttaccctgccgggctttgaccgggtgtttaaggtgatcaaggaccgcttcgcgccgcagaaagagatgaccgccgcccatgtgcgggcttgctatcagctggtaaaggagcatgaccgcgtcgggcggatggcggacacccaggagtttgaaaatttcgtgctggataaacggcaaatcgcgccggcgctgctggcgctgctgcaggcggaagcggggaacaaactcaccgatctcggcgaccgcatcgtcatcagccatctctatattgaacggcgaatggtgccgctcaacctgtggctggagcaggttaacggccaggcattgcgtgatgcggtagaagagtatggcaatgctatccgccagctggccgccgccaacatctttcccggcgatatgttatttaaaaacttcggcgtcacccgccatggccgggtggtgttctacgactatgatgaaatctgctatatgacggaagtgaattttcgcgagatcccgccgccgcgctatccggaggatgagctggccagcgagccgtggtacagcgtttcgcctggcgatgtgtttccggaggagttccgccactggctgtgcgccgacccgcgcattgggccactgtttgaagagatgcatgccgacctgctgcgcgccgactactggcgcgcactgcagatgcggattaaaaacggccatgtggaagatgtctacgcctaccggcgcaagcagcgttttagcgtgcgctatggcgccgacagtaggccggataaggcgtttacgccgccatccggcaaggtgcgccgatctgcctgatggcgctacgcttatcaggcctacttaaaatgcccctctggggcatttttttatttaaccccgccatacgccagcgtcacttccttcgccgccttgatcaccagcgcgcccagctcagtcacccgatcatcggtcatacgcgagatggggcctgagatggagattgccgcgaacggttcgcgatgttcatcgtaaatgcaggcggcgacgcagcgcaggccgagcgcgtgctcctcatcatcgaaagagtagccccgcttgcgggtctgggctaaatcttccttcagatgcagcggggagaccagcgtggcatgcgtataggcatgcagccctttacgatgcagcagactggtgacctgctcttcgctcagctgcgcgagaaacgccttcccggcgccggaagcgtgcatcggcagtttaccgccgattggcgccgacatccgcatcagctgggtgcactgcacctgatcgataatgatcgcctggtggtcgctctggtcgagcaccgctaaattcaccgtttcaccggaatcttccatcagctggcgcaggatcgggtggacaatggccagcagattgcggctttgtagaaagctgctgccgaccacgaaagcatgcgcccctacggcccagtgacccagctcgccaacctggcggacgaagcccagctgttgcatggtggtcagcagacggtgagtcgtggagttgggcagacccgcctgctgcgccagttcggtcagcgcgacgctgctgtgggactcggcaatccattcgagtaatttcaggccgcgggtcagcgactgaacctgaccgccagcctgctgggcagtggcagccgcgggttttctgccgcgtttcgcgggaatgggggtagtggccatcgcgaactcctttttctgtatcgtggaaataattttcgttttatttggcaataatgcaatcacaaccggactcatcggatgagtgaagctgaacatgtctcatattgcccgttgttgtcttttccgctccggtggtttatgccagtatggtttgttggctatttggcctgagtcgagcgttgtcgggagcaagtgtgagcagcaaagttgagcaactgcatcagcagttaaaagaacgtattctggttctggatgggggcatgggcaccatgatccagggctatcgtctgagtgagcaggactttcgcggtgagcgctttgctgactggccgtgcgacctgaaaggcaacaacgacctgctggtgctcagcaaacccgaagtgatccgcgagatccacgacgcctatttcgaggccggcgcggatatcattgagaccaacacctttaactcgacgaccatcgcgatggcggattaccagatggaatccctgtcggccgagatcaactttgccgcggcgaagctggcccgcgccagcgccgacgcctggacggcccgcacgccggaaaaaccgcgctatgtcgcgggcgtgcttggcccgaccaaccgcaccgcctctatctcgcctgatgtgaacgatcctgcgttccgtaatattacctttgaccagctggtggccgcctatcgcgaatccacccgggcgctggtggaaggcggcgtggatctgatcctgattgaaacggtgtttgacaccctgaacgctaaagcggccatctatgcggtgaaagaggagctggaggcgttaggcgttgacctgccgctgatgatctccgggaccattaccgatgcctctggccgcacgctttccggacagaccaccgaagccttttataactcgctgcgtcacgccgaagccttatcgtttggtctgaactgcgccctcgggccggacgagctgcggcagtacgtccaggagctgtcgcgcattgccgaatgctacgtcaccgcgcacccgaacgccggcctgcccaacgccttcggcgaatacgatctggacgccgacaccatggcgacgcaaattcgcgaatgggcggaagccggtttcctcaatatcgttggcggctgctgcggtaccaccccggagcatatcgccgccatgagccgggcggtagcgggcctgcagccgcgtcagttgccggaaattgcggtggcctgccgcctcgccggcctggagccgttgaatatcggcgacgatagcctgttcgttaacgtcggtgaacgaactaacgtcaccggctcggcgaaatttaagcggctgattaaagaagagaagtacagcgaagcgctggacgttgcgcgtcagcaggtggaaagcggcgcgcagattatcgatatcaacatggacgaggggatgctcgacgcggaagcggcgatggtgcgtttccttaacctgattgccggcgagccggacattgcccgcgtgccgatcatgattgactcctccaagtgggaagtcattgaaaagggcctgaaatgtattcagggcaaaggcatcgttaactcaatttcgatgaaagagggcgtcgaatcctttatccaccatgcgaaactggttcgccgctacggcgccgcggtggtggtgatggctttcgacgaggttggtcaggccgacacccgcgaacgtaaaattgagatttgccgtcgcgcctacaaaatcctcaccgaagaggtcggcttcccgccggaagatattatcttcgaccccaatatctttgccgtcgccaccggtatcgaagagcataacaactacgcacaggactttatcggcgcctgcgaagacatcaaacgcgagctgccgcatgcgctaatctccggcggggtctccaacgtctccttctccttccgcggtaatgacccggtacgtgaggcgatccacgccgtattcctctactacgcgatccgcaacggcatggacatggggatcgtcaacgccggtcagctggccatctatgatgacctcccgggcgagctgcgcgacgcggtcgaagacgtgatcctcaaccgccgcgatgacagtaccgaacggttacttgagctggcggaaaaatatcgcggcagcaaagcggacgacggcgcgaatgcccagcaggcggagtggcgcacctgggaagtgaaaaaacgcctcgaatattcgctggtgaagggcattaccgaatttatcgaacaggacaccgaagaagcgcgtcagcaggccgcccgcccgattgaggtcattgaagggccgctgatggacggcatgaacgtggtcggcgatctgttcggcgaaggcaaaatgttcctgccgcaggtggtgaaatccgcccgtgtaatgaaacaggcggtggcctaccttgagccgtttattgaagccagtaaagagcagggctccagtaacggcaaaatggtgattgccacggtaaaaggcgacgttcatgacattggcaaaaacatcgtcggcgtggtgctgcagtgcaataactacgaaatcatcgatcttggcgtgatggtcccggcggataaaattctcaaaacggccaaagaggtaaacgcggatctaattggtctttccgggctgattaccccatcgctggacgagatggttaacgtggcgaaagagatggagcgccagggctttaccatcccgctgctgataggcggcgcgactacctcgaaagcgcatacggcggtgaaaatcgagcagaactacagcggcccgaccgtttacgtacagaacgcctcgcgcaccgtcggcgtggtgtctgcgctgctttcggacacgcagcgcgacgagtttgtcgcccgcacgcgcaaagagtatgaaacggtgcgtatccagcatgggcgtaaaaaaccgcgtactccgccggtgacccttgccgccgcgcgggaaaacgatctggcctttgactgggaaagctacacgccgccggtggctcatcgtctgggagtacagacggtggaagccagtatcgagactctgcgcaactacatcgactggacgccgttcttcatgacctggtcgctggcgggtaaatatccgcgcattctggaagatgaagtggtaggggaagaggcgcagcgcctgttcaaagacgctaacgagctgctggataagctgagcgcagagaaaaccctgaacccgcgcggcgtggtgggtctgttcccggccaaccgcgtgggcgacgatattgaaatctatcgcgatgaaacccgcacccacgtgctgacggtgagccatcatctgcgccagcagacggagaaggttggcttcgccaactactgcctcgccgattttgtcgcgccgaagctgagcggcaaggcggactacatcggcgccttcgccgtgaccggcggcctggaagaggacgcgctggcggacgcctatgaagcgcagcatgatgactataacaagatcatgatcaaggccatcgccgatcgcctggcggaggcctttgccgagtatctgcatgagaaagtgcgcaaggtttactggggatatgcggccaatgagaacctcagcaatgaggagcttattcgcgagaactaccaagggatccgaccggcgccgggatatccggcctgtccggagcacaccgaaaaggggaccatctggcagctactggacgtcgaagcccataccggcatgaagctcaccgaatcgttcgccatgtggccgggcgcatcggtttccggctggtacttcagccatccggatagcaagtacttcgccgtggcgcagatccagcgcgatcaggtcgaagattacgcgctgcgtaaaggaatgacgccggcggaggtcgagcgctggttagcgcctaatctgggctatgatgcggactagtcgtcatctttccttacaacaaacaaggcgctctgtgagcgccttgtctctttattgaggttaaccccttatactgagataggttcctgaacttcggaaaacctataacgataaggagaagctgattccgtgttaactctgctacacctgttgtccgcggttgctctgctggtgtggggcacgcatatcgtgcgtaccggggtgatgcgcgtctatggcgctcgcctgcgtaccgttctcagtagcagcgtagagaaaaagccgctcgccttctgcgcgggtcttggcgtgactgcgctggtgcaaagcagtaacgccaccaccatgctggtgacctcatttgtcgcccaggatttagtgggtctgatgccagcgctggtgatggtgctgggggccgacgtcgggacggcgctgatggcgagggtgttgaccttcgacctgtcgtggctgtcgccgttgttgatatttatcggggtgattttcttcctcggccgcaagcagacccgcgccgggcagcttggacgggtggggattggtctggggctgatcctgttggccctcgagctgattgtccaggccgtacaccccataacccaggcgaacggcgtgcaggtgattttcgcctcgctgaccggcgatatcatgctggatgctttgattggcgccgtatttgcaatcattagctactccagcctggcggcggtgctgttaacggcgacgctgaccgcggcgggagcgatctctttcccggtggcgctgtgtctggtgattggcgccaacctgggttcggggctgctggcgatgcttaacaacagcgcggcgaacgcggcggcgcgccgggtggcgctgggcagcctgctgtttaagctggtggggagcctgattattctgccgttcgtccatccgctggccgcggcgatgcacaagctgccgttggccgagtccgagctggttatctacttccacgtcttttacaacctgctgcgctgcatcgcgatggtgccctttgccggaccgatggcgaagctgtgccagcgtctgatccgcgatgagcccgagctggataaccatctcaaacccaagcatctcgacccgtcggcgctggacaccccggcgctggcgctggccaatgccgcgcgcgagacgctgcgtattggtgacgcgatggagcagatgctggagagcctgcacaaggtgatgcatggcgaaccgcgtcaggagaaagagctgcgtcgtatggcggatgatatcaacgtactttacaccgctattaagctctatctggcgcgaatgccaaaggatgagctggcggaagaggaatcccggcgctgggcggaaattattgagatgtcgttaaacctcgaacaggcgtccgatatcgtcgagcgaatgggcagcgagatcgccgataaatcgctggcggcgcggcgcgccttctcggtagaagggttaaaggagctggacgccctgtacgatctgctgctcagcaacctgcagctggcgatgtcggtcttcttctccagcgatgtgcccagcgcccgccgcctgcggcgcagcaaacaccggttccgcattcttaaccgccgctactcgcatgcgcacgttgaccgtctgcatcagcagaacgtgcagagcatcgaaaccagtacgttgcacctggcgctgctgggggatatgaagcgtctgaacagcctgttctgctcggtggcttacagcgtgatggagcagccggatgaagacgacgaacgggatgactactgagccattccccggcggcgctgtactaaccggggttttgcgtttggacgttccgttgaggcagcccggataaggcgcaatgcgccgctatccgggaaacgttagccacccaggctcagaagcggtggcccgcaggcagggttatcgcttcttcccccggtttgaacaacagcgtcgggttcgggccaccgagcgtcgcgtgaccatcggtgacctggatccagtttccttccggcaaaccaatcaccgttaattccggcgccacgaccagcagttcgcggatacgctgttcgcgggtttcgccctgatgcccggtcggcaacgcgttggtgaagtgcgggttaatctgtagcgggaacagccccagcgcatcaaatccctgcggatcgacaatcggcatatcgttggtggtgcgaatggtcgggcaggcaaggtttgaacctgcactccagccgatatacagcgccccgcgtttgacgacatcgacaatcggcgccaacaaaccgcgactgcggcactctttcaacagctggaaggtgttcccgccgccgacgatcaccatctcggtgctttcaatggcggcgatagggtcgtcgacgctgtggataccggttacgctgaccgccatgggcgccataaccgcagccactttggccgtataatcatcccaggattgcgtcacgccagcgaaggggatgaataccgccttacggcggcctttgacctgaccggcaatcagcggcagggcgtgttccagccaggctttccccggcagcgtggagttactgagtaacagcagttccatcttttcttcctgttttaaaaatattattgaagcagaaattctagcatcgcccccataccgacgcgctgatatggcgcatgatgtgggtaagcggaatgctgttcacaagcccgacgaagcttctggataatgaatcacacaatccaggttttttctcgcccacaaggtagggtatatttcgcttttacaggagaatctatgctgcccgactcatcaacccgattaaataaatacatcagtgaaagcggcatctgctcgcgtcgcgaagcggaccgctttattgaacaaggcaacgtctttatcaatggcaagcgcgccacgattggcgatcaggtgaagcctggcgatttagtcaaagtgaacggacggttgattgagccgcgcgaagcggatgatctggtactgattgcgctgaataagccggtcggcattgtgagcaccaccgaagatggcgagcgcgacaacattgtcgatttcgtcaatcacagcaagcgtatctttcctatcggccgtctggataaagactcccaggggctgatcttcctcaccaaccatggcgatctggtgaacaagatcctgcgcgccggcaacgaccatgaaaaagagtatctggtcacggtcgataagccggtgaccgatgagttcattcgcggcatgggcgcgggggtaccgattctcgggaccgtgaccaaaaaatgtaaggtaaagaaagaagcgccgttcgttttccgcatcacccttgtgcaggggttaaaccgccagatccgtcgcatgtgcgagcactttggctatgaagtgacgaagcttgagcgtacgcggatcatgaacgtcagcctgacggggatcccgctgggagagtggcgcgatctgaccgatgacgagctgatcgacctggtcaagctgattgaaaacgcctcttccgaagcaaagccgaaagccaggccgaagcctaaagcggcgacccccgggatcaagcgcccggtagtgaaaatggaaaatagcaacgataagggccgcccggctggtaacgggaaacgtttcacccagccgggacgtaaaaagaaagggcgttaacgcctgccgcgggtcggcgtattcgccgaccaggaaaaggtcgcttccttgtccgttttataagcctgctgttttctcacctggcgggctttcttcgcttccgcttcacgctgcgccatcagcttatcgatatattcctttttcacgctgttcgtttccgcattgctcagcgggcggccatgcgcaatacgcgcgcggtcaagcagcgttttcaattcgcgctgttcgcgctcggtcatctctttttgtgtaatacgggggagtgccatggtggtgccctcagtcagaccagagcacccagtgtacggcaatgaatattttactgatagcctgtatggcaactaaagcaggcacacgcccgggcctgcgcccggacgtatcacgctcagcgcttgtcggcttttttggcgatgggctttcctgaccagtacccggccagcagcgaaccggacaggttatgccagacggagaacagcgcgcctggcagcgccgccagcgggccgaagtaaattttacccagcgcggccgccaggccggagttctgcatccccacctcgctcgccagcgtacggcaggtggattcatcaaaaccaaacagacgtccgccccagtacccgccaagcagaccaatagtgttatgcaggatcaccgcgataatcaccaccaggccgacggaggcgatatgggcggcggaacccgccaccaccgcgctgatgatcgccagaatgcacaccatcgagaaggcgggcaggaacggctctaccgctttcaccaccttcggcaacagatgatggacaatcagtcccagcgcgataggaatgaccacaatctgcagaatgctgagcaacatgcccatgacgtcgacctgaatatgcgcgtcgacgtacagacgggtgagcagcggtgtcgccacgacgccgacgagggtggagaccgaggagatggtcaccgacagcgccacatcccctttggcaagaaagatcatcacgttggaggcggtcccgctggcgacgctgccgaccagcaccatcccggcggaaagctccggcggcatatgaaacagcagcgccagcagccaggcggcgagcggcatcaccagatagtgcagaaatatccccgcagcgaccggcgccggacgcgacaggacgcgtttgaaatcctccagcttcagatgcacgcccataccgaacatgatcagcatcagcagggtggtgacccatgggccaattggggtgaaggtagtgggagtgtaataggccagaacggagagcagcagtgcccataacgggaacagccgcgtcagagttgcgagcatgttgtgttccttgctatacgcgaaccgggccgcgccatcccgatgggcggcgagcaggtcagctggttgtgttgatgttgttataaaaaagccgggttcgagcccggctataggtattgtttatcgtgctaaggaattttattcaaacaaattatgatgcagcttctgcacaaccttctccgcatcgtcgcccggcaccaggaagcacaggttgtggctggaggcgccatagcagatcatgcggatgttaaacggctcgaggacgccaaagacctctttgccgacgccgcaggctttcgacagctcattgccaatcagggcgaccagcgccagattttcttccacttccacgcggcacagcgaagagagctcggtcagcagcgcctgggtcagcagggtatcgcccgcagaggtcgagccggtggtgtccatggtcagggccacgctcacttcggaggtggtgatcaaatcaactgagatgttatggcgcgccagaataccgaacacttcggcgaggaagccgcgggagtgcagcatattcaggctgtgcagcgtcagcagcgtttgccggcgacgcagcgccagcgcgcggaacagcggcgggttctcggtggttttacacaccagcgtaccgcccgctttaggctctttactggagccgacaaacaccgggatatcgctgcgcacggcaggcagcagggtcgccggatgcagcactttggcgccaaaggtggccatttccgctgcctcttcaaaggcgatgacgtcgatgcgtttcgccgccggcgcgacgcgcgggtcggtagtatagatccccgggacatcggtccagatatcgacgcgggtggcattcagcgcttcgccgagcagagcggcggtataatcgctgccgccgcggccgagggtggtggtgcggcctttcgcttcgctgccgataaagccctgggtcaccaccaggccttccgccaggcgcggcgccagctgctgctgggtcagttcggcgacggcggcgatgtccggttcggcgcggccaaagcgatcgttagtgcgcagcactttacgggcgtcaaaccactgcgcctgaataccgcgttcacgcagaatttccacaaacagcagggtggacatcagttcgccatggctgaccagttcgtcggtcagggcggttgaggaggcgagcgcggcggcttccgccagcgtcgtgatattttccagcaagcgctcaatctcttcgcggatcacgttgggataacgcaaacgctccagaatattgaactggatctgacgcagagcgtccagctgggaaaaacgttcggtgggttccagccctcccgctaaggccaccagaatgttggtcacgccggcagaggcggagagcacaacaatacgggtattggcatcgagcagcgccacatcgatgctgcggttcattgcgtcaaaatcagcaacgctggtgccgccaaatttggcgacgactagatctgtcataacaacctcgtgtcagggggcctgacttattaaaacgattcctgagcaccgatcctggcaggggctggacgccgccggatcgcaacaaaatgtcttaataagccaggccaaattattcagccatggcacaagggaagagcgataaacagggtggcgcagagtgataaacaactacgatgtcacccagaagtgctccaccttgtagacccgactcaccgctttgggcgctgaggtgttcgggtatgaaacgcccgactgcgaacgtttctggtgacaacccaggggattcagcccctgtggccggcgaggagcgtgaccagacgctctttcacctcggcgttgctccccctcacgtatcttccccggactggttcctccaatacggttacctgggcaacgcacctcttctggcaattactgacgtctttcacctggccgggggaacagggacattatatcccccgcgaataccctttcgctgtagcgtgaaatgcgcgagcaatagatacctaccaatacgtaagcactgcggatatataaaggcttaacgccagctatgtcaacgctgcggttatgcggatttttcatgcctctgcggctaacagaaaaaagccttatgatagctatactaatggggctttttactccgttttgacccgattcctgaccggcgtcagggtcaagtcacaaaaatcatcacaattttccgtcaccggcgctacaatcgaccgaagtcacaatctcaaatcagaagagtattgctaatgaaaaacatcaacccaacgcagacctctgcctggcaggcattacagaaacacttcgacgaaatgaaagatgtcactatcagcgagcttttcgccaaagatagcgaccgtttttctaaattttccgcgacgttcgacgatctgatgctggtggacttctccaaaaaccgcatcactgaagagacgctggctaaactgcaggatctggcgaaagagactgacctggcgggcgctatcaagtcgatgttctcaggtgagaagatcaaccgcaccgaagaccgcgcggtactgcacgtcgcgctgcgtaaccgcagcaatacgccgattgtggttgatggcaaagatgtgatgccggaagtgaacgctgtgctggagaagatgaaaaccttctccgaagcgattatctccggtagctggaaaggctacaccggcaaaccgatcaccgacgtggttaacatcggcatcggcggctccgacctcggtcctttcatggtgaccgaggcgctgcgtccgtataaaaaccacctcaacatgcactttgtctctaacgtcgatggcacccatatcgccgaagtgctgaagaacgtgaatccggaaacgactctgttcctggtggcgtccaagactttcactacccaggaaaccatgaccaacgcccacagcgcgcgcgactggttcctggcaaccgcgggcgacgacaagcacgtggcgaaacacttcgccgcgctttccaccaacgcgaaagcggttggcgagttcggcatcgacaccgccaacatgttcgaattctgggactgggttggcggccgttactccctgtggtcggcgattggtctgtccatcattctctccgtgggcttcgacaacttcgttgagctgctgtccggcgcgcatgcgatggataagcacttctccaccactccggcggagaaaaacctgccggtgctgctggctctgatcggcatctggtacaacaacttcttcggtgcggaaaccgaagcgattctgccgtacgaccagtacatgcaccgctttgccgcttacttccagcagggcaacatggagtccaacggtaagtatgttgaccgtaacggccacgcggtagactaccagactggcccaatcatctggggtgagccgggcaccaacggtcagcacgcgttctaccagctgatccaccagggcaccaaaatggtaccgtgcgatttcatcgctccggctatcacccacaacccgctgtctgaccaccatcagaaactgctgtctaacttcttcgcccagaccgaggccctggcctttggtaaatcccgcgaagtggttgagcaggaatatcgcgatcagggtaaagacccggcgaccctggagcacgtggtgccgttcaaagtgttcgaaggtaaccgcccgactaactccatcctgctgcgtgagatcaccccgttcagcctcggggcgctgattgccctgtacgagcacaaaatcttcacccagggcgcgatcctcaacatcttcacctttgaccagtggggcgttgagctgggcaaacagctggctaaccgcatcctgccggagctgaaagacggcagcgaagttagcagccacgacagctctactaacggcctgattaaccgttataaagcctggcgcgcataacgcttgcgcagctaagacggaatgccgaccctttggtcggcatttttatttatagccgccgcagcagcctcgccggattccccgcccacacgcctttctcggtaatggacttcgttaccacgctgcccgcgcctatcaccaccccatcgcagatgctgacggccagaatcgtggcgccgctgccgatcgacacgtcatcgccaatctcgatccgcccccagctggcgcggtcggcgtttggtttaccctcgcgaaacaggtcgttggcaaacatcacgccgtgaccgataaagcagcgctggccgatggtgacgtactcgcagataaaggtatgggactgaattttactgttcgcgccgatgcgggtattcccctggatctcaacgaacggcccgacgaagacgttatcgccgagctggcaatcatagaggttggcgggctggtaaataacgacattttccccacaaacgacgttacgtacaccggtatcacgaagctcaggcatagttcctctcaaatcggtttggccagaatatgtaaggtgctttgctggctggcggagtggaaaatcgtgtctctgatgtgctgcatcccctggcgttcgtaaaaacggcgcgcggcgggattcgcggcgagtacttccagccacagccaactttcaccggccgtttttgctcgcgtctcgacggcgtgaaaaatatgctcgccgtagcggtggccagtcttccccggcatcaggtagagcttatgcagcagcgtaccaatcttgccgtcgtcagccattcgctgctgatagctatatttagcgaaaccaacaggagagggggcttcggcgatgagccagtgttgggtcgcatccgcaagactccgacgtagcgcatcttcggcatattcttgcttaagaaataacgccagttcatcggcatcgcgccagagatgagcaaagtggtgatgatagctggcatagcccatcgcgctaagctggggcgcgtcctcgggacatgcctgtcgaatagttaacatgctgcgttcctcgcgtcgttctgcggctatattgcctgtaaagtgaacaatgtggaacgacaaaaatcggtgggagaaggctggaggcgctccctccagcctgggggttagcgggcgaaagcgatcgcttcgatttcgacgccggcatctttcggtaaccttgctacctccacacaggagcgcgccggaaaggccgcctggtgttcgataaagaaggcctcgtaggcggcattgatggcggcaaaatccgccaggtctttgacaaacaccgtagttttaacgatctgcccgaccgtgagtccggcagcttcaacgatggctttcacattttccagtgattgccgcgcctgttcggcaatgtcctcgggcatggtgccgtccagcggattaatcggcagctgaccggaggtgatggtcatcgcgccgagattgacgccctgcacgtacgggccgatagcagcaggcgcgtcagcggtggtaataatcatacggtttatccttcaaacggttacataaaataatttaacaacaccagcgagccgacgccgctcactaccacccacaccaggcctaaacggaagctggcgagcgtgcagatgatggcggcgatcaccttcggattttttaagtcgaactccatgctgcaattcacgctcaggatctgaatggtgatgatggccggcagaacggtgaccggcacgaagcgtagcgttttggtcacccgctcggacatctggatcttgccggccaggccgataaacgagaaacggatgagaaaagtcaccgcggccatgcccagcgtcagggcgataaaatagctattactcattttccatcgcctccactaacggcatatcggattcggtttttgccatctgcttgcgctcttccgccaggtcgacgcacaggccggcgaggacgccaagcactgaggcgacgacgatacccagcgaatagggtaggaccactaacagcacgccggaaacggcggctacaaccgcggcgacggtgcaggcctggcttttaatttgcggcaccacgatggcgataaaggcggcgaccatggcgaaatcgagaccgtatttctcaatgtggggaaacgaggcgccgaccagcgcgccaagaaaatcagccagcacccaaatcgcccagaaggtaatcatcgccgaaccataaaacagatatttttcctttttatttccttccatctctttgacggtggtggcatacacctcgtcggtgagcgcataggacataaagcattttttaaagaatgaagcttcgcgcacggtgccggaaatagaggcgctatacagcacgtggcgaagatttataattaatgtggtgaaaataatcacgccgagcgtggcgccggtttttaacatattcagtgccagcatttgcgccgagccggcaatgacaatcgccgaccacgccgtactctgccagacgctcatgcccgcgctaacgcttaatgcgccgacaataaatgaaaatggaaagtcgccgatgcataggggcataatagcgctggcgccgcggaagatgacttttttattcatctgctatacctgctaatttataaataatagtgtgggtagagtacgttaatcggggcctgctctttcaggcccgtgaaatggtattatttagcgaccataatgctgataatttctttatcggtgagagtcattggtttaatcaccagacggcacaggttattaatagtctgctcgacatcggcgcacacaataccgtcattggcgccagcgcagctattttgcatggccattagtaccgccttaaaggcgctggataccactgacgagactttcatcgcgcagctgttggaagcgccatcacaaatcatgccggtaatatcgctgaccatattaataattgcggtattaatggtattgatgtcgcgggtaaacagccaggccataccggcggcggcgcccatagcggcggttgaggctgcgcatagcgcagataagcgcgtataacgagaatgaattgagatggcggtgagatgagagagagacaaagcgcgagccagggtctcttcatcgacgccgagatgctctgcaaccaccactaccggcatggttgctgtaatgccctgattgcctgagccgaagttagacatcgctaccaccggcgcgccgcccatgcgggcatctgaagcggcgacggtgttgatgatcaccttgcttaacagatcgttgctcatcaggccgtttttcactgcgtcagaaaaggtaccgttaatgttcaggccatatttttttgttttgccttctgccgccagcgcggagtttaagcgcgcggcgtcgagaataaagcgaatatcattaaagtcgacgcgattaataaattcgtaagcctgttgtagcgagaaagtgggcagcgtttcgcgctgggtgcgcgtattctgtttttcgcttaatggctgcggttggccattaatataaagttcgaccacgttggtgtgggttcctttgaccacgacacgacagtaattctcgccagcagagagggttaaatcgagatgaataaaatccggggtctcttcgacggcaatatcaacggcgttattggcgatcagcttctgcgccatttcaacgtgtcgcggagtgatatcttccagcgtttttaatcccttttgcgggtcgccgccaaatgcgccaattgcggctgccagcggtacaccgcaaacggtggtgccgggtatggtgacgcccatcgcgtttttataaagattggcggaaataaaaccgctaattttagtgcaaggctgatccagatattgtgcggcgtaggcggccgcgaaggaaatagcgacgggttcagtacaacctaaagccggggcgacctcttgtttgagccattttacgtacagggaagcgttatcggtgttcataatgatttaatgtccaaaattaaattttattcagctgcgataatgctaagacaaaagataagaaaaaacttaccctaataaccataaaaagactgtggtttggagaaaaattttatcttacgggaggttttaagatacatctgtttcaaaaagtaaactttttatatttcagttggttgggttgattcgttctaagcgtaacggatgattttgttaatctgctcacagcgttgctggaaggacaattttctcttgttcgtacttttcgaatcaatagcccggagatagcgtaaggcgaaggaatcataggtagatctggatcacacttttgcgctatacagatcgacaacgttcatgcatttgaggtgtcactatgccgtcggtatatcgtccgctggttaatttcgttgcgaaggccatgcaggccgtgctgaatctggcactgctgtgcctgggaattattctggtggtgttcctgggaaaagagaccctgcatctggcgcacgtactgtttacgccggagccggtgagtaagtacaagctggtcgaagggctggtggtctattttctctactttgagtttatcgcgctgattgttaaatattttgaatccggttttcactttccactgcgctatttcgtctatatcggtattaccgcaattgtgcggcttattatcgtcgatcatgagtcgccgctggcggttctcatttactccgcggcgatcctgatcctggtgattacgctctggctgtgtaactccaatcgcctgaaacgcgaataaaaaaaagcggcctccagggccgctgaccaacagtcacaaatagaatttatgtagggtccagttgaggatagcagtggcattgaccttactttttcagctgagggcgacggcgacaatacccggttggggtcgtgtattgcggctagaccgtcggccctcctctgaaatttggggccggtgttacaaaaaaattaacctttcactccacccgccgtcaggccattaaccagccagcgctgcgccagcaggaagacaaccgtgatcggaatggcggagagcaccgccgcggcggcaaagtcgccccacagatagttctgcgggttgagatactgttgcatacctaccgccagggtatagctgttcacatcgcgcagcagcagcgaggcgaccggcacttcggtgatggccgcgatgaacgacagaataaacacgactgccagaatcggcaccgacagcggcagcagcaccagacggaaagcctgccatggggtcgcgccatccagcgccgccgcttcttccagcgagccatcgatggtttcgaagtagcctttaatcgtccagacgtgcagcgcgataccgcccatgtaggcaaagatgacgccgccgtgggtgttgaggccgacgaacgggatgtactggcccaggcggtcaaacaacgcgtacagggcaaccagcgacagcaccgccgggaacatctggaaaatcagcatccctttcagcagggccgctttccccgggaagcgcatacgggcgaaagcgtaggcgcaggtggtggagagagcgacgataccgatcgcggtgatcccggcgaccttaatcgagttccacagccacagcaggaccgggaacggcggcggcgtgacgcggccatcggcgtgttcgacgctgaagcctaacgccagacgccagtgctcccaggagatggtatccgggatcaggctgccggtggcgaagttgccttcgcgcagcgagatggcgataaccatcagcagcggaaacataatcgcggcgataaaaatcagtagcaggagatgcgtggtaaataaacgtagcttctgcgatttgggttggaccatagccattatcgttatctcccttaatcaaacttcatgcgcgtggctttcagattcacaatcgctaacgcgccaaccagcaggaagataagcgttgcgatagccgccgccaggccgaagtcctgaccgccgccgccttcaaaggcgatgcgataggtgtagctcaccagcaggtcggtataaccggccggggtggtggtgccgagacggtccggaccgccgttggtcaacaattgaatcaggacgaagttgttaaagttaaaggcgaagctggcgatcatcagcggcgttagcggcttaatcagcagcgggaaggtaattttaaagaagttctggaacgggccggcgccatccattgccgacgcttcgtacagatcgtccggaatcgccttcagtagccccatgcacaggatcatcatgtacgggtagcccagccaggtgttgacgatgatgatcatggtgcgcgcggtggtcgggtcgctaaaccatgccggcttaatgccgaacagcgtgctgagcatcatgttgatttcaccaaagctctggttgaacagccctttgaaaatcagaatcgaaataaacgacggtacggcgtacggcagaatcagcaggacgcgataaatcgctttgcctttcagcgcttcccactgcaccaggcaggcgaggatcatccccaccgcgacggtcagcatcacggtcagcaccgagaacaccaccgtccagacgaagatcgcgaagaacggtttctgaatgccttcatcgtggaagacgcgggtaaagttgtcccagccgatagtcacagtgtagcccgggctcagcttctcattgccccagctgccgtcggcgttaattgcctggtagaagccgacgtcgttgttcgggcggtatttaacgtgggtctgattgttggtcagtaccccgtcttcgccgagggtatacagaggctgggtaccggagaactggcgcagggagctcatgatgactttgctgtcatccggcagcacagcggtcagctggttcagcgcggtgcgattctgggtaatcacgcgcaggttggcgcgctcgccttccggcagggcgtcggtttcttttaacgccagcttctgctcgccgccaaatttaaaggcgtcagaaaggtagtttttaccgctttcgccgtcggtgagcgccagcttccactcgtcacccgcagggatcagcgtgaaattataggctttgccggcctggaaggaacgatccatcagcacctgctgcgcacgctcaaaggtcagctggttggtgctgctgtagttggtaaacgcgatagcgatagtgcagatcagcggaaacaggacaaacaggcccatgccggcgaggccgggataaacatagcgccaggcataagccttgcgattagcgaaaatatacaggccaactgagcttaaaatcagcgtcatgatggcgaacaggtactccccctgggcgtacatcaaaacaacaaggtaacccaccagcaggcacagtaagccaatcacagaccatgtgagttgcgggctttgccaccagtgtctctttttaacggcatccatggggatcatcctctacagcggtgaaaacttatttgtcaggtggcgcttcgcttacctgacctacggtccgagccgtagtggtagggcgggtaggcgcgcgcgccacccgccgttttcttacttagtgatacggctctgtgcatctttcagcgcagcatcgacagtctggcgaccgctggcggcgttgataaccgcggtacgaacggcataccagaaggcagacatctgcgggatgttaggcatgatttcgcctttctgggcgttcgccatggtggcagcgatgcgcggatctttttccagtttttcctggaaggatttcagcgccacggcacccagcggtttgtcgttgttaacggcttccagaccctgatcggtcatcaggtagttttcgaggaactctttggccagctctttgttcgggctggcggcgttgatccccgcgctcagcacgccaacgaacggtttcgatggtttgcctttaaaggttggcagcagggtcacgccgtagttaaccttgctcttatcgatgttagaccacgcccacggaccgttgatggtcatcgcggtttcgcctttgttgaaggccgcttccgcgatggagtagtcggtgtcggcattcatgtgcttgttcttgatcaggtcaaccaggaaggtcaggcccgctttcgcgcctgcgctgtccacgccgacgtctttcacatcgtacttgccgttttcaaacttgaacgcgtatccgccgtcggcagcgatcagcggccaggtgaagtacggttcctgcaggttgaacatcagcgcgctcttacctttcgctttcagttctttatccagcgccgggatctcttcccaggtcttcggcgggttcggcaccaggtctttgttgtaaatcagggacagggcttcgactgcgatcgggtaggcgatcagtttgccgttatagcgaaccgcatcccaggtgaacggatagagtttgtcctggaacgctttgtccggggtgatttccgccagcaggcccgactgcgcgtagccgccgaaacggtcatgcgcccagaagatgatgtccgggccgtcgccggtcgccgcaacctgcgggaatttctcttccagcttgtccgggtgttctacggaaactttaatgccggtgtctttttcaaactttttacccacttcagcgaggccgttgtagcctttgtcgccgttaatccagataaccagcttaccttcttcaatttttgcgagggcagaggcggaaaacatcatcgtggtcagtgccgacagcgcgaggatgcgagcgccagttttgattttcatatacccgtcctttttggtgttgtactcgtggatacacttcggtggcttaacgatgatgagtttccttttttaacaacccctttccatcctccccaggtctacgccccacccgctggttgtgtgatctccattgcaaaaacggccgtattgcgtcctggagcacagaaaaaagcgcccaattttgtcgcctccatcacgaaatcacgctccgcccgccatcccccgcggcgagagccaatctctcatcctcccatctcctcccccataaaaaagccggggggtggaggatttgcctgcgtaatgaatgccgcatagtcgacccatcttgaatgtgactgttagtgacaggttgtaacgaagggagaagggcatggcgagcgtacagctgcgaaatgtaacgaaagcctggggtgacgtggtggtatcgaaagatatcaatctcgatatccacgaaggggaattcgtcgtgtttgtcgggccatcgggctgcggcaaatctaccctgctgcgtatgattgccgggttagaaactattaccagcggggacctgtttatcggtgacacccgcatgaacgagatcccaccggcagaacgcggcgttgggatggtattccagtcttatgcactctatccccacctttccgttgcggaaaatatgtcgtttggcctgaagctggccggcgcgaaaaaagatctgattaaccagcgggtgactcaggttgcggaagtgctgcagctggcccatctgctggagcgtaaaccgaaagccctctccggcggtcagcgccagcgcgtggcgattggtcgtacgctggtggcagagccaagcgttttcctgctggatgagccgctttccaacctcgatgccgccctgcgcgtccagatgcgtatcgaaatctcccgtctgcataagcgactgggccgcaccatgatctatgtcacccacgatcaggtggaagcgatgaccctcgccgacaagatcgtggtcctcgacgccggccgtgtggcgcaggttgggaaaccgctggagctctatcactatccggctgaccgcttcgttgccggcttcattggttcaccgaagatgaacttcctgccggtcaaagtcaccgcgacggctatcgatcaggtgcaggttgaactgccgaaccgtcagcaaatctggctaccggtggacagcgccaacgtgcaggcgggcgccaatatgtccttaggtattcgaccggagcatttactgcccagcgatatcgccgatgtaacccttgaaggcgaggtccaggtcgtcgaacagctcggtcacgaaacgcaaattcatatccagatccccgccatccgtcagaacctggtttaccgccagaacgacgtggtgttggtagaagagggagccacattcgctatcggtttgccgccagaacgttgccatttattccgtgaggatggcaccgcttgtcgtcggctgcataaagagccgggcgtgtaaggcttcccattaaaaaagcgcgaacccggctggcgatataccggcgaagcgtgcaaagaaaagcaatgatctcaggagatagaatgatgattactctgcgcaaacttcctctggcggtcgccgtcgcagcaggcgtgatgtctgctcaggcgctggctgtcgatttccatggctacgcgcgttccggcattggctggaccggcagcggcggcgagcaacagtgcttcaaagcgaccggcgctcaaagtaaataccgtcttggtaacgaatgtgaaacctatgcggaactgaagctgggccaggagctgtggaaggaaggggataagagtttttatttcgatactaacgttgcctattccgtgaatcaggaagatgactgggaaagcacctctccggcgttccgtgaagccaacatccagggtaaaaacctgatcgactggctgccgggctccacgctgtgggcgggtaaacgcttctatcagcgtcatgacgttcacatgatcgacttctactactgggatatctccggcccgggtgcaggtctggaaaacgttgaccttggcttcggtaagctctctctggccgctacccgtaactcagaaagcggcggctcttatactttctccagcgatgacaccaaaaaatatgctgcgaaaactgccaacgacgtctttgatatccgtctggcgggtctggaaaccaacccgggcggcgtgctggagttaggggtcgattacggccgtgctaacccgcaggatgactatcgcctggaagacggcgcgtcgaaagacggctggatgtggaccggtgaacatactcagtctatctggggcggcttcaacaagtttgtggttcagtacgccactgacgcaatgacctcctggaacagcggccactctcaggggaccagcatcgataacaacggcagcatgatccgcgttctggatcacggcgcgatggacttcaacgatgactggggcctgatgtacgtggcaatgtaccaggacgtggatctggacagcaagaacggttctacctggtacaccgtgggtgtccgtccgatgtacaaatggacgccgatcatgagcacccagctggaaatcggttacgacaacgtgaaatcccagcgtaccagcgaaaacaacaaccagtacaaaattactctggctcaacagtggcaggcaggcaacagcgtctggtctcgtccggctatccgtatcttcgcaacctacgcgaagtgggatgaaaactggggctacagcaacacctccggtctgcagacgaaagacagcagcggaagcggcgctttcacctccagccgcggtgacgacagcgaagttaccttcggtgcccagatggaagtgtggtggtaataccgtccgcaggacgggtgtaacctgggaggggcgtcagcccctcctgattattcagggttagcgcgctattgcctggctaccgctaaaccgatgctatccaaggtgagaagaatgaaaatgaagaaaactctcgtcgctctgtgtttatccgcagggatgttggcatgcgtgccggggatgagccttgccgatgttaactttgtaccgcagaacaccagcgccgcgccggctattccagccagcgcgctgcagcagctgatctggacgcctgccgatcaatcaaagacgcagagcgttgatttaaccaccggcggtcaacgcctggatgtcccggggatcgtcggaccggtcgccgcctggagcgtgccggccaatatcggtgagctgaccctgacgctcgacagcgaactgaacaaacataaacagatttttgcgccgaacgtgctgattctcgaccagaacatgacgcccgcggcgttcttccccagcaattactttacctatcagcagccgggcgtgatgaccgctgaccgcctgggcggcgtgatgcgcctgaccccggcgctgggccagcaaaagctctatgtgctggtgtttaccactgaaaaagatctccagcagaccacgaccctgctggatccggcgaaagcctatgccaaaggcgctggcaatgcggccccggatatcccggatccgatcgctaaacataccaccgatggcgtgctgaagctgaaagtgaaaactaatagcacttccagcgtgctggtagggccgctgttcggctcttccggcccgggtccggtaaccgtcggcaacaccgcggcgccggtagccgcgccagccgccgccgcggcgccggccgccaaaagcgaaccgatgctcagcgataccgaaacctacttcaacaatggtattaagcaggcggtgaaacaaggtgacatcgacaaagccctgaaattgatgaacgaagctgagcgcctcggctcgaaatccgctcgttccacctttatcagcagtgtaaaaggcaaggggtaatcgtctccccacaatgctgatgtttaggcacagcctttaggtgcatcctccgggatgcacctttttttgcacgcgcggcagcctgttgcatgactgttgcgtgaatgatcgtatattgacgtttgcccgccaccaaccgcctattctgcgatacaatgctttcacgttatgtaccggagaatcaggcatgtcccatcctgcgcttacgcgactgcgtgcgctgcgctattttgccgttatgccatccctgccgccgccgctaagtgactggctgctgctggaggactcaatgacccagcgctttgaacaacaaggaaagcaggtcaccgtgaccctggttaacgaagggtatatcggccgtgacgcgctgactgacgaagcggcgctgctgcccgacgagccgcgctactggctgcgggagattatactcaatgccgatggcgagccctggctggccgggcgcacggtggcgccggagtcgacgctgtgtggtccggagctggcgctacagcagctcgggcaaactccgctgggccgatacctgtttacgtcgtcgacattaacccgcgattttattgaaattggtcgcgatgcagcgctgtgggggcgtcgttcccgcctgcggctgagcggcaaacccctgctgctgaccgagctttttttgcctgcgtcgccgttgtactaagaggaagaaaaaatggagtggagtctgtcgcagaataagctgttggcgtttcatcgcctgatgcgcactgacaaaccgatcggcgctttgctgctgctgtggccgacgctgtgggcgctatgggtggcctcgccgggcgtcccgccgctgtggatcctggcggtattcgtcgccggcgtctggctgatgcgcgccgccggctgcgtggtgaatgactatgccgaccgaaaatttgatggtcacgtaaagcgtaccgcccgccgtccgctgccgagcggcgatgttaccgagaaagaggcgcgaacgctgtttatcgtgctggtgctgctctctttcctgttggtgctcaccctcaacaccatgactattttgctgtcggtggcggcgctggcgctggcgtgggtctatccgtttatgaagcgctacactcatctgccgcaggtggtgctgggcgcggcctttggctggtcgatcccgatggccttctcggccgtcagcgaatcgctaccgctgagctgctggctgatgttcctcgccaatattctgtgggcggtggcctacgatacccagtatgcgatggtggatcgcgatgacgacgttaagatcggcatcaagtcgacggcgatcctgtttggcgaaaacgatcgtctgattatcggtatcctgcaggtggccgtactggcgctgatgggcgcggtgggttggctgaatgggctgggctgggaatattactggtcgctgttcgtggcggcgggtctgtttggctggcagcagaagcttatcttcaatcgcgaccgcgataactgcttcaaagcgtttatgaacaataactacgtcgggctggtgctgttcctcggcctggcgatgagctatctgtaacctcctgtccgctgccccccggcattccggggggcagcaaacgccgcgttacgcgtcgtcctgcgtgacgctctcaatggtcagtcggacatccgacgtaatcaaatccgccagcatccgataaaccttcagggtctcttccggctcggcgtcgccggtgtcgctgatatagccttcatcgcgcagggtcaacaccagggtgctgaacaccgctttgtcgaagaactccggcgcattgatgccgtgtagcaccgacagacgctgggccacggtgcgactctctttttccagcgagctgcggttgatcgccgggttagcgctcagcagccagaaggtgatggcatagcgctgcagcgtctcgcgggcgccagcggccagcagctgcagggagcgagagtgcgacgggttgaggctcatgacatcgccatcgacgacgatcagctcctgacgcagcatctcggcaatcagcgcatccaccactccggccagctccgctttttcccagcgcaggaacagctcggccttgaggaacggatagagtgtttccacatgacgcagcacttcggcgcggctgagatgacgatgctgagtcaccagagcggctaacagcgacggcatcaccagcatatgggcgatattgttgcgatagtaggtcatcagcaccgcctgctcgcgcggcaggatgatgatgtcgccaatggtgtccttctccacttcgaacttgttcatctgcagcgcatgatcgatgagctcgctggccgaagcggatggggcggtcgcatccggagaatagggcacattgcgcagcagcgcgaggtagcactctaactgctgggtgagctgctcacgggtcagcgaacgttggcgggaggccagtagcgccgtacagcacaggttcatggcgttggccgcgccggcgttattgatgcgcaccatcaggtcagcggcgatgctattcaccgtcggcgtcagccaggaggggcgaaccgcttcgatcgggtcgatcgcttcccgccaatccggcacatgctggttaagataggtcatcagcggcagcggttcgccgaagttaacgtaaccctggcccaggttgcgcagcttgcttaaaccgcgcaccatctgcggcagactctctttctctttagtggcgccgcgcagctctttggcgtaggttcctacctccatcacgtgctcatagccgatgtaaatcggcaccagggtgatcggtcgggttccgccgcgcagcatcgcctggatggtcatcgacagcgtaccggtcttcggatcgagcaggcggccggtacgggagcggccgccttcgacgaaatactccacggaatagccgcggctgaacagttcgccaaggtattcgcggaacacggtggaatagagtttgttgcccttaaaggtgcggcgaataaagaaggcgccgaggcggcggaagatcggtccggccggccagaagttgaggttgatgcccgccgcgatatgcggagggaccagcccctgatggtacaggacgtaggagagcagcagatagtccatgtggctgcggtggcaggggacatagacaatttcatggccgtcgtgcgccagctggcgtacgcgctcggcgttatgcacgttgatgccctggtacaggcggttccaggtgaagccgagaatgcggtctgtcaggcggatcatctcgtatgagaagttcgccgcaatctcttccatcagcgcgatagcgttctgctgtgccttctcgtgcgaaattttcttgctgcgcgcttcgtcttccaccgcgcgggcaatcgctttcgaggccagcagtttattaaacagatcctggcgggccggcagacgcgggccgacggcggccagccgctggcgggcaaaatgcatgcgagcgacgcgagccagcttctgggcgatgatcttatcggtaccgtgctcatccgccatgcggcgcagcgaaacggacggcgagaagcgcacgaagctgtcgcggccgagccaggagacggcgaaaaatttctgaatgccgttcagcatccgcagcggcggattgacttctcctttctcgcgacccggcgaacggccgaacatgaccgaaaccggcaccatttgcacatcgaggtccggatggttgcggtgcagatcgaggtaatcgtggaacagcttgatggactcttctgttggcgtgtaataagtaaatacgcgcggcccaccgtggatgaatacgtaacgcggcagcagggcgccgtcgatttccagcggttcaagcgggtcaggtaaatcatgcgccaggcattgggcgcgcagcgtcagcaggtccgccttcgaattatagggcaggacgtacatgaccggacgcgaggtatcgagtcctaattcctgggcaggctctgccggaatagacttgctttttaccagcacctgtaatggtaaattcagtaatttatagtaaattcgttgccagccggacataaacgatgtgaagcctctggttaatcatgcaaatgcgcggcaagaataacagaaagtgggcaaaatttccgttaccacgcggcaaacgcgcacactcatcgacgtcatttacgtaaaaaggttttgtgatggccaataataccaccgggttaacccggatcattaaggcggcaggttactcctggaaaggatttcgcgcggcgtggatcaacgaggctgcgtttcgtcaggaaggcgtcgccgctatcgtggccgtcgcggtagcctgctggctggacgtcgacgccatcacccgcgtattgctgattggctcggtcctgctggtgatgatagtcgaaattctcaacagcgcgattgaagcggttgtggaccgtatcggctcggattttcacgagctttcagggcgcgccaaagatatggggtcggcggcggttctgctggcgattatcatcgcgctgatcacctggggaacgctgctgtggagccattatcactaacgttcttcgctaaacctcgcaaaatatgaacaatccgccgatttttgtgtgccatgtggttccaaaatcaccgttagctgtatatactcacagcataactgtatatacacccagggggcggaatgaaagcgttaacgaccaggcagcaagaggtgtttgatctcattagggatcatatcagccagacgggcatgccgccgacgcgtgcggaaattgctcagcgcttggggttccgttccccaaacgcggcggaagaacacctgaaagcgctggcgcgtaaaggcgcgatcgagatcgtctccggcgcttctcgcggtattcgcctgctgccggaagaagagcaaggcctgccgctgatcggccgcgtcgccgccggtgagccgctgctggcgcagcagcatattgaaggccactatcaggtcgacccgtcgatgtttaagcccaacgccgatttcctgctgcgcgtcagtgggatgtcgatgaaagacatcggtattctggatggcgatttgctggcggtccacaaaacccaggatgtgcgtaacggccaggtggttgtcgcgcgtatcgatgaagaagtgacggtgaagcgcctgaaaaagcagggcaatgtcgttgaactgttgccggaaaacagcgagttttccccgatcgtcgtcgatctgcgccagcagagttttaccattgagggtctggccgttggcgtgatccgtaatggagaatggctgtagcgcctgcctctgcgcagcgtcatctgttgcgtgacgctgcgacgtttttcctcaatcaggtcctcaaacatgctgctcaacgctgccgataaagcgctgtggcgtcttgccctccctatgattttctccaacatcaccgtcccgctgctggggctggtggatacggcggtgatcggccacctggacagcccggtatacctcggcggcgtagcggtcggggcgacggccaccagtttcctcttcatgctgctgctgttcctgcgcatgagcaccaccgggctcaccgctcaggcctggggcgccaaagatccgcagcgcctggcgcgggcgctggtgcagccgctggccctggcgctgggcgccggggtgctgattatcctgcttcgcctgccgctaattgacctcgctctacatattgtcggcggcagcgaggcggtgcttgagcaggcgagacggtttctcgaaattcgctggctcagcgcccccgcctcgctggccaacctggtgctgctcggctggctgctgggcgtccagtacgcccgggcgccggttattctgctggtggtgggtaatctgttgaatattgtgctcgatctgtggctggtgatgggcctgcggatgaacgtccagggagcggcgctggccacggtcaccgcggagtacgccaccctcattattggcctgctgatggcgaagcgggtgctgacgctgcgcggcgtgtcgctggcgatgctgaaaaatgcctggcgcggggatctgcgccgtttattggcgttgaatcgggacatcatgctgcgctcgctgctgctgcagctgtgctttggcgcgctgaccgtattcggcgcccgtctgggcagcgacatcgtggcggttaacgccgtactgatgaccatgctgacctttaccgcctacgcgctggatggctttgcctatgccgtggaggctcactccggccaggcctacggcgcgcgcgacggtagccagttgctggaggtgtggcgggcggccggccggcagtccggcatggtggcgctggcgtttgccctgatttacagcctggcggggcagtacattatcgcgttgttaacctcactgccttccctgcagcagctggccgatcgctatctgatctggcagacgatcctgccggtggtcggcgtctggtgctatctgctggacggcatgtttatcggcgcgacgcgcggcgctgagatgaggaacagtatggcggtcgccgcggcggggtttgctgtgacgctgcttacgctaccggtgcttggcaaccatggtctgtggctggcgctggcggtgttcctcgccctgcgcggcctgtcgctggcgctgatctggcgtcgtcactggcgacgcggcacatggtttagttagtcatctcccgtcattgccggtagccgtgaccttccccggtcgcgctacgtttacagggcgattcaatagcccggctcagcgtggcgcaggccgggaacatcctcttcgcgttatcccgcggtgcgatggttaaaaattccgaataacgaatcgacgccagcattctcatctatagttaataccatgtccggcacaaaacgggctgtaaacccaccgaatgatgaggacgttattatgaataaagacgaaataggcggtaactggaaacagtttaaaggtaaagccaaggaacagtggggcaaacttaccgatgatgatatgaccgtaatcgaagggaagcgcgaccagctggtcggcaaaattcaggagcgttacggttatgagaaagatcaggctgagaaagaagtctcagactgggagcataagaacgactatcgctggtagcgttccttgatccgaagaatgaagcatttgtgttagtgcctgtctgaatggcgcagggacgcgccgttaaccctttttcccgctgcggcagccgctcagcgggctttctttttgagctgaatagtatgatcgtgctggcagtgtcccggggtgctgcaggcttcgacttccacgcagcccgcgcaaagcccgtgagcttctatcacattgtggcgcagggcaaaccccatgcgggccgccagcgtatgcatgatatcttccaccccttccgccgcttcttcttttaccacgccgcagcggtcgcagataaacatggccgagctatgggtcggctggtcgaacagatggcacagcacatagctattggttgactctaccttatggacaaaaccctgctcgagtaaaaactccagcgcacggtaaaccgtcggcggcttcgcctgcggctctttctcacgtagcaagtccagcagatcgtaggcgctgattgccccttgctgcaggctcatcaggcgcaacacttccagacgctgtggagtcaggcgtacgccgcgctgtgcgcaaagcttttcagcatgcgctaacatctcttgcgaaggggtcttatccatgagcatcctcgggttgcgtgaatttgaatctgttactttatcacgttcctcagaaaacaccgagagccggcaggtgatacgggtcatacttcaggttgtcggcaccggcgcccgtcccgagcgctggccgcttattctcgagcagactacgccttagccgctcgctaaaaccaccatgtccgatttaatcacaacacgcccgaccctgggtatgctatatctgaagtgtctcattttcgggagaaaacgatgaaacgacctgattgcattcgccactggcgcgaactggaagggcccgacgatgctacttatcccgacagcccggagcgtttttcaatcggcgcgccgctggggcgaggtttacgtctcaaccggctggggatccaccacgagcggctgccgcccgggcggcgcacctcttatccacacgcggagagcgatgaggaagagttcatctacgtgctggagggctatccggaagtgtggataaacggctatctctggaagctggagcccggcgacagcgtgggttttcccgctggtaccggcatctgccacacctttctcaataataccgagcaggaagttcgtctgctggtggtgggcgaggccaacaagaagtacaaccgcatttattacccgctcaatcccggctatgccgcgacgcgccaggatcgttgggttgaccatccgccgcagttcttcggtccacacgacggcaagccgcggaaaaagtaatcatttcaggtgaggggcgaagcgcggcgcactatgcgcctgtggtgtatctttatgctatagtagcgcccctttttacccggatgcttatttattcgccatgatgcctgaatcaacgtcacctgttttccctgctcaccgcttctccatcgcgccgatgctcgactggaccgaccgacactgccgctacttcctgcggctgctgtcgcggcatacgctgctgtataccgaaatggtgaccaccggggcgattattcacggcaaaggggactatctggcctatagcgaagaagagcacccggttgctctgcagctcggcggcagcgatccccaggccctggcgcagtgcgcgaagctggccgaggcgcgcggctatgatgagatcaacctcaacgtcggctgcccctccgaccgcgtgcagaacgggatgtttggcgcttgcctgatgggcaatgcgccactggtggccgactgcatcaaggcgatgcgcgatgtggtgtcgattccggtcacggtgaaaacccgtatcggcattgacgaccaggacagctatgagtttctgtgcgatttcattgagacggtctccggcaagggcgagtgtgagatgtttattattcacgcccgcaaagcctggctctccggcctgagtccaaaagagaaccgcgagatcccgccgctggattacccccgcgtctggcagctgaagcgcgatttcccccaccttacgatggcgatcaacggcggcatcaaatcgctggacgaagccagagtacagcttgagcatatggatggggtgatggtcgggcgtgaggcctatcagaacccgggcattctggcctcggtcgaccgcgaaattttcggcgtcgccggcgcggatgccgatccggtagcggtggtgcgagccatgtacccctatattgagcgcgagctcagcaagggcacctatctgggccatattacccgccatatgctggggctgtttcaggggatccccggcgctcgccagtggcgtcgctacctgagcgaaaatgcgcataaagccggcgccgatattgcagtgctggagcaagccctgaagctggtggcagataaacgttaatttctgaccaaaacctggtgaaattgaccacgcctcgcgcaccgtcgcggggcgttttcttttaaagtcaagtgcttatgtttggcatgctttttgtaatacctgcagagtgaagtattcattctttggggagagaaccatgctggaactgctatttgtcattggattttttgtcatgctgctggtcaccggcgtatcgctgctggggattatcgcggcaatcgtggtggcgacggcgctgatgttcgtcggcgggttgttcgccttgatgatcaaattactgccgtggctgctgctggcggtggcggtggtgtggattattcgggcgctgaaatccccgaacggaaatgcttttcgcgacaataaccgttggcgttactaaggtattgaggggtgcgtcacaacctgaacaattttgcagacaaccgcgtaggcattgctgcgcaaatctgtcactattagcgcgttaacgaattcatcgcgctgtaccctacatacagccgaactaaaaaaaagtaagggcttcccaggtggaagccctaaacttttgccccttctgccaacttatggcagcagcaaactcgaaccctgcgtcacccggctctccagaacttcatgcgcccgccgcgcttcgctcagcggatagatctgactttcagccacgtccactttaatcaccccgctggcgatcagcgaaaacaattcactgcaggcttcctccagttcttcccggttggtgatatagccctgcagcgatgggcgagtgacgtacagggagcctttttgattcaggatccccagattaacgccggtcaccggaccggaggagttaccaaagctgaccatcaggccgcggcgctgcaggcagtccagagaggcctcccaggtatctttccccaccgagtcgtagacgacggccactttcttaccgtcggtgagcgccttgagccgctccacgatagactcctcgcgatagttaatcacctgccaggcgcccgcctctttggcgcgctgcgctttctgcgcgctgccgacggtaccgataagtttcgcccccagcgctttcgcccactgacaggctatcagccccacgccgccagcggccgcgtgaaacaggaacatctcatcaggcttaatttcataggttttgcgcagcagataccagaccgttaatcctttgaggaacgacgcggcggcctgttcgaaagagatagcgtccggcaggaccgccgctttgtcggccagcacattgtgtaccgtgctgtaggcgccgagcgccgactgggcgtacaccacccgatcgcctaccttaatatgcgtgaccccatggccaactttactgacgatgccggccgcctcggtgcccaggccgctcggcagcgacggcggcggatagaggccgctgcgaacataggtgtcgatatagttgatgccgatggctttgttttcgacctgaatctcatgttctgcgggatcgcgtggcgtgaactcaaccgcctgaagcacctccggtcccccgtgtttcgaaaattcgatgcgtgttgccatgttcgctcctgtgttgttccaagattattcagtaagcttaacagcctgcgccggcggcgacggattttcttacccgcctcaggcctgccacgcttaatgggttctttagcggcaatggctttctcgctatactgtcacgctcttttccggatcggtgaaatgttaggctatggcaggaaataaacccttcaacaaaccacagacagaaacccgcgaacgcgatccgcagctcgccgggctgaaagtcccgccgcactcgattgaagcggagcagtcggtgttgggcggtttaatgctggataacgagcgctgggacgacgtcgccgaacgcgtcgttgccgacgacttttatacccgtccgcaccgtcatatttttaccgagatggcgcgcctgcaggagtccggcagtccgattgacctgattacgctcgccgagtcgctggagcgtcaggggcagctggacagcgtgggcggcttcgcctatctggccgaactgtccaaaaacacgcccagcgcggctaacatcagcgcctatgccgacatcgtgcgcgaacgcgcggtggtgcgcgaaatgatttcggtggccaacgagatcgccgaagccggcttcgacccgcaggggcgaaccagcgaagatctgctcgacctcgccgaatcccgggttttcaaaatcgccgaaagccgggccaacaaagacgaagggccgaagaacatcgccgatgtcctcgatgccaccgtcgcccgtatcgaacagctgttccagcagccccatgacggcgtcaccggggtcaacaccggctacgacgacctcaacaaaaagaccgccggcctgcaaccgtcggatctgattatcgtcgccgcccgtccatcgatgggtaaaacgaccttcgcgatgaacctcgtggaaaacgcggcgatgctgcaggacaagccggtattaatctttagtctcgagatgccctcggaacagatcatgatgcgttctctggcctcgctgtcgcgcgtcgatcagacccgcattcgtaccggtcaactggacgacgaagactgggcgcggatctccggcaccatgggcatcctgctggaaaagcgcaatatctatatcgatgactcctccggcctgacgccgacggaggtgcgctcccgcgcgcggcgtatcgcccgcgagcacggcggcatcggactgattatgatcgactacctgcagctgatgcgcgtgccgtcgctctccgacaaccgtacccttgagattgccgaaatctcccgctcgctgaaggcgctggcgaaagagctgcaggtgccggtggtggcgctgtcgcagcttaaccgctcgctggagcagcgcgccgataagcgcccggtcaactccgacctgcgtgagtccggctctatcgaacaggatgccgacttaatcatgttcatttaccgtgatgaggtctatcacgagaacagcgatcttaaaggcatcgcggaaattatcattggtaaacaacgtaacggcccgatcggcaccgtgcgactgacctttaacggccagtggtcgcgtttcgataattatgccggtcctcagtatgatgatgagtaatccttccgccttcttttattaaggaattcaaatgcaagcggcaactgtagttatcaaccgccgcgctctgcgacacaacctgcaacgtctgcgtgaactggcgcccgccagcaaactggttgcggtagtgaaagcgaacgcctacggacacggtcttctcgagaccgcgcgaacgctgaccgacgccgacgcctttggcgtcgcccgcctggaagaggcgctgcgcctgcgagcggggggcatcgcccagccgatcctcctgctggaaggcttttttgctgcggaagacctggcggtgatcgccgcccagcgcctgcatacggcggtgcatagccccgaacagctggcggcgctggagcaagccgatctccccgagccggtgaccgtgtggatgaagctggataccggcatgcatcgcttaggggtgcgcccggaggaagccgaggcgttttatcagcgtctgagccagtgtaaaaacgtccgccagccggtgaacgtggtgagccacttcgcgcgcgccgatgagccgacctgcggcgccaccgaacgtcagctggacatcttcaccacctttaccgaaggcaagccgggcttgcgctctatcgccgcctcgggcggcattctgctgtggccgcaatcgcattacgactgggtgcgccccggaattatcctgtatggcgtgtcgccgctggacgatcgctccaccgggaaagatttcggctgccagccggtgatgaccctgacgtccagcctgattgcggtgcgcgagcataaagcaggggagcccgtcggctacggcggcacctggatcagcgaacgcgatacccgtctcggcgtggtggcgatgggctatggcgacggttatccgcgcgcggcaccgtcgggcacgccggtgctggtcaatggccgggaagtgccgattgtcggccgggtggcgatggatatgatctgcgttgacctcggaccgcaggcccaggataaggccggcgacgcggtagtgctgtggggagaggggctcccggtagagcgcatcgccgagataacgaaagtgagtgcttacgaacttattacgcgactgacctcccgcgtcgccatgaaatacttcgactaagcctctggcgtaccggatagcacagaggctgatccggtacgcaccaggcctgcggcgctcaaaaaagcggtttataccgctgcgcggtcactttcccctcaacatcctctcgacctgccgtcatatccggtttattgtgtaagaacctgccccatgtaaacctggagatacatcgcgtgtttcaaaaagttgacgcctacgccggcgaccctattctttctctgatggaacgcttcaaagaagacccgcgaagcgacaaagtcaacctgagtatcgggctgtactacaacgatgacggcattatcccgcagctgcaggcggtggcggaagcggaagcacgcctgaacgccgagccgcatggcgcctcgctgtatctgccaatggaagggttgagcggctaccgtcaggcgattgcgccgctgctgtttggcgcagagcataccgcgcttaagcaaaatcgcattgcctctattcagacggtcggcggttcgggcgcgctgaaggtcggggccgacttcctcaaacgttactttcctgagtctcatgtctgggtcagcgatccgacctgggaaaaccacatcgccatttttgaaggggctggcttcgacgtaagtacttacccctggtttgataaagccaccaacggcgtgcgctttgaggacctgctggcgacgctgcaaacgctgccggcccgcgatattgtgctgctgcacccttgctgccacaacccgaccggcgccgacctgacgccagcccagtgggaccgcgtggttgaggtattgaaagcgcgtcagttgatccccttcctcgacatcgcctaccagggctttggcggggggctggaagaggatgcctacgctattcgcgccatcgccagcgccgggatgccgatgctggtcagcaactcgttctccaaaattttctcgctgtacggggagcgcgtcggcggtctgtccgtggtctgtgaagacagcgaaaccgcgggccgcgtgctggggcagctgaaggccaccgtgcgccgcaactactccagcccgccgagctttggcgcgcaggtggtggcgacggtgctgaacgatgccgggctgaaagccacgtggcaggcggaagtggacgccatgcgcgcgcacatcctgaccatgcgccaggcgctggtcgacgcgctgcagcaggttgcccctggcagcaaagtggattacctgctcaagcagcgcgggatgttcagctataccggatttagcgcggcgcaggtggatcgtctgcgcgatgagtttggcgtctacctgattgccagcggacgcatgtgcgtggcggggttaaactcacgtaatgttcagcaggtagcgaaagcttttgccgcggtaatgtaagccgctctccagcaggttgtctctgccggtcaacgggcaggggcaacccctcggatgtgatcatcctctttttctatgacatctgcgcgaaaaaggcttttcatccatgccgccggcgggtaaggtcgggacgttgataagcatgcacattattgaaaacaataatgattgatagatttagggataaatatgcgcaaacttactctcgcccttgcggcggcttctctcctgttcacgctgaacagcgccgttgtggcgcgcgcctccacgccgcagccgctgtgggtcggcaccaacgtggcccagctggccgagcaggcgccgatccactgggtttcggtggcgcaaattgagaacagcctgctggggcggccgccgatggccgtcggctttgatatcgatgacaccgtccttttctccagtccgggtttctggcgcgggcaaaaaaccttctctcccggcagcgaggattacctgaaaaacccgcagttctgggaaaaaatgaacaatggctgggatgaattcagcatgccgaaagaggtggcgcgccaactgattgcgatgcatgtgaagcgcggggacagcatctggttcgtcaccggccgcagccagaccaaaaccgaaaccgtttctaaaaccctgcaggatgattttctcatcccggccgccaatatgaatccggtgattttcgctggcgataagcctggccagaacaccaagacccagtggctgcaggcgaagcagataaaggttttctacggcgattcggataacgatatcaccgccgcccgcgaagcgggcgcccgtggcatccgcgtgctgcgggccgccaactcctcctatcagccgttgccgatggctggcgcgctgggcgaggaagtaatcgtcaattccgaatactgatgaccgcctgaacgcgataaacggcagcgacggcgctgccgtttttttatgcaaaatcaggggtggaaggttttaccttttcacgtattgctgcacacttagaaggattcattcgcaaaaggagtcaatgatgtggtatcagcaaaccctgacgcttgggccaaaatcccgcggttttcatctggtcaccgacgaaatccttggccagatccgcgggctgtccggggtgaaggttggcctgctgcacctcctgctccagcatacttccgcttccctgacgctcaacgaaaactgcgatcccaccgtccgctatgacatggagcagtattttctcaacgccgtaccggacaatgcgccgtatgaacatgactatgaaggccctgacgatatgccgtcgcacatcaaatcatcgatgcttggcgtgtcgctaatgctgccggtcgaggacgggcgcgtcaggctgggaacctggcagggcatctggctgggggagcatcggatacacggcggttcgcggcgcatcgttgcgacgctcatgggggaataaaagatgacaatttcggagttattacagtactgcatggcgaaaccgggagcagagcagagcgtccacagcgactggaaagccacgcagattaaggtctcagacgtgctgtttgccatggtgaaggaggttgaggaccagcggccggcggtcgcgctgaaggcgagtccggagctggctgagctgctgcgtcagcagcatcgcgatgtccggcccagccagcatctcaataaagcgcactggagcaccgtctatctggatggctcgctgccggattcgcaaatctactacctggtcgatgcgtcttatcagcaggcggtgaaaatgctgccggagccggtccggcagcagcttacccgctaattatttcagcatgggcttgaggaagcgcgcggtgtgcgaggcttcgcactcggcgacggtttccggcgtaccggagaccaggatttcgccgccgccgctgccgccttccgggccgagatcgacaatccagtcggcagttttaatcacatcgaggttgtgctcaatcaccacgatggtattgccctgatcgcgcagctggtgcagcacttccagcaactgctggatatcggcgaagtgcagaccggtggtcggctcatcgaggatatacagcgtctggccggtaccgcgcttggacagctcgcgcgccagcttcacgcgctgcgcctcgccgccggacagggtcgtcgccgactggccaaggcggatataggtcaggccgacgtccatcagggtttgcagcttacgcgccagcgccggtacggcatcaaagaattcacgcgcctcttcaatggtcatatccagcacttcgtggatggtcttacccttgtacttaatctccagcgtttcgcggttatagcgtttgcctttgcactggtcgcacggcacgtagatatccggcaggaagtgcatctcaaccttaatgacgccgtcaccctggcaggcttcgcagcgcccaccgcgaacgttaaagctaaagcgccccggcgtatagccgcgtgagcgagactccggtacgccggcgaacagctcgcgcaccggggtaaacaccccggtataggttgccgggttggagcgcggcgtccggccgatcgggctctggtcgatatcgatcactttatcgaaatgttccagcccctggatatcgcgatacggcgctggttcggcgatggtcgcgccgttgagctggcgctgggcaatcgggaacagggtatcgttgatcagcgtggatttacccgagccggagacgccggtgatgcaggtaaacaggcccactggcagggtcagcgttacatccttcaggttgttgccgcgcgcgccggtcagcttgaggactttttccgggttggcgggcacgcgctgtttcggcacttcaattttgcgtttaccgctcatgaactggccggtcagggattccggtaccgccataatggcctccagcggcccttccgctactacctggccgccgtgaacgccagcgccgggaccgatatcgatcacatggtcggcggcgcgaatggcgtcttcgtcgtgctcaacgacgatcaccgtgttgcctaaattacgcaggtggatcagggtgccgagcaggcgttcgttatcgcgctggtgcaggccgatagagggttcatccagcacgtacatcacgccaaccagcccggcgccaatctggcttgccagacggatacgctgggcttcgccgccggagagcgtttccgccgagcgggagagcgtcaggtagttgaggccgacgttgacgaggaatttcagacgatcgccaatctctttcagcactttttcggcgattttcgcccgctggccggagagcttcagattgttgaagaaatccatcgcatggccgatgctcatatcggagatggtcggcagcggggtgttttccacaaacacgtggcgcgcctcgcgacgcagacgcgtgccgtcgcagctggcgcacggacggttgctgatgaacttcgccagctcttcgcgcaccgcgctggattccgtctctttgtaacggcgctccatgttatgcagcacgccttcgaacggatggcggcgcaccgaggtatccccgcggtcattcatgtatttgaattcaatactttctttacctgaaccgtacagcaccactttctgcacgttggcgctgagggtgccccatggcgcttcgacgtcgaatttatagtgctccgccagcgacttcaacatctggaagtagtagaagttacgccgatcccagccgcggatggcgccgcccgccagcgacagctcgggattttgcaccacgcgatcgggatcgaaatattgctgcacgccgaggccgtcgcaggtcgggcaggcgcccgccgggttgttaaaggagaacagacgcggctccagctcgcgcatgctgtagccgcagatcgggcaggcgaagttggcggaaaacagcagttcttccgctttctcatcatccatattagccacaatggcggtcccgccggagagctccagcgcggtttcaaacgactcggccaggcgctgcgccagatcgtcgcgcaccttgaagcggtcgatgactacctcaatggtgtgcttcttctgcagctccagcttcggcggatccgacagatcgcagacctcgccgtcgatccgcgcgcggatgtagccctgactggcgaggttttccagggttttagtgtgctcgcctttgcgctctttaataatgggcgccagcagcatcaggcgcaggccttccggctgggcgaggacattatcgaccatctgactgacggtttgcgccgccagcggcacgtcgtgatccggacagcgcggttcgccgacgcgggcgtacagcagacgcagatagtcgtgaatttcggtaatagtacccaccgtcgagcgggggttgtgagaggttgatttctgttcgatggaaatcgccggcgacagcccttcgatatggtcgacgtccggcttctccatcagcgacaggaactgtcgcgcataggcggagagcgattcgacgtagcgacgctggccttcggcatacagggtgtcgaaagcgagtgaagatttgccagacccggaaagcccggtgacgacaatgagtttgtcgcgcgggataacgaggttgatgtttttgagattatgggtgcgggcgccccgaacttcgatcttatccattcacctttcccggtaggtagatacacggattgcctggtttgcttgaaggacaaacggcagaaacggctaattatgacacaatttaacctgaatgaatatacagtatcggaatgcaaattcgggtcgagtgtgcaacaatgccgtagccgggtactatctctggaatcagcctcgcagctattaaaatgctacgtggaaatggtacactcgcgcgtttacactattaagaaacgtattcaggagacacgaacatggccagcagaggcgtaaacaaggtgattctcgtcggtaatctggggcaggacccggaagtacgctacatgccaagtggcggcgctgtcgccaacttcacgctggcaacttccgaatcctggcgtgacaagcagaccggcgaaatgaaagagcagaccgagtggcaccgcgttgtgctgttcggcaaactggcggaagtcgctggtgagtatctgcgtaaaggctctcaggtgtacattgaaggccagctgcgtacccgcaagtggaccgatcaatccggtcaggacaaatacaccaccgaagtggtggtgaacgtgggcggcaccatgcagatgctgggcggccgtcagggcggcggcgcaccggcaggcggcggccagcagcagggcggttggggtcagccgcagcagccgcagggcggcaaccagttcagcggcggcgcgcagtcccgtccgcagcagcaggccccggcagcgccttccaacgaaccgccgatggacttcgacgacgacatcccgttctaaggcttgccttaggcgcactgtctgcgcagtcgaaaacagaaagccccggtttcgccggggctttttctttgttattcctgcaccgtcatttcaggatggaatttgacctacggtaacgagcgattcagatgacgggcacctgagcggtggcggctgtcgccacgctgggctgcggtttggctggctgcgccaccggctcctgccgcggtacggccgtcgctttctgtttgcgggccatgtcatcgacgatcagccgataggcgatgtaatacttatagatattgctgacgtaggttaccgtctcggcgccaattttttctgccgccatattttcgacgttaccgaaccagacgttcgggtcaaatcctcgctgtttagtcatggtgcgcaggcgggcgatacgcgccggacccgcgttataggaggcaaaggtaaacagcgctttatcgagccgggtcatgggctcatcggcatagtaccgatccatcatccagcgcatgtatttcacgccggcatggatattgggatccagctgtttaatatcgcccaccttcagctcttttccagtgctgggcatcacctgcataacgccgatggcgccgacgtggctccgtaccgactgattcagccgcgactcctggtatccctgggccgccatcagcagccagtcgacgtcgtaacgatcgccgtacttgcggaagacatctaccatcgcgaggaatttgcgtcgttccttactcgccgcggcatttttgacatatttagcatttttcaggtaacgcagcaggagagtattgcccagcgtggtgccctgacgattctttttgacgaagttgttcagtaccgtcagcagctgcgggctgtctttgcgtaccgcccaggcaatgtcgccgccgtcgcgcagcaccacgttgtcatggacctgaatttttggaaacacctgtttccagaacaacgccttatgctgatcgacgacgatcagcggaatcagcccggcgttgagcatttccagcagatcttcatcctccagcgcttccggcgccgcctccagtatcaccggtgggcgcgattcaccggcaaatcgggcgttcagcgcttgcaggctgtcgtaatagctggaggagcggcgaacaaagacggtttgaccagagagttgctccagactgtcgaccttcggtgaagccgggccggagatcagtaattctttcacgttgctgtagagcggctgggcgaaatcgacctgtgcttcccgcgagggcgtgatagtcagattggcagccgcaatatcgcctttaccttcattaagcgcgataaagagattgtcccgactgaccggcacaaaaacgatatgcagcttcaggtggcgctgtttgagctttttatccttcgctagctgtttattcagatcgttttccagcgcgataaaaatgtcgtgcgtcgccccgcgctgggtgcctttatcaataaaaaagaaggtcttgctgtaggtggttaatacccgaatggtacgacggtcgatcatgccaggcaaatcgcctctccatggccgtagcatatcgtcgatatgaatcgatagcgtgttgtcttcggctgctgccggcggcgctttttccgcctctactgccggcagcagaggagcgaataacagtgtcgcgaggcaggtgagccaggcgataaacagacgtgatagcgagtaggcgttcatggaggaatactccgcaggggatgtgattattttagcagaacggccgccgttagccgggcacgacaagggcgtaaaaaacataacaatgccgacaaatagttttctcccattttatcgcttactattaatatgtttttatctttaatttaactatggagataatatggcgaaaatgtgtgtttttaatgataaatagaaaataatgatgatgtttttattttatttctccccatctgttttgttgtaaccttttgattgttggtgtttattttgtttttcttcgagattgattattatcatcttgataatgaatctcatttttattaccgtaacacggcacattactctaataacacgctgtctggattacgctatcaaagaatagcgcgcagcgctttttctctaatgatgaaacagggcacttaattttattatgcctcatgctgttttcttattcccatgactatcgggaaggggctgacctacgccaaaatctggcgaggcgcagaggcgagtattttatcccattgttttttcaattggggaaggcgttatgcccgacagcaacagaaaacagggcatattctatgaaatacacgtctcacttcccgctggggatcgtcattcctctgctcgcctgtagcgtgccgctgcaggcggcagagaacatgaccgaacaatcgacgcctgacgagagcgccgccactgccgaaaatcacgaggagacgatggtcataaccgccgccaggcagaacctgcaggcgccgggcgtgtcgaccatcaccgcagaagagatccgcaaacatccccccgcccgcgatgtgtcggagttaattcgtacgcagcccggggtaaacctgaccggcaactctaccagcgggcagcgcggcaacaaccggcaaattgatatccgtggcatggggcccgagaatacgttggtgctggtcgatggtaaaccggtgaccagccgtaactcggtgcggtatggctggcgcggcgatcgtgactcccgcggcgataccagttgggtgccagcggagatgatcgatcatatcgatgtgatccgcggcccggcggcggcgcgctatggtaatggcgcgatgggtggggtcgtcaacatcgtgaccaaaccgaccacaccagaatggcacgggtcgtggaatacctatatgaacgctccgcagcaccgtaaagaaggggcgacgaaacgtactaactttagcctcaatggtccgctgtcggacagtgtcagcttcaatctctggggtaatctgagtaaaacccaggccgatgcgcaggatattaacgccgggcatgaagcggaacgtaccggttcctacgccggttcttatcccgccggacgtgaaggggtggtgaacaaagatattcacagtaagctgcgctgggagtttgccccgatgcaggccctggagtttgaggccggttacagccgccaaggtaatctctatgccggcgacacacaaaacaccaataccagtacgctggtgaagagtatgtacgggaaagagaccaaccgtctctaccggcaaacttacggcgtaacatggaccggcggctgggataatggcgtgaccagcaacagctatgcccagtacgaacacacccgtaactcgcgaatggatgaagggctggcgggcggtacggaagggatcttctccagtagcgagttttcagatatcgatctggccgatgtcctgctacatagtgaagtgaatattccgtttacgctgggggtcgatcagaatctgacgctggggacagaatggaatcagcagcggatgaaagatggcgtatcgacaacccaggcgctctcttacggcactatcgatggcgtatcggctaccggtcgtagcccgtactccagcgccgagatcttctcgctgtttaccgaagataatatggcgctaacggacagcaccatgctgacacccgctctgcgcttcgatcaccacagcatcgtcggcaataactggagccccgcactgaacctgtctcaggagctgacggacgactggacgctgaagctgggcattgcccgcgcttacaaggcgcctaacctctaccagttgaacccgaactatattctctacagcaacggtcaaggctgttacgccagtagttccgcctgctatctgatggggaatagcgatctgaaagcggagaccagcgttaataaagagattggtcttgagtacaagcatgatggctatcaggcggggatcacctggttccgtaacgactatcacaataagattgagtcagggtatgcggcggtgggtaccgccagcaacggcaccaccaatatctatcagtgggaaaacgtaccaaaggcgttagtggaaggcctggaaggaacgctgaatctgccggtgggggaggcggttaactggagcaataacctgacctggatgctgcagagcaagaataagacgaccggcgaccggctgtcagtgatcccgcagtttaccctgaactcgaccctaagctggcaggttcgtgaagatctctccctgcagagcacctttacctggtatggccgacagaaaccaaaacgcttcaattataagggcgaggcggtcagcggcagcgaactaaacgaagtcagcccatacagcattgtcggcctcagtgcgacctgggatgtgaacaaaaatctgagcttcaccagcgggatagataacctgtttgatatccgccactaccgggcagggaatgcgcaaacgaccggcaacgcgacgacgggagcttatctgtatggcgcgggtgccgagacctataacgaatcggggcggaccttctttatgagcgttaatactcatttctgatgatcctgatgaggagtaaaccgggtgcaacgcgacccggtttttttatttcagatgagagcggaggaggcggttataaatcgtgacaaaatcttcacgccctctacattattagctcaacatatccttttatactgatttccgtcgcgcaaggtcgttgatcccgaccgggctcgataatagcatcctgctatttcccttctgtaatatcccctgtcccccttccattcccaaccgcagcgatgcggaggagggggacctccttatttttgccgcgtgatctgatagcgatactgagtgggcgtgagcgcatgatattttttgaaggtacgattaaacgcactgagatcgtcataaccgaccatcatacaaatatcgacgattcggtaaccaggcgtcgtcagcaataaacggcgacacagcgacatgcgctgctggcggatatattccattggcgaacgatcaaaataatgacggaagagccgaaacaaatgccagggggaataaccagagatatcgctcagatcgtcgacggtcagtttcttatccagattattatcgatccacaagagcaggtcgcttaataccgattgctggagcgttttgctacgcataattgcggccaatcccataacgcagggctcctcagtgaggagccctggggtttattgaacagtgagtgtgccgtggcgaacctgataatttttttgattatcagggccaatatagtcgctggcgggttttgccagctgcagatgaccaaaggcggttgtttgctctgcatgataattttcgccgtcattcacgtcgccgcgcccgttataacgggcaatggccgggaagggatacaccggacgagtcgcgataaccgctggagcggcgtcagcgtaaggctgactgactttctgcacgccgtgaaactgcgtttgcgcatctggtttttctgtcatcggcggcaggtcggcagcggctgttgcccgtttgccggccatgatctcctgcggcgcgatgccttcctcggtccagcgcatcagcggggtaaggagatcaatttgatcgtaaccttcgccattaccgcaatgggctaccccaggcagcaggaataaccgcaggaaggtatccgttgcggcatggcccatctctgcttctacgccgcgataataggcgatagaaaaggccgggctgacggagtcatcggccagaccgtgccagaggataagcttgccgccgcgctgttgataggcatgaagattggtatttgccgcgttatagagcggcgccagttgggcgacggcgtcaaaattctgctggttaagcgggaaatcccgcatcgattggatcttctgtttttctcctggcaggagcacggattgcagagccggtagtaccatcatttccgacattgagtggccggtcggcgtctcgggcaccggccagcgtagctcggaacccagcggcagaccgcccgcgacgaactgggcgccgtggctgtcgtaagcgccgcggtagagctttttcaccacctcgatctcttcctgcgtcaggcaggtagaacggtcccgagcatcggcaggacagcgggggagccatgactcagagaactgacaggcatacggattttgcaggacaccatcctgcacgccggaaagcgtcgggcagtgagccagcacggcctggtgaatcagaggaaggcgatttttcagcaggatagcggtaccgtccgggcgctgattggcggccacattccagccgtggaagaaggagttctgaaactggaaaaaggccgctggcgcgccagcgctgataccgtcaaaatcctgcggaaagcgctgcgcttccatcaatgcttcgcgaccgccgactgagcagcccataaagtaggcatactttggcggctggcggtaaagcgtctgcatcaccgctttggccagcacgggggtcaggtggttggcgcgccaggcaaaatcgatgcgcttttgcggatcttcggcccatgacgcatccatcatactgccatggtgccccatatcggttgctgccaccacaaactcgccgttcattgccggcaggcagccgctggcattcgacagattcaggttaatactcccgcacagtccgccacagccgacctgcaaaaaacgttgactccagcgttgggtcggcagggcaatctgcacgccaatctcaggggcgatagtggcgctcaccttgcaccagcttccctgcgcggaggtctgcatttcagtgtggttgatagtgacctttgcgccaacggccgcgctgaagtcggtagtgcttagcgcatcgcatgtcagcgcgggaagaacgatcggcagactggcgacagcctgcgtgggtgaagcgaacgataacccgaagagggcgcagaggatgatgggcaagattgtcttgagtaagcgtgtcatacgcagttccctgtggctgatgatgggaggcggcaggatggcgaaacctatgcctcaccttccctggcgaggcgccactgcttggctattgtagataacgatagactttccttgatgccttgataaggcgaccctactgtattctgctattttgaggaaaatatggagatgtttgccaacggcgtctggcggtgaattcggggtagaatgttgtgatatcagttgcataatttattcaatttctcttcattaaatctgctgggttgcaggttatttttctccctgttcctggtgatcccagagagcatcattcctaacgagatccttccccctttccattaataagaaagggggctttttattaataaaacgttcaggcaaatctaaatatagtactggtgttggccattagaacaatgcgcttcagaaaaagttccatcattaaatatatttttaaagatgctttaatatccattttttctccattttgtcgccataattgcatgtaattctgcgcctcgctcaggttattttctgtcgcatattttagagatgcatcctgaacaaataagctcaacgccagcagaacactgctattgctcattatctcgtagacgacacattcatgttaaaaaagactcatatcatcagcggattattgatcgcccctttaacgttatatgccgcaacatcatatcaagttgatgatatccgttttgaagggctacagcgcgtgaccgtcggggcggcgctattaagtatgccattgcacgcgggagatgcggtgacgccagaagatgtcagcgaggcagtgcgcgcgctgtatgcgagcggcaatttcgaaaatgtgcagatcctgcgcgatgggaaaacgctggtggtgcaggttaaggaacggcccactattgccagcgtcagtttttccgggaataaggcagtgaaggatgatgcgctaaaggaaaatctcaccgcgtccggtatttctgcaggtagtgcactggatcgaaattcgcttagcgaaatagaaaaggggttgcaggatttctattacagcgcggggaaatacagtgcgcaggttcacgcggtggtgaccccgttaccgcgtaatcgcgttgacttaacgttcgtttttcaggaaggcatctcggcgaaaatcgcacaaataaacattatcggtaatcaggcgtttcgggaagagacgctcctggaccagcttcagctacgtgataatgtgccgtggtggaacgtggtagccgataaaaaataccagaagcagaagctggaagccgatctggaaacgctgcgcagtttttatctcgatcgcggctatgcgcgctttgctatcgagtccacgcaggtcagtatgacgccagataaaaaatccctgtatatcactatcgccctcaatgaaggcgaacgttatcgggtcgaccgaactcaggtgatgggcgatctggctcagcatgggccggagatcgaggcgcttgcccagccgctggcgggggcatggtatagcggggcgcaagtcaccacggttgaaaatgagatcaaaaagcactttggtaagtatggttatgcctggccgcaggtgacgtccacgccggaaatcgatgatgcgcatcaccgcgtggtgctgcatattcaggtcaacgcgggccgccgctactcggtacgccagatccgcttttccggtaacgacacctcccgggacgcggtgctgcgtcgtgaaatgcgccaaatggaaggggcgtggctcaacaacgaaaaagtcgatcaagggaaggtacgtcttgatcgaacgggtttttttgagaacgttgaacagcagatcgttccggtcaatggaacggcggatcaggtcgatgtggtctacaaggtgaaggagcgcaacaccggctcattcaatgtgggcctgggatttggtacggacagcggcgtgagctatcagcttggcgtgacgcaggataactggctgggaacgggtaatagcgttagcttcaatgggacgcgcaacagctaccagtcttatcttgaactgggggcgacgaacccgtggtttaccgtagatggcatcagcctgggcggaaagattttttataacagctatgatgcttctgatgcggatgccgggagctataaccagcagagctatggtttaggtagtacgctagggtttcccattagcgaaaataactccctgaacctgggactggattatgtccataatcgcctgaccaatatggatccggagctgacgacctggcgctacctcagctctcggggaatcgagcccagcgtggtgacgaaagatggcgacagcggcgcaaaatatagcgccaacgattattttgtgagtcttggatggggctacaacgatctcgatcgcggcttcttcccgcgtgcgggaaacaagagcagcctgagcggtaaagtgacgctccccggttcggataatagctactacaaactctcttttgacaccgcccagtatctgccgctgagcgagaacaagcgctgggtctggatggaacgcctgcgcgcaggctatgccggcgggttagacggcaaaagtgtgccgttctacgataacttttacgcaggcggttcgtcgtcagtgcgcggattttcttctaacactattgggcctaaagcggcctattaccgctgtaacggtagcgaaagcagctatagcgcctgcccgctggacgcctcgtctgatgcggtcggcgggaatgccatggcggtgctgaacagcgaatttatcattccaaccccctttgtgaatgataagtacgccgatagtctgcgaacctcgctgtttgttgacgcggggacggtctggagtacatcctggcacaacaccgcgcagacgctggcggcagggatccctgactacggcgatccgagtcatattcgtctctccgcggggattgccgtgcagtggatgtctcccctcggtccactggtcttctcctgggcagagccgtttaaaaagtacgatggtgataaagcagaacagtttcagtttaatatcggcaaaacctggtagggctccaacggggcctgatagaccggcgtggctatattctgtggactgtcctccgacatagcgattgagcagaatatactcaaccgctatgtcgatattatcgctaaggaatgcgatctggcgggacacccgcgacatttacccgagcgcggtctgcgggcctcgcggacctggtgacgtacgacgaggtaaccacgcaataaatagctgcctgctatggtcctctcttcttgccaaaccgcgggtaatactcagtgctgcatcatctaataccaatggctgaggcctcatccagagggactaagacgtattgtcaattaagtttatattatcttattttttattgtattttcttttttaaggttaatttggctgtttttcatcaggcctaaccataaatttagagagggagatgaaacgttactaataatggagtatgttgttaggaattgtcttaaatcacataattgtcaggggtgcttgcgatttataacaatgaatgctatcactatatattgtaataatttgtagcatctttataaggaaggaatatgaaatggactattcttaataccctgatctgcccgcaatctggtatcgccttctcggctatatccagtctgcgtttcttgaaatttatcatgtggtacgaggctgatgtaatcctgttgcccggtgagtcgataagactctattcctcgagagttttaattaatgaccagtatcattcattaaaaatctataatattacggtgtacgacgaggcgcagtgggaaaaattacgtgagcgaccatcgtgcccttaccatgccggtggcgagcggtctgactcctgtttttaccagtccttttgcacgattaagcgttgcccgaataatattccccgcagtgaaccctggcgttagccagtccacgccgccggtcagacaccggcggcgtgacctcatttcgccagcagggcggccagtcgaggctggacgcttgcgcagccggccagcacgaggttgcctcgccgcaggcccgcattggcgagaaacgcattgcacgttccgcccgcctcctcaatcaatagcatgcctgccagcgcatcccagctgttcatatgcgcttcataataggcgtggagctgaccggcggcgacatgcgccagcatcagggcgcccgcgccaaaacggcgatactccagaccggcgtcgagcagcgtgtcgatggcccgggcgtagtcgctggccggggcccggctggagcgccccatgccgatcaccaccgcatcgggctccggctcgcgtagcgtcaggcgccgaccgttgagatacgcgccttcgccgcgggcggcgaagaaaaattcatcgcgatcgggggcgtaaatgatgccgagcgacagctcgccctggcacactcgcgccagtgagatgcaccagtaatccatgccgaggataaagttggtggtgccatcgacaggatccagcacccagacggtctggtcgtcgccttcaaaaccgctctcctcgccgaggaaaccctcctcgggaaagtgggcctgcagccagcctttaatctcttgttctaccgcgagatccgcctgcgacacaaagtcctggcgcgcttttttatcgacctgtaatcccgcatcgcgcagcgcctgggcgtgggcgcctgcctggcgaatcaaggcgcataatgactctcgttgtgcttccgtcatagtcctgctctcagataacaaagggcgacgtgcgccggtgaattaaggttacctccacccaggtggtgcgtgaaggttgcgaagggtcggcggcgcgctccagaagccgggcgagcgcctggcgggcgatcgccgccacatcctgatgtagcgtggtgagctgatagctatattgcgcggtcgtcggcgtgttatcaaaaccaatcagctgaaaatccgccggagcctctctgccgcgctggcgcattccatcgagaaagccacatgcaagctgggcgttggcgcagaagatcccctccagcgcctcgtcggcgagcgccgcagcctgtaacccgcccgcgtaaccttcttgctgacaggcgaggatcgccaggtggcgttcgacgtccactccgcgcgtttgcagcgcccggccgaacgcttccccgcgcatgcggccggcccaggtggaaggatggtggttgagccagccaaagcgctgacagccgctgcgcagcagttggtcggcggccagttcggcgccggcggcgttgtcagaacaaacgtaatccacgccggggattgtcggctgacgattaatgcccacgaccggaatatgctgctggacgcactcgttcaccagcgcctccggcggctggccggaggtgacgataacgccggagacgcgaaactgagcgaaacggcgcaaggtctgcgccagatcctgctcgctgtggatctcgctcaccagcgcctgaaagccctggcgctggatctcgttaagcagcgcatcaagcagggtactgcgaaaaggatcgctgatgcgcgagacgatcacgccgattaagtggctgcgctggcggttcagcccctgggcgaggaagttaacctgataccccagctcttcggcggcgcgcagtacccgcgcccgggcgtcgggagagatgctgccgttgttgctcaacgcccgggacaccactgcccgggagacgcccgctcgccgggcaacatcctgggcggtgacgctgggtttgcgtgggttcataggaggtacgtctcgtcagtgggcgtgggacgcggcagcgttaaggtgagtccatcccgggaaacgaataagcccggccacggctgacaggcctgctttagcgccgacagggaagcatcctcgcagtgatagagccccagcgccgggagctgcagcgttctgaacagcatcaggcaggaggggaaatcgccatgcgaggcgtcatcgtccagggctgctaccgaggcgcactcctgaaacgccagcccggcgccggccatcagggctatcgagtcggcggtcggtcggccatcgccgctgtaaaacagcgtctgcccggcaatggtgatgcggatggcgcgattactcagctcatgctgggtgggggcagtgcggatctgccagtcctgccacgtccaggcttcgcggcattcctgccagtcgatggtgaaaccaaggtccgcctgcggccagttcgccagcgcggccagttgcatgagcaccggctgctgcgccggctggcagtagataatgactggcttctgacgggaataacttttccagtggttcagtagcgccgtcaggccggtgcagtggtccgggtgaacgtgggtgaagtagatcgcgtcgatatcgttgacctcgccgccgcgctgccagagcgcgcggggaacggtggggccgcagtcgattaaccactgtttgttgtccgcatcgatcacccgcagcgcggaggtattttgcgtgcaggaaaaggcgctcccgcagccaagcacatctattttcatttaccctcgccaaaattttttgccgcttaattaaattgtcataaatacccgacaaagtaggctcatatcatgtcgagtcaacgttgcattttttttacagtcaaatgaacacgtgttcaccttgctaaaaaaaatgccgcagcagcgctttcaggtagcgaatatgagttatttacagatctccggccttaaaattagttatggcgataaggtggttttacataatatcgatctggcggtagagcagggagagatgattgctctactgggcccgtcgggatgcggaaaaaccacgctgctgaacgccctctgcggctttattccggtgcaaagcggcgaggtggctattgccagccgaacgatcactcatcttgcgccggagcagcgcaatatcaccatggtatttcaaagctacgccctgtggccgcacctgacggtagcgcgcaatatcggctatggcctgaagctgcgcaaatggcgcggggcggatatcgcgcggcgggtggcggagctgctgcgaatagtcaatctcgaagggcttggcgaggtgaaagtgaccgaactgtcgggcggccagcggcagcgggtggcgctggcgagagccctggccatagagccccaggtgctggtgttggatgagccgttatctaatctggatgccaaagtgcgcctgaatgtgcgccatgaaattaaatctctgcaaaagagactggggttcacgtcattaattgtcacccacgatcagcaggaagccttagtgatggcggaccgcattgcggtattaaatcaggggcgtattgaacaaaccggcacgccggaagaaatatatcaacgccccgcgacgcccttcgtcgctgattttatgggggccgataataaaataatttccggtgaattatccgctgccgcaatatccggtttatctgccgctcagcagggtgacaacgttatttattttcgcagcgccgatgccgcgctcgctgaattaacgcagcctgcgccgcaggaggggctggctctggaaggcgtggtggagcaaagcgcgtttctgggcaatctgtatcgtcacagcgtgcgctgccatgaccgcctgctgctggcggatgccgcgcagtgctggccgacaaaaagccgcgttcggctccatgtgccaacgccggccctgcatatttttcctttaccactatcacagtgatatcagcgtgttcattctggggacaatccatgttgactaagacgaaagcagcgatcgtaacgaccctcttcctgagccttggcgcacaggccgacaccattctcaacgtcgccaccgcgggcgatcagaatatggtggattatgtaaaaacctggctggggccaaaatttgaagccgctcatcccggcgtcaaggtgcgggtgatcggtaccggccccggcgacgccgggtcgaataaaattagcgagaagctaacggcccagcaggagagcggcgcgcagcagtgggatatcgacgtcgcggtagtgcaccagaaggcgggcggtgagcaggtggcaaagggattgctgcaaaaataccgtcaggatattcagaccggcggcatggtgagttcgccgagcgccacccaggcgctgggcgttaacgttgacggatacgtgatgccgatgttcttaagccagaccgctatcgcctggaacagcgatctggtcactaccccgccggcgtcgtatgacgagctggtggcctggacgcagaaacacccgcaggcttttggctataacggcatcaagaatggcatgtccggcgtcagctttgtggtgggctggatctacgcctacgggaccgacgcccagcgtctctccgccgggccctatgataaaagcgtcgaaaaaagctggcagcaggcctatgagaagctaaaggcgttcaataaaaacgtaactttcaccccgggcaacgccgggacgctcgatatgctgagccggggggaaatcgccatgggcccggtgtgggtcgatatgttctatagctggaaagatcagggcaagctgccgccgtcgatcaagcttgctttactggcgccgggcatgcctggccagccgatgtattacgtcatcccggcgaaggcggcgaatccgcagctggcgcgcgactttatcgcgctggccaccagcccggaagtgcaggcgcaggggatcgtcaagcagttcaactggtatccgggcatcgacgccgggcaggtgaagccgaagctggatacggcgacctggcaaaagctgtttgccgaaatctcgccggaagcgctggcgaagtatggcaaaagcttcccgatcgccccctactttgacgatatcaaagagggttacgaaagccaggtggctaattaaacctttttccagcccgggccgccgtcccgggcgcttgcttgtgctgacgccaggtttattatgtccagttcattaaaatatctgctgctggttgccccggcggcgctgatgatcgcgatcctgtttttgtatccgctggggttttcgctggtctcggcgtttaccgcgccgggacagccgttcaccctcgatcacttccgcaaggtctatgcgctctacgccagcgatgtgctcttttcgctgcttattgtgctgatctcggtggcgctgttagcgctgctcgccattaccctgtcggcagtgattgcgctgtcaccctgccgacccgttgtgcgtttgctgggttttttgtatcgcctgccgctgtttattccttttatcgttgttgcccagatgatgcgcacttttctcgccaaaaatggcctgatgaacaatgcgctggtggcggccgacctggtcacgccgctggagacgctctcctggctgggatggaaagggatagtgatcacctttgtctggaagcaactggcctttgccacgctgctgatctgcggggcgatggcggcgctggagtcgtcgcagatccttgctgcacgtaatcttggcgcctcccggccgcggatcctgttcgatatcatgctgccgcaggtcctgccgactatcggcgtggcgctggtgctgtcgacggtgaccatgatgtcggtgctgtcggtaccgttgatgatcggcgtgggaaccccgacgatgctaaccgtggatatggcgtttcgcgtcaattcctatggtgattacgcggtggcgaatgcgcttggcgtggtgtcgctggcgatctgcggcgcgctgtcgtggttttacctgcgccacagcctgcagcaaaaaggcggtgaatcatgaaagcgctggccctcgtatcaacctcggcatggtgggtgaaagggcgccgtaaagtgcgcgccagtccggtgctgcagaccctgctgctgctgtttatgctgctggcgatgtttggtccgctgctgaacctgttgatctggaccgtagcggaaagctggtattttccccattcgctgcccagccggtgggggctgaagtactggtatcaggttttcaatccatacagcgatgtctccagctcgctgttaaccagcgtgctgatcgctctgttatcggtgggggtctgtttgctgatttccgtacccgccggctatgcgctttcccggcggaaaatgccattacggatgctgttcatgctgctatttcttatcccgcaggcctttcctaacctgacggtatacatgaatgttgcccgattgttttatcagtggggattgaacggcagtatcgcaggggtggtgctggtgcatagcgtccacggcctgatgtattcggtgtggatctgtgtagccgcgttttcagccatcgacccgctgctggcgcgggcgtcgcgtaaccttggcgccgggccagtgtataccttctggcacattgtgctgccgcaggcggcgccggggatcgttgccgccagcatctttgtttttctggagtcgctggatgagtttaccggcactttcttcgtcggggcgccggatatcaccacgctgccgctgctgctctataacgccagcatgtcgggtaactatcaggtctcgtcgattaccgcgctgattttgctggccccatcgctgctctttatggtggtgatccataaatttatgcgtccggagatgatggcgaaattagggaaataagggctgcagaaaacgaaaaagcttcccgtcgggaagctttttaacctcaggtcatcatcattggccattctggcggtgtctgactcatgacttcaatcatcacatctttgatattgccccagattttggcaatatcgagcagggtgataccgagcaaaccggtggcgaaccagcaggcggcggccaggccgaggcagctgcagatcaccgccagaccggcgtaatcgcttttgcgaagctgaatattcagtgagctggcgagaaacatcagtaccgcgctcaccaggggccagcgcaataatacgacactggtagtaatggaagccattaacctatcctcaaagaaagtcgggagccatggacgacctggcgcgactgacgatggcatagcgctctggtctcaactggcgtactagagagtgatgaaacgccatttctgtttcatcaacttgtgtgaactatatcacacttggcgctttattcaccagtcaaaaaatgagcttttgctgcgtttaataactatgaagtttgtgtggatattggtgagcaatcccgggaagcatattttcattcactgcctaatgattattattctgcgggttttattacctgttcttgtttattacacggagaaaccgagtcagatgcgcgtctattcttaatcttgccggaatatcttccgaatacctgataaataagtattattcatcaccatcagaggtaaaactgacgctcgtgagggctgtcggatgtcagctgatgtctatcgcaatcgcgattgctaacgtgttcgggctaccttaattaaggcatatcgcatggatgtaagcgtaaatgggtgacagtgcgccgcataaggcgctaagactcatcggaacaggtttggttattttattgccagtggtgctggcattgtggtttgcccagctgcgggctaaagccgaaaccattgatcaattacactcattttcgcagctggcgctgcaaaaaacggaaatggtcatccgggaagcggatcaggctcgggctaaagccagccagtatcgcggtgagttgtgttcagcggatcaccagcgttatttactgcatattgtgcgcggcctgctgtatgtggaagatctgatctacgctaacggccagcgctttatctgttcaacgtccgttcatcagcaaaccggctggcggatgccggcggctaattacaccaaaaagccggatgtcgcgatttactattaccgggacacgccgttttatccgggctttgccatgaattatatgcagaaggggccctatgttgtggtggttaatcccttctcgtacagctcggtgatcgccagcgaccgcgatttagcctatggcgttttcgataccaaaaccaacctctttttctcggtaagtaacaatgtcgagcccgcggaactccatgcgttaattcgcgaaggcgataccttttttaatcagaatggccgggtgtatacgatcgcccgctccgctattcgccccatcgccgtcattatgtccacctcgcgggccagctactatcacaacttttgtgaccaggccagtctgacgctgccgctggggataatttgcagtattttactggtgctggtgtggtcgcgcacccgccgacagtatcactcgccgcgcaatatgctgcagcgggctctgagctgccgccagctgcgcctgcactaccagccgattatcgatattaaaaataaccgctgcgttggggcggaagcgctgctgcgctggcctgggtttgacggtccggtgatgaacccggcggagtttattccgctggcggaaaatgaaggcatgattgcccaggtcacggactacgtggtggatgaactgttttatgaaatgggtgagtttctggccagccatccacagttgtatatagccatcaatctctctgcgtcggatttccattcggcgcggctgatttcacagatcagtgagaaagcgcacagctatgcggtctgtatcggacaaatcaaaatcgaagtgaccgagcgcgggtttatcgacgtaccgaagaccacgccggtgatccaggcgttccgcgaagcaggctatgaaattgccatcgacgatttcggcaccggctactcgaatctgcataatctgcacgcgctgaacgtcgatatccttaaaatcgataaaaccttcgtcgatacgctcaccaccaacaacaccagccacctgattgctgagcatatcatcgagatggcgcgcgggttgcggttaaagacgattgcagaaggcgtggagacgccggagcaggtaagctggctctacaagcgcggcgtacagtattgccagggctggctgtttgcgaaagcgacgccggcgcgggagtttatgcagtggttagccaatgctcccgcgcccgcgaacgtgcctcagccgccgcgtcacgcggagatctgatggcgatagtcgctgggagtgcggtcaaactcgcggcggaacacccgtgagaaggtttgctgcgagacgtagcccagatccatggcgatatcaaagatcggccgctgggtggttcgcaacgcttccgccgccagcagcaggcggcgctggcgaatatagtcccccagcgtctgatgcatcacggtacggaacatccgctgcaggtaccacttcgagtatcctgactttctggcgactatatcaatgttaagtggttgatcgatatgttcatcaatccattcaatcaaagtttgaataatatcctgatgggacataaagcggcctctctcaattctcgattcgtcgttttgtctgcaggcgagtataattcctcaagttaacttgaggtaaagcgctttatggaaaagaaatcaccccgcatcaaaatgctgttgacgcctggagaagtggcaaaacgaaccggcgtggcggtctcggccctccatttttatgagagtaaaggattgatccacagtcagcggaatgccggcaatcagcggcgctaccggcgtgacgttctgcgcgcggtggcgattatcaaaattgcgcaacgtattggcatcccgctggccactatcggcgacgcgtttggcgtgctgccggaagggcacaatctcagcgcaaaagagtggaagatgctgtcatcgcagtggcgtgaggagctggatcggcgcattcataccctgacggcgctacgcgaccagctcgacggctgtatcggctgcggctgtttatcgcgacgcgactgcccgctgcgcaacccgggcgataaactgggggaagagggaaccggcgcccggctgctggaagacgagtgataaaactaaagcgccacaactgggcgctttagttgttttccggtcttggtctttcgcattatctcgctggttcgcgagagggtttcccccgacgtcgacgtccctcagtattgcgcaatctgttgatggaggttccggtttgcgtcgacactttaactatggcatctgccgtcgctttttcctcactattttgctgaaattttcccggcaatgagcgcctgtttctatagttaatttgaacaaactacgggagaggctcatgctgacggtacatcatcttaatcaatcacgatcgcaacgcgtactgtgggcactggaagagctgcagctgccttatcagatagtccgctatcagcgggagaaaacgatgctggcgccggcggcgctgaaaaaaatccatccgttgggcaaatcaccggtactggaagataacggctatgtgctggcggagtccggggcgatcctcgagtatttgcaggaaacctgggacagcggcgggttgttgaagccgcagggaattgacgacaaactgcagtaccgcttctggctgcacgatgccgaaggctcgctgatgccgctgctgttaatgaagctggtgttcgccagccttggcaaaccccctgtgccctttggcgttcgctcgctgggttcgctgctgggcaaggggatacagaaaacgtggctcgatccgcagctggccacccatgcgcggttcattgacgaccatcttgccgcgcggccatggttcgctggcgagcggctgagcatggccgatatccagatgagcttcccggtgatggcattgttggcgcgcggcggcatgcatgaccttgtccatatcgaggcctggcgtcagcgagtggaacagcgaccggcctggcaacgcgccatcgagcgcggcggccccttcaccttacccggcgcctgagatatcagcggatccgatgacgtcgataaatgaaagcaactcactaaaaaattgttagcggattgcgcatagacgataacgtttgcgcatcggctggtcattttctgttcgtcataagcgaaatttagcgaaatacgataaacatcggttgaaaagggttatctaaaggccggataatcgtttgcctttctgtttcgctcccccttttttctgctgtccgggggaggcgataaggttgaccaccgtagtgtatgcgcggagttaaacgtttgcttttttgcggcccccctggcgctgcgattcggtacatggagatcgcgtttaactggcagtggacggtccaccacgcatatcaacgaacgataaaaattttcaggggaagttttctatgtctacgccttcagcgcgtaccggcggttcattggacgcctggtttaaaatttcggcgcgcggcagcaccgtgcgtcaggagattgttgcaggtcttactacctttctggcgatggtgtactccgtcatcgtggtgccgggcatgctcggtaaagcgggcttcccgccggccgcggtgtttgtctcgacctgtctggtagcgggcgttggctcgctggcgatgggattatgggcgaatctgccgatggcgatcggttgcgctatctcgttgaccgccttcaccgccttcagcctggtgctggggcagcagatcagtattccggtagccctcggcgcagtattcctgatgggggtcctgtttacggtgatctcggcaaccggcatccgcagctggatcttgcgtaacctgccgcagggcgtggcgcacggtaccgggatcggcattggcctgttcctgctgctgatcgccgccaacggcgttggtctggtgatcaaaaacccgctggacggtttgccggtggcgttgggcaactttgacagtttcccggtggtgatgtcgctgattggcctcgcggtgatcattggtctggaaaaaatgaaggtgccgggcggcattctgctgaccattatcggcgtgtcgattgtcggcctgattttcgatcccaacgtccatttctccggcattttcgctatgccatccctgagcgatggccagggtaattccctgatcggcagcctggatatcgtcggcgcgctcaacccggtcgtgctgccaagcgtgctggcgctggtgatgacggcggtctttgacgccaccggtaccatccgcgcggtggctggccaggcgaacctgctggataaggacggacagatcatcaacggcggtaaagcgctgaccaccgactccctgagcagcgtcttctccggtttagtcggggcggcgccggcggcggtttatatcgaatcggcggcgggtaccgcggccggtggtaaaaccggtctgaccgcggtgacggtcggtgtcctgttcctgctgatcctgttcctctccccgctctcttatctggtgccggcctacgcgaccgcgccggcgctgatgtacgttggcctgctgatgctgagcaacgtggcgaaaatcgatttcaatgactttgttgacgcgatggctggcctgatcaccgcggtgtttatcgtgctgacctgtaacatcgtgacgggcatcatgatcggtttcgcgaccctggttattggccgtctggtctccggcgagtggcgcaaactgaacctcggcacggtgattatcgctgtggcgctggtggtgttctacgccggcggctgggcgatttaaacccttcgtgctcctcacgggcggctcaggccgcccgttttatttttaagccacatcctgtttccatttgcgttaatctgggtagcgtatgattcacaggcacgacgccttacaggtataaaagaaaacgcagcaaacagggaacacatggaaatattctttaccatcctcatcatgacccttgtggtctcactctccggggtagtgacgcgcgtactgccctttcaggttccacttccactgatgcaaatcgccattggcgcgcttctggcgtggccgacctttggtttgcacgttgaatttgatccagagctgtttctggtactgtttatcccgccgctgctattcgccgacggctggaaaacgccaacccgcgaatttattgaacacgggcgcgagatcctcggcctggcgctagcgctggtggtcgtgacggtggtcggcatcggctttctgatctactggattgtgccgggcattccgctgatccctgcgttcgcgctggcggccgtgctgtcgccgaccgacgccgtggcgctttcgggcatcgttggggaagggcggataccgaagaaaatcatgggcattctgcagggggaggcgctaatgaacgacgcctccggcctggtctcgctcaagtttgccgtcgcggtggcgatgggcaccatggtctttaccgttggcggcgccaccgtagaatttctgaaggtggcgattggcggcgtgctggccgggtttgtggtgagctggtcgtatggccgctcgatgcgcttcctcagccgctggggcggggatgaacccgccacgcagattgtcctgctgttcctgctgccgtttgcctcctatctgattgccgaacatatcggtgtctccggcatcctggcggcggtagcggcggggatgaccatcacccgttccggcgtgatgcgcaccgcgcccttggccatgcgcctgcgcgccaacagcacctgggcaatgttggagtttgtcttcaacggcatggtcttcctgttgttgggcctgcagctgccggatatcctctccagttcgctggtagcggcggaggccgaccccaacgttgagacctggatgctgtttaccgacattatcctgatctatgccgcgctgatgctggtgcgttttggctggctgtggtcgatgcgtaagctcagtcagcgcttcctgaagaagaagccgagggagtttggctcctggaccacgcgcgagctgctgatctcctccgttgccggggtgcgcggggcgattaccctcgccggtgtgctctccattcctctgctgctgccggacgggaatgtctttccggcgcgctatgagctgattttcctcgccgccggggtgatcctgttctcgctgttcgtcggggtgattgcgctgccgatcctgctacgtcacattgaatcgagcgataatgtgcagcagcggaaagaggagcgtctggcgcgcgcggcaacggctgacgtggcgattgtggcgatccagaagatggaagagcgtctggcggcggataccaaagagaatatcgatacccagctgctgaccgaagtcagttcgcgggtgatcggtaacctgcgccggcgcgccgatgggcgtaacgacgtggaaacctctatgctcgaagagagtctggaacgccgcttccgcctggcggcgctgcgctctgagcgcggcgagctgtatcatctgcgcgccacccggcagatcagtaacgagacgctacagaagctgctccacgatctcgacctgctggaagcgctgttaatcgaagatcaataacctgtaatccggatagcgcgacgcttattcggactactggcgagactgcagtaaatgtgtagccccggtaagcgttagcgcgaccgggggaaacccgggcagcggcgcaagcgcctgacccgggctaccccttcccttgcggaacgcgttgtcaccagggaattattccagccagaacgctttgctgcacgccagccaggcctcagcgctgcgcgacatatatacgccttcccgccaaatcatccccagctcccagcgcagctcgctttgcaacgggatccagcaaaaattctgccggtcgagacgctggcaaatcggttccggcaggatcgctacgccaatgcccgcctgcaccatggcggcgagaaaatcccactggccgctgcgcaccgcgatacgtggcttcacgtcatgctcggcaaacagccgcatcagctgctggctaagggcaaattcctcgttgtagataaccagcggatgcgacgccagctcggccggcgagagcgaggttttaccttcccactccgcggtccttggcgtcaggacgcacagcgggtgattgaacaacggcagaatggtgaggctgctatcctcctcgacaggcagggcggtcatcgccatatcaagttcgccattgctgaccgcctgctggaccgtcaggccgccaaactcggcgatcttcagctcgacgcccggatagcgctggcggaagcgactgatcggctcggccatcagcatcccgaccatcggcggaatgccaagccgcagcacccctttatgcaggtggttgatatcgctcagctctgactccagctggctgaactcgcccaagatcgcctggccgcgttcaaaaacgacgcgcccggtatcggtgagcagtagtttgcggccgtcgcggatcaatagcgtgcagttcagctcatcttcgagattcttgagcatcttgctgatggtgggctgtgtgacaaacagcttttccgccgcgcgagtaaaactctgctgacgaaccacttcaacgaaatagcgcagcgttcggatatccataattattccctgagactatacctgcgatgattttaattcatttctgtccgcttcggcggctctctatactgctcgcctgacttctttttttcaggactatcgcacatggccttcgcgccagctcgcgttgcccccgccgtggcgcaacgacttcagatcccggtacaggtacttctctacgtcgggttattcatcttcgcacaatatctggtgaacaggtggcaggtaccgctgccggctaacctggtcggcatggtgatgctcctgctgctgatcgtctgccgggtgataccggtaagctgggtgcgcgccggcgcccgctggctgctggcggagatgctgctgtttttcgtcccggcagtggtcgcggtggtgaactacgcccagctgttgatggtcgatggttggcggatttttctggtgattgccttaagcacgctgatggtgctaggcgccaccgcctgggtcgttgacaaggtctatcgttacgaagtgggcaggttaaaaaaatgagcgatgccgtactgagtatcctgtgcctggtggcgacgctggtcctctattacgccaacaaaaaactgtatcgccgttttcataaactccctctgatgccgctggtgttcacgccgatcctgctggtgctgattctggtggtaggccacatctcttatcagagctatatgggagagacccactggctgctgtggctgctgggcccggcgaccatcgcctttgccgttccggtgtatgaaaatgtcgcggtgattaaacgccactggatgtcgctcagcgccggggtggtgacggcggtagtggtggctgtcaccagttccgtatggctggcgcgcgggtttatgttgtctgatgaaattcagcgtagcctggcggtgcgctcggtgaccacgccctttgcgctggcggcggcgaaaccgctcggcggacaacccgatctggtggcgctgtttgtggtgatcaccggcgtgtttggcatggcggtgggagatatgctgttcttacgtcttgctatccgggaggggatggcgaaaggagccgggttcggcgcggcttcccatggtgcgggaacggcgcgctcgtatgagctgggccagcaggagggcgtggtggccagcctggtgatgatgctgtcaggcgtagtagtggtgctggctgcgccggtcgtccgctggctgctgttttaacattatcgccagagtgaatgttaataaatattgaggagaggaatagctatcggctattccctgtttttgttattgatgcatttaacggttcatcataaaagattaagccaattcttatatcagcactgactttgtaactaaatgtttctctgcatgcccgtatttaattatggggtaaatattatataaatatccaattatctttgcgaattttataactttataactgtttgatttttatggttttgaatatgaccacgcatgcgttgcgatgttatatcgcaaaaaatcaatttttacattaataattgagttcttacctcatgctagttattatttttacgcgagcttgtattattgaatggattcaaatgctggtcgtttatttatgaataatattaattgtcataaaccatatgtcatgtaaatacatgcatgacgccgcgctgcttgaatttcattctctaatatcgctgcataaaacaattgacggactgattgtcgtttataatggatatgggaataaatatgaagatgagtaaaaaatttctggcgggtgccctgattttctctgcctgcagcgcgctgtctaccgttgcgcaggctgataacaccattacctttaatggtattgtttccgataccacctgtacggcgaccattgatggcggtgtaacggctattgatatgggcaccacctcagtggcggatctgaaagcgtataccttcggcgctgccaagaacttctcctttagcttagctgattgcccgaccgcggaagaaggtggcaacagtatcgcccgcgtcacttttggcggtgtttccgataccgcgaacagcgattattttaaaaaccaggcaactgatgagccggcaaccggcgtcgctgtggcccttttcgacgaagcgggcaatgtgatgaagaataacgaagagggttctgatgttgatatctcttcgggtgcagcaaccattccgttcaccgttaaaatggtgaaatcgggtgatgccgatccgacgaaaggtaccgttcagacaaccgtgacttataacgtgacctatcattaattcggcttcttgttgaatggagaaaggggaatcgcctgctattccccttaaattaaacatatgagatatcctttttttgcgatcggtttattgctgtcttcttccttcgcgcaggccagcgtggtcgttggcggtacgcgtctggtttttgatggtacgaaaaataacgctgtaataacggttgagaataaagatcagaacagcaatatcgttcagtcctggctctcggtggttgatgcagcctcacccgccaaagacgcatttattattacgccgccgctgtttcgtctcaaagccggggagaaaggatttgtccgcgtagttcgatcaggaaagaaattacccgacgatcgcgagtcgatgttttggctcaatattaaagggatcccggcaacagaatatgtacctgataaaaatgtcgtacagtttgcgattaattcgaaaataaaattgatttatcgacccgctgcgttaaaaggtaatacaccggaagcgtacgctgaaaaattacagtgggggaaagaggggacgtcggtgacggtaaaaaataactcaccgctgtatatgaatttctcacaggttagccttaacggtaaaaatatttctggcgcatggtttgctgccccgttttccactttaaaaatacccgtgaagagtagcctgtcggcgacaggaaaaaaagagatcacatggagcgtgattaatgattatggtatgtcagggaagaaatataccgctatcattcagtagcgttgagctgctattttcaactaaaagtatctgcgtcgctattattctgtgcctaagtactctaccctctcgcgcggaggccggcgaatatttcaacccaaatttactcgaagtcgctgagagtcctgcggcttcggttgatctatcctatttttcgcaagatggcataccgccgggcacctatcacctggatgtttacatcaacgataagtacgtcagttcagactcgctgacttttcaggaaattagccatgacgcaggcgcgactgcttctccctgcctgtccgcggagtatctgaattcatggttgattaataccaccgcctatccgcagttgttcgaggcaggggaaacctgcgcccggctgtcggcgatccccgggatgacgttctcggtatctcttgcccagcagcgcattgattttaccgtgccgcaggccgccatgctgaatcgccccagagactatattcccgagagccagtggcaacaggggatcaatgccggtcttctcaactatagcgtcaccgggcagcgtaatgcgccgcggcataacggcgccactatcgacagtcagttcgtcagcctgcagccagggctgaatctgggaccatggcgcctgcgcaactacagcacctatagccacagcgataacaacagccgctgggagtcggtttactcctatcttgcccgcgatattcacaccctacgcagccagctggtggtcggtaatacgtatacctcttccggcattttcgacagtttgagttttaccggtctgcagctcagttcggacaaagagatgctgccggatagcctgcatggctttgcgccgacgattcgagggatcgcgcgcaccaccgcggaggtctcggtttatcagaatggttacagcatttataaaaccaccgtcgctcccggcgcctttgaaattaacgatctgtacgccaccggcagcgccggcgacctgtacgtcaacattaaagagtctgacggcagcgagcaaaactttgtggtgcctttcgcgtcgctggcgatcctgcaacgtgagggccagctggactatgcgctgagcagcggcaggacgcgatcgggtagctccgacgataaagaatataactttattcagtcttccctggcctatggcgccaccagcaacatcactttttatactggtttccagcaggcggaagataaatacaccaacctgttgttaggcgctggctttaacctcggtactatcggtgcgctgtcgtttgatggctctcagtcgtgggccgacgtgaaaaccagcgatacggccttgtcaaccagtacagagcaagggcaatcgtatcgcgtccgcttcagtaaaagctttctgcagacgggcaccagcttttccgtggccggttatcgctactccacctcgggatattattcgtttcaggactttgtcgataactcttccacacagcgcgactgctgtacgcagagcggcagaacgaaaggccggtttgacgcatcgttgtcgcagacgctgtttggctatggttcgctctcgctttcgttggtcaatgagacctactgggacagttcgcgtatggaatcggtgggcgtgggctatagcgggtcgattggcaaggcctcctactttattaactattcctataaccgcaatgtgcaaagcaccgatgacagcagcaataaccggccggccagcgatacggtcgtctccctgacgttaagtattccgcttggcgagacgctctcggcaaattacaccatgaaccatggtcggcataacgataccacgcacagcgtggggctcaacggctcggcgtttgaggatcgttccctgaactggagcgtactggaagggtacaacacgcaggataaaagcacctccggcaacctcagcgtcaactaccagggctcgaaaggggatgtggctggcggctatggctacgaccgctacagcaatcactacaactattcgctgcgcgggggcatggtcgcccatacgggcggactcacgctatcacgctttcttggcgagagttctgcgctggtcgaaacgcctggcgtcagcgatgtgacagtgcgcggtcagacaaacgtgacgacggatgccgccggatatgcggtggtgccttacgtccgtccgtaccatcgtaacagcctggcgctggatgaacaggaaatacctggcgctgaagtggataacgtcgccagaacggtggttccgacgcgcaatgcgatcgtcaaagtgaagtacgacacgcgaattggctataaggcgatgctcaccctgcgtacccgcaatggcgtggtgcctttcggcgcgctggtgaccctcgataatgatcacggtagcgcgtcgcgcagcaatatcgttggcgatgaggggcaggtgtatctaacggggctgcagaaaaaaggccagctgttagcgcgctggggggagaaaagcagtgagcagtgcaccgttcattatgacttctccggcatggcccttggcgacgatattctgttctatcaggccgaatgtcggtaatggatgcaggttttcaacatggaagaggggctgatatgaatatgcgagacggcagcacaaggggcctcctggtggccattttgctgctctcccttccggcgctggcttatgagggcagcagcacggtcaattttaacgtcacgggcaccatcgaagcgccttcctgtgaggtggccgtggagccgtcgaacagtatcgatttaggcaccgtctcctcgcagacgttctccggacatgccggggcgagcggcgccagcgtgccggttaagctggtcttttccagctgttccgccgatgcgtcggcggtgaccatcgcgtttagcggcaccagcttcgatagcacccacgcttcaatctataaaaacttccagactggcagcaacggtgccagcggcgtcggtttgcagctgcagagcatggccgaccagcagccccttggccccggcgaccagtatctctatacctttggggacgatgcggatatccatacctttaatatggtggcacgtatgttttcgccttatggccaggtaaggtccgggatggtcgggtttaccgccacgttcgatgtggcttacaaataacgtttcgacagggatgggtatgaaaaaactgatcttattgctcatattggcactgtgtcccgtctatagctgggcggcctgcacgggaaccaactatggcgatgtctcgatgaccaacctgccggaaaagatcctggtcaatgccgggagctataccgcagggacggtactgtatgactcggggaagattacgcgctcgcaaacggaattgcttaactgtgaggggagcacctacgcggtttttgcctggtcctcgaacaatgccggggcactgataggggataatatctatgccacctcggtgcaggggatcggtatccgcgtcaaggtgtggctcaatatcagcggtgaatatggcgatgacaccgatgatttcagccccgactcgcaggtgcattatattggtgatgtgaattattacctcggaaagccgacaggtcttttcgactctttcgcgtcgactcattataccccggcgtatcagctgcagctggtggccaccggcggcgccatcgccagcaagagtcaattatcgttcagcgacccggtggccacggtatcggccaaggataaaaaggggaccatcgctatttcacaactgcacatcagcggcacaaccagcatccagctaatcccgatggggtgtattgtcggtagcaataatctcagtttttccatgggcagcatcaatgccagtgagtttaataccgcgacgaaggtgggtagcgcgcggcagtctctgagcctctcctgcgagccgggaactaacgtttcgatgcgtgtggcggctgcttctgcaagcggggataaccctgacaatacggtgatggccctcacggcggaacagaatgccgccactggcgtgggagtgcagttaaatttgaatggcaaagcactgccgttaaataccgatatcagcctctatacttcgagccgcacgacggtgaccaacagcggcgcggacgccagctacagctatttcaccaatcccgacagccccggaggcgcagcggccatgcagacgctcgctttatccactaactattacaggacggggagcgcggtgaccgcggggacagccaacgccaccggggtgatcacctttacttataactgaggggagaatcccttccccgaacgatgccggggaagggagaggacgattaatgcgcctggccgcgttcgataccgatcccggtttgtgaacggataaactgggcgcggaactgctcgcgctcgcgcatcccttccggtgagttatcggtggcggagaagacccagatgccaatgaacgcgatggcaatggagaacagcgccggatattcatacgggaacagcgctttctcatggccgaggatctgcacccaaatggtggggccgaggatcatcagaatgaccgcagtcagcaggcccagccagccgccgaccatcgcgccgcgggtggtcagcttcgaccagtacatcgacagcagaataatcgggaagttacagctggcggcgatggagaaggccaggccgaccatgaaagcaatattctgattttcaaacagaatacccagcagaatggccaccaccccaaggatcagcacggtgatcttggagaccttcagctcctgacgctcggtcgcgcccttgcggaagacgttggcgtacaggtcgtgcgacaccgctgacgcgccggcgagggtcaggcccgccaccaccgccaggatagtggcgaaggctaccgcagagataaacccgaggaacaggttgccgccaaccgcatccgccaggtgcaccgccgccatgttattgccgccgataagctgtccggccgcgtctttaaacgccgggttcgcgccgaccagcatgatggcgccgaagccgatgataaaggtcaggatatagaaatagcccataaaaccggtggcgtagaagacgcttttacgcgcttctttggcgtcgctcacggtaaagaagcgcatcagaatatgcggcaggccagcggtaccgaacatcagacccagacccagagagagcgccgatatcggatctttcaccagtccgccgggactcataatcgccgcccctttcgggtggacggccatcgcctcggtaaacaggttattgaagctgaagccgacgtgcttcatgaccataaaggccataaagctggcgccgcacagcaacagaaccgctttaataatctgcacccaggtagtcgccagcatgccgccgaacaggacatagagcaccatcagcacgccaaccagcactacggcgacatggtaattaaggccgaacagcagctggatcagcttgccggcgcccaccatctgggcaatcagatacagggccaccaccaccagcgaaccgcaggcggagagggtgcggatcggcccctgcttcaggcggtaagaggcgacgtcggcaaaagtgtagcggccaagattgcgcagacgttcagcaattagaaacaggataatcggccagccgacgagaaagcccagcgagtagatcagcccatcgtagccggaggtatacaccagcgcggagataccgaggaacgacgccgctgacataaagtcgccggcaatcgccagcccgttctggaagccggtaatattgccgccggcggtgtagtaatcgctgcgcgaacgcacccgttttgaggcccagtaggtgatgtacagcgtcagggcgacgaaaatcaggaacatgacaatcgcctgccagttggtcggctggcgctgtaccgcgccggtaatagcgtctgcggcgtgggcgccgaggggcagcagcgtggcggcgagcgccgtcaggactctcttgatcatgcttttacctcgttgagaacgcttttggtcaaacggtcgaattcaccgttagctcgccagacataaataccggtcaggataaacgaaatgacgatcacgccaatgccgagcgggatcccgcgggtgacgctggttccggcgtgcagcggggtgccgagccagccgggtgcaaaggcgataagcaaaataaagcccacgtagatcactaacataatcactgacagaatggcggcaaaccgttgccgtgatgcaactaactccctgaaatgcgcactattttctatccgctgacaaagttgttcattcatcttagcgtctccagaggtctccctttcgtcatccactcggcggacgctggcgacagcaacccctccggcgacggagccgggacaggtgttgctgacggcgttcctgcgagtgaaatcctgggggagggacttatttttatcctctccccggaaggggagagggtgtagggaatcggtctttacttacgatggcatggtaatggcctgcttctcttcgagcagtttttccacgacgccaggatcggcgagggtcgaggtatcgccgaggttgctggtgtcgcctgcggcaatcttacgcagaatgcggcgcatgattttgcccgagcgggttttcggcagcgaatcggtccagtgcagcacatccggcgtcgccagcggaccgatctctttgcgtacccagttacgcacttcggcatacaactccggcgtcggttcttcgccgtgattgagcgtcacgtaggcatagatggcctggcctttgatgttatgcgggatccccaccaccgccgcttcggcgatttttgggtgcgacaccagcgccgattcgatctcggcggtccccagacggtgtccggagacgttcaggacgtcatccacccggccggtgatccagtaatagccatcttcatcacgacgcgcgccgtcgccgctaaagtacatatttttgaaggtggagaagtaggtttgctcaaagcgctcatggtcgccgaacagggtacgcgcctggccgggccaggagtcggcgatggcgaggttgccctcggtggcgccatccagcggcaggccttcgttatccaccagcaccggctggacgccgaagaacggacgcgtcgcggagccggccttcagctcaatcgcgcccggcagcggagtgatcataaagccgccggtttcggtctgccaccaggtgtccatcaccgggcacttctcgttaccgatcttcttccagtaccactcccaggcttccgggttaatcggttcgccgaccgagccaagaatgcgcagcgaggagcggtctgtgccttcgatagctttgtcgccttccgccatcagggcgcgaatagccgtcggggcggtatagagaatgctgaccttatgcttatcgacgacctggcacatgcgcgccggcgtaggccagttcggcaccccttcgaacatcagggtggtggcgccgcaggccagtgggccgtacagcagatagctatggccggtgacccagcccacgtcggcggtgcaccaataaatatcgcccggatggtagtcgaaaacgtatttaaaggtggtggccgcatagaccagatagccgccggtggtgtgcagcacccctttcggtttaccggtggagccggaggtatagaggatgaacagcggatcttcggcgttcatttcgacgggccggtgttcggcgctggcgttcgcaatcaggtcgctccaccacagatcgcggccttcctgccagtcgatattgccgccggtgcgtttcaggaccaccacgtgctcaatgcttttcacgttcgggtttttcagcgcgtcatcgacgtttttcttcagcgggatggcgcgaccggcgcgcagcccttcgtcagccgtgatcaccaggcgtgagctggagtcgataatgcgtccggccaccgcctccggcgagaagccgccgaaaatgaccgagtggattgccccgatgcgggcgcaggccagcatcgccaccgcggcttccggcaccatcggcatatagatagcgaccacgtcgccttttttaatcccgaggtcgagcagcacattggcgaaacggcacacgtcggcatgcagttcacggtaggtgatgtgcttgctttggctggcgtcgtcgccttcccagatgatggcggtttgatcgccgcgttcggcgaggtggcggtcgagacagttagcggcgaggttcagggtaccatcttcataccatttgatggaaatattacccggtgcgaaggaggtgttctttacacgggtatagggccgcatccagtcaaggatcttgccctgctcgccccaaaatgtatcagggtcggttatggattgttggtactgcgccttgtactgatccgggttaatcaggcaacgttccgcaatattagcgggaatagggtgtttgtgaatttggctcatggctttttttctcctttgaacttgttaaatatatgtcaaacaaacgttaagagtaggggttttgacagctttgtttgttaattggggggcagatcacgcaatgattaaactgggtgaaatttcatcaaatgaaactttgaagcgaaataattacgcaaatgaatttatagaaacggaagctgtgaaattttttttattacaaatacttatgcaatataactgggggaaattcgctgctttatgcataaaagcagaggaaagccctgttcttaaaggcttgcgcagcatgccgtgcaaatgatactgatattgcgcgttaaataaccccacaaagcaacgcaacacaattcataccccctgcagtgggtaccatgacgaaaaggaatggtgcctttcattgaggaagtcagtagtgaagaaaacaaaaaaagtcagtctggcctggcaaattttgctagccctggtgctgggtatccttctgggcagttatctgcattaccacgctgaaagtcgcgattggttaattagcaatttgctgacgccggcgggcgatatctttatccatctgattaaaatgatcgtggtcccgattgtcatttcgaccctggtggtcgggattgccggcgtgggtgacgccaaacagttagggcggatcggtgccaaaaccattatctatttcgaagtgatcaccacggtggcgattgtgctgggtatcaccctggccaacgtcttccagccggggacgggcattgatatgtcgcagctggcggcagttgatatttcgaaatatcagaacaccaccgccgaagtgcagagccatgcgcacggcctgatgggcaccatcctgtcgctggtgccgaccaatatcgtggcatcgatggcgaaaggcgatatgctgccgattatcttcttctcggtgctgtttggcctggggctctcctcgctgccggcgacccaccgtgagccgctggtgacggtcttccgctctatctccgagaccatgtttaaagtcacccatatggtgatgcgctatgcgccggtcggggtattcgccctgatttcggtaaccgtcgccaccttcggtttcgcctcgctgtggccgctggccaagctagtgttgctggtttactttgcgatcctgttcttcgcgctggtggtgctggggattgtcgcgcgcctgtgtggtctgagcatctggatcctgatccgcatcctgaaagatgagctgattctggcttattctaccgccagttcggagagcgtactgccgcgcattattgagaagatggaagcctacggcgcgccggcgtcgatcaccagctttgtggtgccgaccggttactccttcaacctcgatggttcaacgctgtatcagagcatcgcggcgatctttatcgcccagctgtacggtattgacctctctatctggcaggagattaccctggtgctgaccctgatggtgacctcgaaagggatcgccggcgtgccgggcgtctccttcgtggtgctgctggccaccctgggtagcgtcgggatcccgctggaagggcttgcctttattgccggcgtcgaccgtatcctcgatatggcgcgtaccgcgctgaacgtggtgggtaatgcgctggcggtgctggttatcgccaagtgggagcataagttcgatcgcaaaaaagcgctggcctatgaacgcgaagtgctgggcaagtttgataaaaccgcccaataaaacacaaagcccggcgcgatagcgccgggctttttcttatcctttactaatccggtcaaactcttcgcagccggtatcaaacccctccaggcaactgacgttgagccagtgcagcgccttctgcttattcggttcgataaagcctttctctccctgctggaacatcatcccggcccagtattcggcatagccggtgcgggaaagtgatgaactgcctttaaagtattcacttgctttcacatcatcctccgggccgtgtacgccgctggcgtagatcagccccagcagcatctgggcatctaccgccgcatcgctttcgctatcccgggcagcatcctgcagcagcgtgatggcgtgcgctacgtcggtggcgccagcctgacggttgaccagcacccgcgcgaggacgatctctccggatttactgccggcctcgacggctttttccgccagctggcgggcctgcggatagtccgcctgttgggggttacggattttgagctgcgccagcagcgccaacgcatcgccatcgccctgggcggccgccttctgcgcccagtattcggctttttgataatcgccggagctgacccaggtatcggcaaggtaatattgcgcgcgtcgatcgccggcttcggcctgctgttgatactgactgccaggttcggtggcgaccgctgcgccgctggtgaaaaccagtagaaataaaaagaggtatttcatttgtatttattatcagtaaggaacatagcgcgcagtataaagggaggcgaaaaagaagaaaatggcgggtatcggtaggtaaggccgatttgcgctacctgaccgtaggcccgcgcaagcgcagcgccgccgggcgacagactgcggacacggagccgcttgtgtgccgggtggcggctgcgcctgacccggcctacgcatcgcgcgagccgggtcagaccgccgaaccttaacccatcgcgctttcgcgcaggcgggatttcagcttgttgtactcgtcgatcacgtactgttccgcggcgcgctgatcggcaatccgctcaacgttgaccgcgcagtacttgtactccggcgttttggttatcggactcaggttctctgagaccagctcgttacaggcgccgatccaccactggtaggtcatgtacaccgcgcctttattcggccgatcgctgacctgcgcgcgggtgatgatgcgccccttacgcgaattgacccataccagctcttcatcttcgatgcctagccgttcggcgtcggcggtgttgatttgcgcatagcctggttcatccgccagcgccgccagcgccgcgcagttaccggtcattgaacggcacgagtagtggccgacctcgcgcaccgtcgacaataccatcgggtactcgtcggtaagcttatcgatcggcgcgacccagtcgcaggtgaagaactgcgccagtccgttcggggtatcgaacttctctttaaacagatacgacgttccctgatcggcgtcggactcatcgcggcacggccacatgacatagccgagctcacccattttctcgtaggtggcgccgtagaagtccgggcacagatgccgcaactcgtcccagatctcctgggtgttattgtaatgcatcggatagcccatccgggtggcgatttcgctgatgatctgccagtcggttttcaggtcccacttcggctccaccgctttaaagaagcgctggaagccgcggtccgctgcggtatacacgccttcgtgctcgccccacgaggtggacggcaggatgacgtcggccgcggaggcggttttggtcatgaaaatgtcctggacgataaccagttccagatcgtcgaacgctttgcggaccgccgagagttcggcgtcggtctgcagcggatcctcacccataatgtacgccgcccgcacttcaccgtgcgccgcgcggtgcggcaattcgctgatgcgatagccggtatgcgcaggcaggctttccacgccccaggctttggcgaatttctcgcggttctccgggaacttgacgtactgatagcccggataggtatccggtagcgcacccatatcgcaggcgccctgaacgttgttctggccgcgtaccgggttgacgccgacgctcggcttgccgaggttgccggtgaggatcgcgaggctggtcagcgaccgcaccgtctccacgccctggtagaactgggtgacgcccatgccccacaggatggcggcggatttggcgctggcatacatccgggcgcaggcgcggatctcctgggcgctgaccccggtgatctcctccaccgactccggcgtatagccttcaacgattttgcgatactcctcgaagccttcggaacggctggcgacgaaggatttatcgtacagatcctcttcaataatcacgtggccaatggcgttgagcagcgcgatgttcgagccgttcttcagcgcaatgtgcatatcggcgatgcgcgcggtttcaattttgcgcgggtcgcagacgataattttcgccccgttgcgtttagcgttaatgacgtgattcgccacgatagggtgggaatccgccgggttgtaaccgaagataaacaccagatcggtgttatcaatctccgtgatggcattactcatggcgccgttaccgaccgactggtgcagacctgcaaccgaagggccgtgtcagacgcgagcgcagcagtcgacgttattggtaccaataacggcgcgcgcgaatttttgcatcacatagttggtttcattaccggtgccgcgggaggagccggtggtttggatcgcatccgggccatatttggctttaatggcgctgaggcgggtggcgacgtaatccagcgcctcgtcccaggagacggcttccagcttgccgccgcgttgacggcggatcatgggggttttcaggcgcggcgttaggatctgggtatcgttaatgaagtcccagccataatagcccttcaggcacagggttccctggttggttttcccctgcgccgcttcagcccgaacgattttgccgttatcgaccaccaggttgattttgcaacctgatgcgcaatacgggcaaaccgtgacgacttttttcatcggtcttgctccagttattcaatgggcgcgtttgcgctatcgcgccgtcactatgcatcttctatgccatattttcattgtgggtattccttgatgatacgcgggttttttgggcggaatgctgacgaaaaacagcctgtcgacagatttgacgtgtcgataccctggagatgtgacggcgcttgaaaaaatgtcaccgggagaggaatttgtcggcgcaggcttgcagaatcgatcagactgacactaattcccggcgggcagaggcaaaaatgaaaccagtcattttagtggtggatgatgacagggcgatgggcgagctgctcagcgatgtgctcggcgcgcacgcgtttgaagtgcttgtcagccagaccggcaacgacgcgctgacgacggtggcgcagcgggcggatatcgcgctggtcttactggatatgatcctgccggatacccatggcctgcaggtgctccagcagctgcagcgcacgcggcctgagctgccggtggtgatgctctccggtctgggcagtgagtctgatgtggtggtgggcctggagatgggcgccgatgattacatcgccaaaccgttcagctcgcgggtggtggtcgcccgggtgaaagcggtactgcgacgcagcggggcgctggccggcgaggcgtcgggcgccggtgctggcctgacgtttaacggctggcggctggataccacgcgctgtgaactgtataacccgcagcagcaggcgatcccgctgacccagggagaatatggcctgctgctggcgctggcgcagaacgcgcgccgggtattgaatcgcgaacagctgctggcgctgacccataacgaaagcaccgaggtattcgaccggaccatcgatgtgctgatcatgcgcctgcggcgcaaaattgagctcaacccgcatcagccgacgttgattaaaaccctgcgcggtctgggctatgtcttttccgccgacgtgacccacagcgagaaggcggcgtagggcgggtttgctgccaacccgctgttgactttatttggcgcagggagtttactttttttattaaagtgacactctgggttaatctatggcaacaaaattaaactggctgctgcaaaacagcgctcccggagatgtgatccttcagtcctggttaagccagcatgccatctctccctctctggcctttaaatacgcgcaaagtggctggttaaaaaaaagaggcaacggcgtatatgcgcgtgcgggacgtgagccggagtggaacgatgcattagcatgtttgcaaaatcagcttgccgctccggtgtatgttgcggggctcaggagcttagtctggcagggccgttcacactatctacagctaaaacaaaaccagtgctggcttagtgtggaaaataaagcgctgctgccgaaatggttcagggaattcccgggtgtggagtggatagtcatatcggggaaaaaactgccggtgctggatgatagataccgtgtaacgcttgatataaaagggaaaaaactcatcggcagtgcgccagaactggctgcttacgagttgctgagcgcggtgccggggaccctctcatttaaccacgctgcagagcttttccaggggctggttaatcttaatcctcgtaaagtagagtatcttctttccgtcagccagtccgtgcaggccaagcgtttgtatctcttcttcgccagtttttacgagcatggctggctcaaacgaatcgatagccaaaaaatcgatctgggagcgggcaagcggcaaatcgtggaaaatggaaagttcaatgctcaataccaaatcacagtgcctgaacgctttcaaaaggaataaaaaatatggatatacaggcgccttattatcggcaggttgctctgctaatgcaggttttaccctatgttgctgtcgaacgggaatttgcgctgaaaggtggcactgccatcaatctctttatccgcgatttccctcgattatcggtggatatcgacctcgcctgggtgcccctggaaagcagagccatcgctttacctcatatacgggatgcgcttgcacgtattgccgccaatctgcaacaacaggcaggtatgagcgctgtattacaagctaatcgttcagatgagatgcgtgtcattgttactaccgatagcgcgcaaataaagatagaggtttcaccggtcgcccggggaacattatatccaccacaggagcgagaagtggtgggggcggtagaggacgtttttggctatgccagccttccagtggtttcgttgcctgacctctacggtggaaaattatgcgcggcgctggatcgccagcatcccagagatttttatgacgtgaaattacttcttgatgcgcaggagcttgaccgtcccattttcaatgggtttatcgcgtatttactgagccataatcggcctctggttgaagtgctgagtcctcgctggaaagatattgctgaacctttttaccgtgaattcagcgggatgacatttgagacgatagccctggaggaactgacagcagtccccaacaggatgattgctgcgttaaaatcctgtttcacacaacaggatgtcgattttttactgtcatttaaacgaggcgaaccagactggcgtttagcgccggaaatgcgtattcaggatttgcctgccgtgcagtggaaattgcgcaatattcatcagatgccagcgataaaacgcgctgagtcattagataaactggaaaaggtgctggccgagtggcgcagttagttacctggcccgcccttgttgaactcagcgtaaaacaggcgtgatttgaataaaccgtatcccttttctcgccatgacacgccgttctcctgtggcatcgccctgatagcgggatctactcgatctaaacattctgcaactgaataaacgcctgcagctcagggagcgttttggcgccgtcgatcgcgttggcggcctgcaggccggcgcagaaggcgtcccccgcgccgacgctgccgataatctcctccggcggcagccgccatgacggtacccagcgcccggcttcggtacgggagacgccccatgccccctccggacaatggatcactacccgctggcgtacgccggcgtcaagcaatgcgctggcggcgcgggcgatattggcgacgtgcggctcgccgttgggtagacgaatctccagcccgctaaactcgctggcttccagttcattgatggtcaggtagtcaagatgcttcagcgccggcaggaccagcggccggtagcgcgggtcgcccttgcgcgacaccagatcgagggacacctcatagcctcgctcgcgcatctgcgccagcagtcgcgcgctgcgggtgccgtacacttcatcggggcgatcgaggctttcgagcagcagcagatagccgagatggaaaattttcagcggcgcatccagcggctcaaaagccgggagatcaagcaggcggttggcgccgggagagtgaaagaaagtgcgctggccttcggcgtcggtcatcacctgggtcatcgaggtgggggaggagctggtgcgctgtacgagctggcgattgatatggtactgatcgagcatggcggtgatgtagtcgccatcgttatcctcgccaatcaggccgaccgcctgcagcggcagcccggcgtgcattttggccagggtcagcaggacattcagcggcgcgccgccggtggcgcgttcgctatggacaatttccaccagccagccgcgctccggccactgcccgatctggtggacatgatcgaccagcatgttgcctgcggcaataatgcctttccgttccatgatcgctactccgcgccgtcatattcgttaagcgtagcgcacaatcggcggaacgattgtgcgccgggttgcgcttatttcacggtccagcctttgtaagagctgacgttatttttgtcgatcatcgtcaccgggatcagtaccggcgcggtcggcgcaggtttgccctgcaggatgtcgtagccaatctccactgccttcgctgccatcacctgtgggtcctgcgctggggtggcgacgaacagcgagttcttacgcttcagcgcctcttcgccgtccgggctgccgtcgacgccgacgatgaagaactcgctgcgctgcgcctgtttcgctgccagatcggcaccaatcgccgtcggatcgttgatcgcgaacacgccgtcaatcttcggattggccgccagcagggaggtcatcacctccaggccgccttcccggctgcctttggcgttctggttggcggagaggattttaatgtccgggtgttttttgaactccgtttcgcagccttcgacgcggttttgtacggcggagaccggcggcccgttgatgatcaccacgttgcctttgttgttcaggcggtcgctaatgtatttacaggccagctcgcccgcctgggtgttatcggaggtgatggtggcgtcggccccttcggcggcgacgtcaaccgccaccaccacgatcccggcctctttggcccgcttcaccgccgggccaatgcctttcgaatctgcggcgttgaggatgatcatatcgactttggcggcgataaagttatcgatctgcgccacctgctggcccagatcgtagccgctggagaccagcgtcactttgacgttatcccccgccagcttgcgggcctccagctccgcccctttggtgatctgtacaaagaacgggttggcaaggtcgcccaccgtcacgccaatcgctttcagctctttggccgacgcaaaaggggaggcggccagcagcgcgccagcacacagcgcggtgactatcggttttaaacgcattcgcttttcctcgcaggtaagatgttgttgttatgcactttgatgatgtcgggtacggtatttgtcgatcagcaccgcaatgatgatcaccgcccctttgatcaccagttgccagaagtaggagacccccatcagggtcatgccgttattgagggtggcgataattagcgcccccaccagcgtaccggtgatggtgccgataccgccgacgaagctggtgccgccgagaatgaccgcggcgatggcgtccagctcgtagccgacgccgaggttgccgttggcgctgtacagccgcgaagcgctcatcaccccgccaaggccggagagcaggccgctcatgccatagacaaacagcagcaccagccagactttgatgccggtcagccgcgccgcctgcatgttgccgcccaccgcgtagatatgcaccccaagggtggtgcggcgcaggataaaccagcacaccgcgatcaccgccagggcgatgactaccagccacggcaccgggccgaggtagtcattgccgatccactcgaagctgatatcggagttgatcaccgtggtgccgtcggccagcagataggcggcgccgcgcagcgccgtgtaggtgccgagggtgacgataaacggcggtagcccggcgaaggcgaccagcgcgccgttgaacaggccgagcagcaggccgagcatcagcgccgccggaatcgacagcaacgcaaactccgggatcagcgacaccaccatcgcggccactgcggtggtgccaaggatggagccgacggaaaggtcaatgccgccggtgaggatgatgaaggtcattcccgccgccagcacaatgttgatcgaggcctggcgggtgatattcagcagattgctttccgtgaaaaagttgggggcgataaagccgaaaacggcgacgatcaggatgaggatcggcagaatgccgacggtctgcatcaggtcgcccatcaacatttttttcgccgaagcggatttcgcgaccggcgcggaggtctctttcggtatgctcatagttgccctgccttaaggtgagaatcggtcacgccggtggccagcgtcatgatactttcctggctaatatcaccggcctgtagctcgccggcgataacgccctcgcgcatcacatagacccggtcgctcatgcccaccacttcgggcagctcgctggagatcatcagaatggcgacgccctggcgcgccatgtcgttcatgatgcggtaaatttcgcttttcgcgccgacgtcgacgccgcgggtgggttcatcgaggattagaatgcgcgggccaatcgccacccagcgcgaaattaacagcttctgctggttgccgccggacagtccgccggcgcgcacctgggcgtgcggcacgcggatgttaagcaactggatggcgtcatcggagatggtttgcgccttccggcggttgagcatcccccaggtcgcgtcgcgctccagcgtcgccatggtgatgttttcctgggctgccagttcgagaaacaacccctgttctttgcggttttcggtcagaaagccgatcccgaggtcgatggcttcccgcggcgagtggatcaccaccggctcgccgtcgatctcaatcaccccggcggtggctttgcgcaccccgaagatcagctgcgccagttcggaacgcccggcgccgaccagcccggcgaggccgacgatttcgccggcatgcaccaccaggctgctgggcttaatcttgccgccatcggtcagatcctcgacccgcaggcgcggctggccgcagggaatgtcccgttctttattgaacagatcgctgagcgggcggccgaccatcatgcgcaccagctccggtgcgttgagcttgtcgcgcaccaggctgccgacatactgcccatcgcgcaggacgctgacccggtcggagagctcatacacttccgccatgcggtggctgatatagatgatcgccatcccctcatcgcgcaggcgcaggatgagctcgaacaggcgctgggtttcccgcgacgagagggcggcggtgggttcatccatcaccagaatgcggctttgacggtgcagggcgcgggcgatctccacctgctgctgttcggcgatggtcagggtcatcacccggtcgctggctttgaactgggcgccgagacggtcgatcaccgcctgcgcctggctgagcatggctttgcgctgcaccagaccgccgcgcgccagctcgctgccgaggaaaatgttttccgcgacggtcaggttcggcgccagctgcatctcctggtagatcaacgtgatcccggcggccagcgcgtccttggggccgcggatcgtttgcggttttccgtcgatcaggatctcgccgctggtggcgctataggcgccggcgaggatcttcatcagcgtgctttttccggcgccgttctcccccatcagggcatggatctcgccgggccagaccgtcaggtcgacgcccttcagcgcgtagaatttgccaaaagctttggcgatatggcgcatttccagtaccggggtggcggtcatcgcggcgctcctgtctgtaagaacaatagctgcagtccaccaccggaaaataaatgcagaatgtcagaatccattcatatttgtcatagtgataaatagttaaccgcgatcacagttacgcggcgtcattttctgcaccgtcacgcttatctgccgaccgatccttcaccggagttgttatgaccgctcgccgacacccgtttttcaccagcgcccgtggccgcctgctctcctttaatctgctgatgggcgtggtcaccctgttggtcagcggcgtggcggtgttcggctttcaccacgccagccagctgcaggagcaggtgcagcgccagactctcaacgacatgcgcggcagtatggatctggcgcgggacacggcgaatgtcgccacggcggcggtgcgcctgtcgcaggtggtgggggcgctggagtacaaaagcgaagcggaacggctgctggcgacgcagcaggcgctgaagcactcgctggcccagctggcggcggccccgctggcgcagcaggagcaggcgcgggtggccaatattattcgccgcagcaacgcgctgcagcagagcgtggcggagatgctggagcgtggccagcggcgccatctgcagcgcaatgcgctgctgagttcgctttaccagaatcagagtaacctgcgccatctcgccgatcttaacgatcgcggctgggataaggcgatcgatccgcgccggctggccgagatggaccggctgatcgtggctgcgatccataccgtcacgccgcggtcgatcgtcctgcaactcgaccagctgcgcggtgccctgccgacacgcagcgccgatcccgcgctggcgtttgtcctccctgatgtgacccgcgagctggcgacgctggccccgctgtcggcccagctggaggagagcgacctgacgatcagctggtacatgtatcacatcaaagcgctggtcgcgttgcttaacgaagatatcaatcagtacgtgacccgggtggcggaagcctcagagcagcgggcggcgcagagccatcgggagctgcgctccatcagtatgtttattctgctttccgcgctgctggcgctggcgatcaccggctgcgccgggtggtacatctaccgtaatctcggctcgaacctgaccgccatctcgcgggcgatgtcgcggctggctcagggagagccgaacgtctcggtgccggccctgcagcggcgcgacgagctgggggagctggcgcgggcctttaacgttttcgcccgcaatatggcgtcgctggagcacaccacccggctgctgaaagagaagaccaaccagatggagatcgatcggattaagcgccaggagctggaggaggcgctgctgcatagtcagaagatgaaggccgtcggccagctgaccggaggtctggcgcatgactttaacaacctgctggcggtgattatcggcagccttgagctggtggagccggatgcgcgcgatgcgccgcgcctctccagggcgctgaaggcggcggagcgtggggcgcttctgacccagcggctgctggccttttcgcgcaagcaggcgctgcatccccaggcggtggcgatggcgccgctactggagaacctcagcgagctgatgcgtcactccctgccggcgaccttaagcctggagattgaggcgcagtcgccggcgtggccggcatggatagacgttggccagctggaaaacgccctgatcaatctggtgatgaacgcccgcgacgccatggcggggcgcgacggggtcatcaaaatacgcacctggaatcagcgggtcacccgcagcagcggccagcggcaggatatggtggccctggaggtgatcgatcatggcagcgggatgtcgcaggcggtgaaagcccgggtgtttgaacctttcttcaccaccaaagccaccggcagcggcagcggcctggggctgtcgatggtgtatggctttgtgcgccagtctggcggccgggtggcgctggagagcgcgccggggcaggggacgacggtgcggctgcagctgccgcgagcgttgaccgaggttgagaaggaggtggcgccagcggtggacgagccgtccccggcgggcgagcggctggcgctggtgctggaagatgaagaggatgtccgccagacgctatgtgaacagctgcatcagctgggctggctgacgctggaaaccgccagcggtgaagaggcgctgcagctgctggaggcctcgccggatattgccctgctgattagcgatctgatgctgcccggggccctgagcggcgccgatgtgatccataccgcccgacgccgctttccggcgctgccggtgctactgatcagcggccaggatttgcgtccagcgcagaacccggccctgccggaggttgagtggctgcgtaagccgtttacccgagcccagctggcgcaggcgctgagcgcggcgtacgcgaggatttgagattcctccgctacccgggtttcatgcggatgattaaggtagcggcaggactctgatgagattggccccgatgaaacgttacgcaaccgcactgctcttttgcactctgtcgctgaccagcctggccgctcgcgccgatattatcgatgacgcgatcggcaatattcagcaagccattaacgacgcctataacccgggcagcagtcgctccgatgacgacgacagatacgatgacgatggccggtatgatgacgggcgctatcaggggagccgtcagcagagccgtgacagtcagcgccagtatgacgagcggcaacgccagctggacgagcgccgccgccagctggatgaacgccagcgtcagctcgaccgcgatcgtcgtcagttagaaagcgaccagcgtcgtctggatgatagctactgatcgccccccgcaggccagcgcttaatccagcgctatttccatcccgtcatagcccgcttcgaaacctgtcggcagcgggttatccatcatccagatgtcaaactggtggctgatatgggtgaggatcacccgcggacagccaatgatctggttaaggctgcggacggtgtttagatcgttatggttacgcggggtctgcgcgcgcggctcatgactgcagtcgatgatcatcgcctgcgggcggttattgagcaaaaacttcagcgacttgtccggcagcccggcggtatccgagagccaggccagccggctgtgggccgactccagcagataaccaaaggtcagcttcgagtgattaaggggtaggggcgtcacccgcagcccctgcaggttaaacatcacaaacggcgtgacggtatggctaaagtcaagcagaccggggtgtttgagcagatcgtcgcagccggcgtcatccggcgggccatagaccggaatcgacgcgccgactccccagcgcagcggaaacagcccatgcacatgatccagatggtagtgggtcagcagcacctgttgaaagctgccggcgggatgatgctccatcagatccggtcgtccggcatcaagcagcgtcacggcgctgttgaacgtgaccactccgctacaggggcggcgtcggtggctctcctcgcggcgggcgcggcggcaggccgcgcagtcgcagccgaagaccggcaccagctgagcgccgccggtgccggttaagcggagggtcaggctcatcgtgtcaccttttgtttataccagttgatccgcttcgcgcgccgcgtggctgcgcagcaggcggaaaaattcatcgaccgattgtcggagactgccgtcgttattcaatgtcaggcagttgtccggcttatagcgcgcggcgcgttccagacgctgggcgatttccagcgcgttttcccggccgcgctgctccagccgctggcgcagcaccggcggcgagacggcgagacagatcggcaccagcacctcgccgtaacgttcccgggccagcgccaggtgggcgcgggagccgttggccaccacgtcaaagccggcgtgcagccagaggtcgatctccacgccaatgccatagtaagtattgttggcgtgccagctgagagcaaaaagatgctgctcggcgcgggtaaaaaactcatgttcgctgagggcgatatgattctcgctgcccgcgttaaacgggcgggttatgtaacgatgggccaccagcagctgcgggtgctcgcgctggcgcagcgccgccagcaggctatctttaccggagccggaggggcccaccagccaaatcagttttcctggcattaaaagaccctctttccctggcgccagacatggtcgatctggatatgttcgccgcgacggtgcgccagcaccaggtcggcgcgtttcccctcggcgatgacgccgcgatcgtcaaggcccagcgtctgcgccggatgctgactgaccagacggatcgcctgtggcagggtgaaggcattgtcctcggcgtcggcgatgcggaaagcggcatccagcaggctggcggggtaatagtcagatgagaggatgtccagcaaaccgtggctcgccagctggtgggcggcgacgttgccggagtgggaaccgccgcgcacgatattcggcgcccccatcaggacgtgcatcccgtgctgacgtgaagcctgcgccgcggccagggtggtgggaaactcggcgatgacgctacccagctggtgggattcagccacatgcgcctcggtggcgtcgtcgtggctggcgagggcgatacggcgggcgcggcacatggcggcgatggtctggcgattgggctgcgaccaggtggcggccagagccatctgctcggcttcaaaacggtccatttcgtcatgcgtcagatgatattttccctgatagtaatcgcggtacttgctgcgatcggcgtactgacgctggccgggcgagtggtccatcagagagaccatgctcaccgactcgcggtcgatcagcttttcaaacagcggcagcgtggtgtgatgcggcagctcgcagcgcaggtgcagacggtgctctgcgcggttaagaccgcgcttttgcgtctcttccaccgcattgaccatcttctccagattctcaagacgatcaccgccatcgcgcacgtcgccaatcgccacggcgtccagcacggtggtgatgccgctggcgaccatcatggcgtcgtggctgctcatcgccgagtgggccggccagtctaccttcggccgcggggtaaagaacttgtcgaggttatcggtatgcagctcgataaggcccggcagcagccagccgccttccccatccagcgcctgcggcagccggctctggctttcggcgaaggcgaggatgcgaccgtcctggacttccagcgaaccgtggaccacctcgtcgtcgagaaccagttttacgttattgataatcatgctgtcattcccatagagtgcagtcggtcggcgacctgacggcgtaccccttcgtcatggaaaatccccacgatggccgcgccgcgcgctttggcatcgtggatcaggttgaccacggcagcactgtttttgtcatccagtgaggcggtgggttcatcaaggagcaggatcggatagtcgaccgcaaaaccgcgggcgatgttgacccgctgctgctcgccgccggaaaaggtggacggcgcaaggtgccacaggcgttccggaacgttgaggcgggtcaggagctgggcggctttcgcggcgctcgcttcgcgcggcgtcccaagatcgagcagcggctgcatcaccacctccagcgccgaaatgcgcgggatcacccgtagaaactggctgacccagccgatggtggttttgcgcacttccagcaccttgcgtggggtggcggtgaccaggtccacccattcgtcgccgtggcggatatggatatggccgctgtccggcagataattggcgtacagcgaacgcagcagggtcgatttgccgctgccggagtgaccgtggagcaccacgcactccccggcgttaacggtcagcgaggcgtcggccagcaccggcagacgcacgccgtgctgctggtgcagaacaaaggttttatggacgttttcaacgcggatcatgttagctctcacgaggttgggttgccgggtggcgcttcgcttacccggcctacgaataacgcacctgtgggccgggtaaggcgcagccgccacccggcaaaacagcattaattctgcaacaccgacgacaccagcagctgggtgtaaggatggtgcggatcgtcgagcacccggtcggttaagccactctccaccacctggccctgcttcatcaccagcagacggttcgccagcaggcgagcgacgccgagatcgtgggtaacaatcaccaccgccagattcagctccaccgccaggccgcgcagcaggtctagcagccgcgcctgcacggacacatccagcccgccggtgggttcatccataaacaccagcttcggctgggtgaccagattgcgggcgatctgcagacgctgctgcatgccgccggagaaggtggtgggcaggtcgtcgatgcgcgagggcgggatctccacctcctgcagccacgtttcggcggtggcgcgaatgttgccgtagtggcgggcgccggtggccattagccgttcgccgatgttgcccccggcagagacctggcgacgcagaccgtccatcgggtgctgatgcactacgccccattcggtgcgcaacaggcgtcggcgttcggcttcgctcatggcgtacagcgagcgctgctggtacagcacctcgccctgctgcggcgtcaggcgggcggagattgccttcagcagggtggttttaccggagccggactcgccgacgatgccgagcacttctcccggccacagctcgaaggagacattgcgaaaacctttatccggggcgtagagatgagtcaggttattcacagcaagtaatggctggttcattttttctgcccctcgctctgctggcggcaatagtcggtatcggagcagacaaacatccgctggccgctgtcatccagtaccacttcgtcgaggtagctgtggcgcgagccgcagatggcgcagggctcatcccactcctgcacggtaaagggatggtcgtcgaaatcgagactctccaccggggtatagggcggcacggcgtagatccgcttttcgcgcccggcgccgaacagctgcagcgccggcatcatgtgcattttcgggttatcgaatttcgggatcggcgaagggtccatcacgtagcggccattgaccttcaccggataggcgtaggtggtggcgatatggccgaagcgggcgatatcttcatatagtttcacctgcatgacgccgtactcttccagggcgtgcatggtgcgggtttcggtttcacgcggctcgataaagcgcaatggctccgggatcggcacctggtagatcaggatctgatcctccaccagcggcgtctccgggatccggtggcgggtctggatcagggtggcgtcttcggtacgctcggtggtggcgacgccggtgacgcgcttaaagaactgacgaatcgacaccgcgttggtggtgtcatccgcgccctggtcaatcaccttcagcacgtcgttctcaccgatgacgctggcggtcagctggatgccgccggtgccccagccgtagggcattggcatttcgcgcccgccgaacggcacctggtagccgggaattgctaccgctttgagaatagcccggcggatcatgcgcttggtttgctcgtcgaggtaagcaaagttatagccagtcagtgggttagccacgttcgttctcccgttgcaggcgtttcagcagcgccagttcggcctggaaatcgacatagtgcggtggcttcagatgcgagacgaagccggccgcttcgacgttatcggcgtgagccagcacaaactcttcatcctgcgccgggccggcaatctcttcgtcatagtccggcgcctgcagcgcacggtcgaccagcgccatggccatcgctttgcgctcgctcatgccgaaggtcaggccgtagccgcgggtgaagtgcggcggctcctcctgcggggcgacgaagccattaaccatctcgcactcggtcagcagcagctcgccaatattgacgctaaagcccagctcttccgggacgatttccacctgcacgtagccgctgcggatctcgccggcaaacggatggttgcggccatagccgcgctgggtcgaataggccagcgccagcaggtagccttcatcgccgcgcatcagctgctgcaggcgcgaggaacgcgagcaggggtagaccggcggggtgcgggtgatatcgtcgggcggcgtgccgcgatcttcctcggtcttcgccagcccctgctgcgtgagcaggctaaagacgtgcggcgtcggctctgcttcgccatcggcttgctgcacagacggcgcttcgccattggccagcagggtaaaatcgagcaggcggtgggtgtagtcgtaagtggggcccagcagctggccgccggggatatctttatacactgcggagatgcggcgttcgaggcgcatctccgcggtattaatcggttcgctgaccgccagccgcggcagggtggtgcggtaggcgcgcagcagaaatattgcttcgacgttatcgccgctggcctgcttcagcgccagcgccgccagttcgcggtcggcgatgccgccctcggtcatcacccggtccaccgccaggctgagctggtcgcctatctgttcgacgctcagttcgggaagccgtccatcgccccgtcgtttctgttcctgtaaggcgtgagcggcgcggatcgccttctcgccgcccttgacggccacgtacatttagcacacctccacgtgggtggtgcgcgggatcgccagcaggcgctcgccgcaggtgaggatcaggtcgatgcccagcgggaacggatgcgggcgttcggttaattcgtcgatgatgcagtccggcagctgcggcgcgatcattcgctcttcggcaatgcctgccccggtcaggcgcagcatgcgtccgccgctgaggctggcaagctgaacgatcagtgtgacgccggtttccggcgcggtgacggtgccagcggaaaggacgttgagctgctcggcgctgataccgtcattggcgacggcaaagaccgcctgctgcggctggtccaccagcggcgcgccggtatgaaagcgcagattctgtcccaccagatcgttacgcagagcgctggcgagccagaccggtgtttcatgatcggcaagggtcaacagcaggctggtggaggccacgttcaatggctgccagccgtgctgaagctgctgcagggagacaatcacccccggctcgctcatcgctttcagcaggcgacgaaaactgtgttgggcatcctgcacagccagggtaaaagcgggttgtaaggtcatacgttatctccgcgaaccagggtaaagaagtcgacccggctggcgttgacttcggcgcgtcgggcttcaatgcgcgcgctgcgtagcgcttccagcggggttatcagagtttccattaaggtgtgaaaatggcggggcgactgcagcagggcgtcgatcgccgcgcagcgttcagcgtgcgggcggtcgcggcctaagatccagctgtaaccgagggtaccgtcagccaggcgtaccgctgcgcgggtaagggtggcgtcgccggcaaagaagcggtcgccgataccgcccatgcgggcctggagctgtaccagcccggtttccggggtgcgaatcaattcatattccggcgccagctgcagggactgcatgcgcgccagaaggtcctgcggttcactgtgggccagcacggacatccagcgctggcgggtggcggtatcgaagtgcattcagtgctccatggtaaattcaatcatgtcggcgcgggtcaggctgacggagtactccgccgtgcgcgactcgccctcgcggctattgagcgtgcggacgcagagcagcggcgccatattggggatttccagcagcttgctctcttttgcctgcgcgcggcgggcgctaattttggtgcgtacgcgggtcagttcgacgtcgagccgatcgcgtagcagatcgtgcagcgagccgtggctgaaggtctgtagcaccggccagaagcgcaggtcagcgaagtagtggtcgatcaggcacagggcgacgccattgacccggcgcagggtacgcaggtggatcacgttctcgccctcattgatgccaaaggcctcggcgacatgggcgctggcggggcgcagcaccgacagcagcttttcgctggtgggatcgctgccttgttccagcaggttttggctgaagcgcgcctgggcgttaagcgggtagtcgatggggcgcatcagcaccagcacacccacgccctgacggcgctgaacccagccgcgctcaaccagctggtcgatagcccggcgcagggtgtggcggttaacgtcgaagcgcgtcgccagctgctgctcggcgggcagatagtcgccgcagcgatagtggtggcgcagctcctgctcaagtcgggcggcgatttcctgatagcgcgtggggtaactggtcggatgtctggacaggtgcatggtcatcaagcctcacacagcataggcgaggagcttcctcgcgttgtgggccgatcctgaccggtttatgttgcatttcggttaagtgacgatgaccaaaggatgaagagttgatgccaggcggatgacagggcggccgggccgccctgggggcgtcagccttgtttgaccacgttgatcatccaggggacgccaaagcggtcgacgactttgccgaagccgtgggcccagaaggtttcctgccaggccatctcaatgcgcccgccgacagccagcgcgtcgaaccagcgctggccttcagcgacatcgctgggatcgaggacgagggtgaagccggcgtaatgcacatcgggcccgaaggcgctgtcgctcagcatcagctggccattattgatgcgcaggctggcgtgggcgatagcatcatccgccatcttctggccagacgggcagccgtctgacgcttcctgcgccgggggcggcatttcgccaaaggtcattttaaacatcagctctgcgcccagcgtctgctggtagaaggcgatcgcctcggcgcagttgcccgcaaaggcaaggtagggacttaaggacatggtgaatacctcagtgaccgtaacccgtaaagcgtagtcgcccggcaggcgattgagccagacggcagggcgaaaaggggcgctgaaatatgacggcaggcgacagcgtaaatagcggttgccggcgagggaaataacaggatgcgccgggggacaaacggccaccaggatatcgggagcggcgacggttatgtgaaaaaataatcgtgccgcctacccgaaattaaatcagttctttttcacaaattccgatttgagcttcatcggaccaaaaccgtcaattttgcagtcaatattgtgatcgccttcgaccagacggatatttttcactttggtgccgattttcagcatcgaagagctgcctttaaccttcagatctttcacgacggtaacgctgtcgccatcggccagtaaattgccattggcatctttaacgatcagaatgtcgctctcttccgtcgcctcggcagggttccactcatgggcacattccgggcagatgtacatgccgctatcttcataagtgtaagtcgaatcgcattttgggcagtgtggcagttgcatgacgctcctcatgatgtcgtcgaaaaacaggacgttggtcctttaaacagcggctgagagccgaaagtgggtatgattatagcgcaatcacccacttttgtcgggtgtttttttgctaaaaagtagccgtggtattattccgggaaaaagcgaataaacgctgaaattaaccgcccgaagtggagcaaaatcgaagaaataatttccgcgcgatcggcaggaaatgaacttatttattttccgacactctgtaatgaggcggtaaatttctgtgaagttgatcgcagatataaacactgttagggtaaaaaaggggagcaggtcaatttcatcaagcatcacgatgagccgctccatttattcaccagtagccagagcaggcgtcaacaggttcggttgtacattctgtcagcagacagtgcaggcaaacctgctacgcttgaaatgaggagcacagcaattcaccgctcctgacgcacgatgcgaatggccttgccattcggcgaagaggcgtgcactcaaggcggagtagcagaggaaaaatatgcttaaaaggaaaaaaataaagcccatcacccttaaggatgtgaccatcatcgatgatggtaaactgaaaaaggcgatcaccgcggcctccctgggcaacgcgatggagtggttcgatttcggcgtctacggctttgtggcctacgccttaggtaaagtcttcttccccgatgccaacccaagcgtgcagatgattgccgcgctgggtaccttctccgtaccatttttaattcgtccgttaggcggcctgttcttcgggatgctgggcgataaatatggtcggcaaaaaattctcgcgataactatcgtgatcatgtcgataagtactttctgtatcggccttattccgtcgtatgccacgataggtatctgggcaccgatcctgctgctgctgtgtaaaatggcgcaaggcttctcggttggcggtgaatataccggggcgtcgatcttcgtcgcggaatactctcctgaccgcaagcgcggctttatgggcagctggctggactttggctccatcgccgggtttgtgatgggggccggcgtggtggttctcatctccagcgtggtgggtgaacagaactttctcgactggggttggcgtatcccgttcttcctggcgctaccgttaggtatcattggtctctacctgcgccatgcgctggaagagacgccagcgttccagcagcatgttgacaccatggagcagggcgaccgtgaaggactgcaggacgggccgaaggtctcttttaaagagattgccaccaagcactggcgtagcctgctgacctgtatcggtctggtgatttccaccaacgtgacttactacatgctgctgacctacatgccgagctatctgtcgcataacctgcactactcggaagatcatggagtgctgatcatcatcgctatcatggtcgggatgctgtttgtacagccggttatcggtatgctcagcgaccgtttcggccgtcgcccgtttatcctgattggtagcgtggcgctgtttgccctgtcgatcccggccttcattatgatcaacagcaacgtgactagcctgatcttcgccggcctgctgctgctggcggtggtgctgaactgctttatcggggtgatggcctcctcgctgccggcgatgttcccgacgcacatccgcttcagcgccctggccagcgcctttaacatctcggtgctgattgccggtctgacgccaaccctggcggcgtggctggtggagaccacccaaaacctgatgatgccggcgtactacctgatggttatcgcggtggtgggtatggcgacgggcctgtcgatgaaagagacggctaaccgtccgctgaaaggggcgaccccggcggcgtcggatatccaggaagcgaaagaaatccttggcgagcactacgataacatcgagcaaaaaatcgaagatatcgatcaggagatcgccgatctgcaggcaaaacggtcgcgtctggtgcagcagcatccgcgtatcaacgactaaccgttttcactgttaatcatgccgccaggggaaaccccggcggcattttttatgccttcggcaaggccaggccgtgacgccgctgctggctgagtttacggtactgctgcggcggcatgcccacgtagcgggtaaaagtgctgtagaagcgactgctggagcgaaaaccggcggtaagggcaatatccaggatggtcttgtcggtatcgctcagcagcgcccgcacatgattgatacgcatggcggtaatgtactgcttcatggtctgctgcatcacccgctgaaagacccccatcgcgtagttcgggttgagcttcacgtgctcggcaacggcattgacggtcagcgcctggtcgtagtgggcagcgataaactccagcatctggctgacataaaactgcgcgtggcgcgagacgctgttcttgtgggtgcgtgaggttttattgaccagaatcggctgccagccggcgaggctcagccgcttcagcatcagggcgatttcatcgatcgccagctggcgtatctgttcattctcgtggctcagttcctgctgccagcggcgcacttcgaaggcgctcaactgctgcgcggcgagggatttaatcaccatcccatgggtgacgtggttgataagctcccggtccagcggccatgagagaaacagatgcatcggcaggttgaatatcgccatctgctggcaatcgccggggcgggtcagctgatgcggcgtacaggcccagaacagagtgatatagcctttctcaatgcgcaccacttcgttattaatcaaatactccacgtcgccatcgaacggcacgttgacctccacctggccgtgccagtggctggtgggcatggcgtgcggcgggcgcagttcgatatccatacgctgatactcggagtagagcgccagcgggctgcggctctgcttttcgtcgctgctgcacataaagggatcggggggcagagaggtgaagcggtgttccatcgttagcgtattcctgaattgtcagagtggctgcatttttcgccagaactgacgacagcttagcggaagaatcggcccattttctctcctttttgctcaatctgttcccgaaatctcagattttgtggcgcttaatggccgatctgagctttcgggaatgctccggcgggaacagggcagcgcagcggggagcggcgtgccactctgcaagtgttcaatgacctgatggagagtgcgtgatgtctgccccaaaaattacttttatcggcgccggttcgacggtgttcgtcaaaaatattctcggtgatgttttccagcgcccggcgctgaaatcggcgcatatcgcgctgatggatatcgatgaaacccgactggaagagtcgcatatcgtggtgcgcaagctgatggattccgtgggcgcgaacggcgaaatcagttgccaccgcgaccggaaaaccgccctgcagggcgccgattttgtcgtcgttgccttccagattggcggctatgagccctgtaccgtcaccgattttgcagtctgcaagcgccacggcctggagcagaccattgccgatacgctggggccgggaggcattatgcgcgcgctgcgcaccatcccgcacctgtgggctatctgcgacgacatgagcgaggtctgcccggacgccaccatgcttaactacgtcaacccgatggcgatgaacacctgggcgatgtacgcccgctacccgcatatcaagcaggtgggtctgtgccactcggtgcaaggcacagcggaagagctggcgcgcgacctcgatctcgatccggcggatttacgctaccgctgcgccgggattaaccatatggcgttctatctgtcgctggagaaaaagctcgcggacggcagctacgtcagtatctaccccgacctgctacaggcctacgccgacgggcgggcgccgaagccgaacctgcacggcaatccgcgctgcgaaaacatcgtccgctatgaaatgttcaaaaagctgggctactttgtcaccgaatcgtcggaacatttcgccgaatacacgccatggtttatcaagccgggccgcgatgaccttctcgctcgctataaagtgccgctggatgaataccctaaacgctgcgtcgagcaactggccaactggcatcaggagctggagagctataagcgcggggagcgcattgaggtgaaaccctcccgcgaatatgccagcaccatcatgaacgccatctggaccggcgagccaagcgtggtgtacggcaacgtgcgcaacgataatctcatcgacaacctgcctcagggctgctgtgtggaagtggcctgcctggtggacgccaacggcatccagccgaccaaagtgggcgcactgccggcgcatctggcggcgctcatgcagaccaatatcaacgtgcagacgctgctcacgcaggcgatcctcaccgaaaatcgcgattacgtctattacgccacgatgatggatccgcacaccgccgcggtgttggggatcgaagagatctacgcgctggtggacgatctgatcgccagccacggcgactggctgccggcctggctgcaccgttaatcctcttatgccgccgggggcaacgaacccggcggtgcctgtcacgctctatcaaacgctgaaggaggcgctggcgacagcgacctggaccctatgagtatttcaatgacaacaaagctcagctacggatttggtgcctttggtaaagatttcgctatcggtatcgtctacatgtacctgatgtattactacaccgatattgttggcttatcggtcggggtggtcggcaccttgttcctggtggcaaggatcctcgatgcgatagccgatccgattatgggatggatcgttaactgtacgcgatcgcgatgggggaagttcaaaccgtggatcctgatcggcacgataaccaactcggtggtgctgtatatgctgttcagcgcccaccacttcagcggcggggcgctgctggcgtgggtgtggctaacctacctgctgtggggcttcacctacaccatcatggatgtgccgttctggtcgttggtgccgaccattaccctcgataaacgcgaacgcgagcagctggtgccttacccgcgctttttcgccagtctggcgggatttgtcacggccggcgtcacgctgccgttcgtcaacgccgtcggcggcgccgatcgcggtttcggttttcagatgttcactctggtgctgatcgccttcttcgtcgtttccaccctcgtcaccctgcgcaacgtgcatgaggtttactcctccgacagtggtgtgagcgaagactccagccacctctcactgcgccagatggtggcgctgatctataaaaacgatcagctggcctgcctgttaggcatggcgctggcctataacacggcggcgaacattatcgctggctttgcgatttactactttacctacgtgattggcagcgcggagatgttcccgtattacatgtcctacgccggggcggcgaatttgctgacgctgatcctgttcccacgactggtaaaagggctgtcgcggcgcattctgtgggcgggtgcttcgatcatgcccgtgctgggctgcggcgtgctgttgctgatggcgctgggcggcgtttacaacatcgcgctgatttcgctggccggggtgctgttgaatatcggcaccgcgctgttctgggtgctgcaggttattatggtggccgataccgtcgactatggcgaatatacgatgaatatccgctgcgaaagcatcgcctattccgttcaaacgctggtagtcaaagccggttcggcgtttgcggcctggtttatcgccatcgtgctgggtatcatcggttacgtgccgaatgttgtgcagtcgtcccacacgctgctggggatgcaggcgattatgattgcgctgccgacgctcttttttgctctgacgctgtttctctatttccgttattacaaactgaatggcgatatgctgcgacggattcagattcacctgctggataaatatcgccgggtaccggaaaatgacgtcgagccggaacggccgattgtggtacccaatcaggtgtaaaaagcgtgcgaaaaccgctgacgaaagaggggagggatgctctctttttgagcaaaaaacagtgtcttaaaaagacagaaagagaaaactgtagttctctattttatctcaattatttctctttttgagcgttctggactgtttgtttctccgattgttctcaaataaaactcagaattgtctctttttcgtgctcttgcgctgctttttaactcttgctactctttttgggtcttacatttttctcttatttgtctcagtgatggagcaatgcaatgcgcatttttatcgatgatggttcaaccaatatcaaaatgctgtgggagcaagatggcgaaactttcacccatatcagccccaacagttttaaacgcggctggtctgccaccttcggttcggggaagccttttaactacacggtggatgatgaaaagtactcattcgacctgatcactcccgatgcgctcccaaccaataacattgactggcaatatagcccgttgaactccatcgctgtccatcatgcgctgctgaccagcggtcttgagccacaggatgttgaaattgtggtcaccctgccgctgaccgaattttatgatgaagatgcgcaatatcgcctcgacaatattgagcgcaagaaaaagagcctgctgcgcgaagttaaactgaataaaggcgtggtgttcaatatcactaaagttaccgtgcgcccggaatcgattccggcgggcattagcctgtgtgatgagctgaaaccgtcgcattcggtgctgattatcgaccttggcggcaccacgctggatatttcaatggtcgccgggcagatgacctcggtttcgcgcatttacggcgacccgaagctgggcgtatcgctggtgaccgacgccgttaagctggcgctggcccgggcgaataccgacacctccagctataacgtcgaccagataatcatcaaccgccacgacgaagaatacctgaccgacaacatcaacgatccggatgcggtttctgaggtgaagaaggtgatcaataacagtatcgaacgtctgaccacgcgtgtcctgacggccatcgatagctttaaaggctattcgcacgcgatcgtcattggcggcggcgcgccgctggttgccgacgccattcgtgaacggatgggtctgcgcgaggatcgtttcgtggtggctgaagagccgcagtttgccctggtgcgtggtctgaaaattattggttaaggagcgtctatgactctggatcgcagaaaagtgctgatttacctgcgcccggatatcagcgccagcgagcgcttcgcggacgcaaaaattgaggcccatcaccgtggcgaccgcggcgatatgtcgcgtaccgcgctgctggcggggctggcgttaggggaagtcgatagccgcttgccgtcgatgctggcggcgctgctggcggaagatactaaaccggaaacgctgcgtaagatgctggcctcgttccttgagatccagccggcctctcccgccccggcagccgcggcagcagccgccccggctaaggcgccggagccgcccgcgccggtgagcgagagcgtctccgcgcgtaatctcgccggttcgttaccggattaagcgctattcccggtttgcgcgacccgggaaactccccggcttgcgctgcgcttagtttgtaggccgggtaaggcgtagccgccacccggcatacaggcggccccctggctggggccatgcccggcggcgctacgcttgcgcgggcctacggatccagtgcaatggtgggcccagtgccatttgtaggccgggtaaggcgtagccgccacccggcgcgaagacggaacgccacgacccgggatggcacccctatccgtgggcgaggaagcgcgccaggcgctgctgcagcaggcgattttcgcgggtcagccgcgcgttctcatccagcagggtcagcgccaccgcaattcccggccagtccagctccagctcgttacgcaggcgtaccgcgcgatgcacgatcgttaccgcgctgtcgtcgaacagccaggtgtccgcctgcggctggtgtggctcaatcatccctaagccgacgatctccgtcagctcctcttccgacaccccggtacgcaggcacaattcggtaatggtaaacgtcactgttactgtagccatcagactttcccccatgtcttacgcggatcgaagctggcttcggcggcggccaattgttgccagagctcacgcgctttttcatctggttttggcggcatcactattttaataacggcgaacaaatcgccggtgtgggttttgctcacgagtcctttccctttgatacgcagtcgctgccctgcctgactgcccggcggcaccgtcagcagaatgctctctttcagggtgggcaccgtcactttcgcgcccagcgcggcctcccatggcgccagcggcaggacgatctccaggttatgaccgacaatatcgaatagcggatgcggggcgatgtggataaccagccacagatcgccgttcgggccgccattctcccccggcgtcccctggcctttcaggcggatacgctgaccatcgactaccccggcggggatcttcacattcagcgttttcggcgtttcgctttcgatcatgccaaacacgttgtacaccggcaggttatagctgatggtgcgcgtctgctcggccagcgtctcttcaaggaacaccgccacttcgatctccagatcgtggccgcgcgccgcgtgttgacgacgacgctgatgcgtctgctggccaaacatggaggagaagatgtcgtcgaaatcttgctgactgtagctctgctcgtgggtctgtcgctggcgaccgaagccgggatcgttgcgatgctgccagagctgatcgtattcggcgcgccgttgctcatctttcaggacttcccaggcttcggcgagatccttaaatttggcttcggcatcgttttctttactgacgtcggggtgatatttgcgcgccaggcggcggtaggcggtcttgatggttttcagatcgtcggttggttgcaccccgagaatggcataataatccttcaattccatgatcttatctcatctatgctcagtgcggtggttacatattccctggaacaggcgtcagtataaagcgtagggcaaatgcgccctgacggggaagaaaagtggcggaaacttgacgccgtcggggtcgacggcgccgtggataagattagtctttcgcctgcggccgtgggcggcggcgccatccggtgaatagcaccagcagcgcgccgacggcgccagccaggcgcgcggtgccctcgccggcgctgggaaacagctggcgaatggtagggtcgctgaccagcgttgacccggcaatccagccgatgagcatcccgcccagcagcaccaccgcgggaaagcgggtgagcaggaccagcaccagcttgctgccggcgacaataaccggaatgctgatcgccacgccgagggcgaccagcgcaatgtgccctttccccgcagcagctaccgccagtacgttatccagcgacataatcacatcggcaacggtgatggtgatcgcggtgcgccacaggctgccagagctgctaacctcgctctcttcttcctcattcctgaccagcttgatgccaatccacagcaggagcagcgcgccgactattttcagccacggcagcgacaggagatacaaagcgatcgccagcagcagaacgcgcgccaggatggcgcccacggtaccgatgatgatcgctttggtgcgtttctgcggcggcagtttgcggcaggccatggcgatcaccacggcattgtcgccacccagcagtaagtcgatggcgacaatctgcagcataatcactgccatgtcccattgttgaagaaatgcatacatatcgagagaaaccacctgaaaaaagagcaagaaaaaccgctgcgcagggtactccgcctgggccgcgttgaccactggcgcagacctgcgctatcgcgcgggaaagagagagcctgaaaaataaagttacgaatcaaggcgccgttgggcaaggcttcggcgaaaaagggtgatattttgtcacccagactcacctgccgttcacttatcgcaaggatccccactatgtctggccacaagaaatacctctctgtcgccctgctgagcgctgtcttactgccggcgatggcctctgccgctgacgcgccggcgactttcaccccggaacaggaggcgaaaatcggcaaaatcgccgccgactatctggtcgcccacccggaagtcctgctgcaggcgagccagaaactgcagcaaattcaggctgagcagcaggccagcgcggccactcaggcggtgctgaagaacgccgccgtgttgacccaggataaaaataccccgacctacggcccggccaatggcaaagtcacggtgatcgaattcttcgactaccagtgcgtctactgcagccgtctggcgccggtgatggagcaggtgattaaagcgcacccgcagacccgcttcgccttcaaagagtggccgattttcggcggccgctgggaaagctcgctggaggcggcaaaaaccggcctgcagatctatcaacagaaaggggcggatgcctatctggcctaccataacgggatttacgctaccggccataacgaaggcaagctgacgacggcggatatccagcagcaggcgaaaaaagccggctttgatgcgaagaaggccgccgacgtcgaaccggtgctgcagagcattaacgatctggcgcaggagattggtctgagcggcacgccgggcgtgatcgtgatgccgaccaccggcgccacggaagccagcatcaccgtctgcccggggctggcagacaaagcctcgctggaagccgccatcaaaaaagccggcggctaatccccggcgtattacctgtccaggccgccgacggcggccttgctctcatgcgtcatcgctctcttcctgcggcggcggtaacgcgtggctttttaaatcaataatctgcccgatttgatcgtggtaaacggtgagcaaattatagcggctcatctccgagataatctgcggcgcgacgttaaagctgctcgccagctcatcgtcgcgcagagcgagcaccgcggtatgacgccgggtacgggcgcggcgccggttgtagtgataccagaggatcaacagccagccgttcagcgcggcaatcagcagatacaccagcgccgtattcagggagtccatcagcgattcccagcgcggagagggcggcgcgatgaactgcatcagcaaattggcgtacagaaagaacagaaaaccgagccaggccagcagcgttaagccggcgtcgaccagccggggtagcacccgatgttcggttaagatgagcgtattttcattcatcacaggcttccttttccccggtccggactcacccagcgcgcgcgggaacgttgacgtttcaccatcactttcggaaaagcgaccagcgtggtcagcaggccgatcatccagtagaccatcgggaaccagatcacccagaacagcgatttggcgacctttttctcatagcgccgctcgatatacaggctggcgacgaactgcagcaggcacatcaggccgagcagcatgccggtgaattccggtggaaacaggctatgcaccgccagattgtcaggcagcggcatcaggcggctgaggataaacagcagaatggtgatcgcgtaggcaaaggcccacagcgtggagcaggcatactccagaaacagcggccacatccggtgatgctgccagtgaaacaggcggcgcagattgaccagaaagacttcggcgccgccctgggcccagcgcagacgctgcttccataaccctttgagggtctccggcatcaggatccagcacagcgctcgcggctcgaaaaagatgtcccagtggcggagctgaagcttccagctgatatcaatatcttcagtgatcatatccgggctccagtagccgacgtccgccagcgcctggcgccggaaggcggcgattacgccggagacggtaaagacccggccatagatccgctgcgtccgtttgataagcccaatgatcgacgagaactccccaacctgaatgcggccgatcagcgtggatcgggtgcggatccgcggattgccggtgaccgccccgacgtgcggataatggatcaacggcgcgaccagccaggccgcggtatcccggtccagcagggcgtcgccatcgatgcagaccagcagatcgccgcgggcggcggcggcgcccgctttgagcgccaccgcttttccctgattggcggccagatggatcacccgcagcctcggctcctcctgcgccagctgctggagcacctgggcggtgttgtccgaagagccgtcgttaatcgcgatcacttcaagattggcgtaacgctgggccagcgctgcgctgatggtttcccgggcgtttttctcctcgttaaagcaggggatcaggatcgagatcagtggattgcccggcagcgtcggcggcggggtatcctccccccacggccagtgacgttccagctgaaaccagaagtagagacccccggtgatccacaacactgacataaacagcggccagaaaaagacaaagtcgaggataagctcgccggtaaataccgctgcgacacctaacggcagcccgaatacgaggcataaaatgcacaatgcgataatgcgatcagtcatggtcagggtaccaccaggaagaaaattgcggcctgatacgagagatatcaggctggttgttaataaaatcgtcagggtagtagccgtagtttttgacgccgttcagccgcagcaaacgcatccagtccgccagctgctggtcgggaatggcgttttgctggcgtcgattccagtctctggcctgcagttcaaagatggttttcttcagcgcgcccgggtggcgggcgacggcctgcaccagccgcgtcagccaggcctggctggcgtcgatcggcacggactccatcagcggcatcgccatggggaccgtacagtcataggcggcaaggaagtcatccagattctgcgcaaaccaggcttcgctttgcggctccaggatcggcagggcgaagagattacgcgccgttttcacctgcgggccgcggatggcctgcactgcctggcgtagatccagagtgaagcgggtcagggtttggcttttgaaacgcatccatgcctggcgctcttgcggacgttggggcaccggggcggcatcgtgcgccatacccgtctgccgccaggcggcgaccgcctccgggctcacgtcttcaaaatcggtcaacacggcgtcgtcgtgaaacagaatcccgctgaagctggcgtgtcgggccagatcttcgtagatgtcggtgatctgctggcgaacccggggatcccagggcgacagacggacgtacggctggcgggcaagtaacgccttcccggtgtgcggatcccagcgctgaacgcgcggcagatctgaggcaagatcgaaggccagcaccggcatccaggcataaaccttcacattgccgcgggtctgcaactgccaggagacgaagttaaacaggtcggcgcgcatcggcagccagcggttggggaaatagagcgacttgaccgtgccgtcgccctgcgggtcggagaaggcctgcagaaagacgtggctgattttcatgtcatagacgcgctgcaccagcttatcgatattctttgcctgctggacgggattggggtcatagacatagtccagatccacatgcatcacccgaacaggatcggcttcctgaatctgggtcacggcgctggcaaaggccttgagcgacgggttaccggcgatcagcaggcgtggaatattgtccagatccttcacgttgcccaggccgtcgttcagcgtaaacgccagctgatacccttgctgtttggcgatagtcagggtgctgccgctggcggcgccgtagggccacacccaggcgcgcggcgttttcccggcaacctcatggattttcgccgtcactttctgcacgtcatctgtcattcgccgggtaaactgcgcgtcgctttcatagcggccggtggttttatcccagccgcggttggcggcggcaggctcgcggctgccctgcggattggccggcagaccgtagtgcgaggcccaggtgtgagcgccgatctccaccagcggcgagcggctgagctcgcgcaccatctcccaggtagcgaagcgctcgcgcggcgtcatcaggccgccaaaattaacgggctgaccagcgggagtgtccacccagctgcccaccggcgcccacagcgccgggacgttccaggctttaagcagcggccatacgcgggtgtaaaagctgctgtaaccatcgtcaaaactgaggagaaaagccttgggcggcagcgactttaagccataatgcgcatcgagaatgtcctgaacgctaatcgcatggtagccgttatgcagcagccaggcgatctgctcattgagtgcgctggtgcgcaccgaaagataacgctggtcggcggcatcgtcttcgacgtcatggtaggccagcaccagaaagcgatccgccggccagggttgattggcctccagtggggggcgctgctgcggggcgaggaaggggacttcctcagcacgcacgctgaagataaggcacagccagatgagaagcatcaggccgttgcgcagggtcgtgttcagcatggtcatccttaaaaccgtatatttgcatcaagagtgatggcgaggttgttttcacgtttgccgtcgtaggggcgcttatcccagttcagcatcaccccggtgtcgacgacgttgttccagcgcaggcgctgcccgtaacccagcaccgtgatcgccccggcggcgtgatttttttgccagtagctgccgccgccggcgagtaactgctggctccagacggtgtcatagcgctggtaaagcgtgtgatcgacggccagcgccgcggtggcggcgaggtcccgtgccggactgtagtaggcggtgtcggtgcggctattggcgctggccgacagaccgggctgcaaatccagcgttaaccatggggtttgccagaggcgttctttaccggagagggtgtactcatggcggcggttgcgatcggtaaaccggctggcggccgcgctgacgcggtactcccggcgttcgtttggagaccagcgcagccagccttcgccgcggttggcgctgacgccgttgcgtaacgcgcgcagcggcgtctgctgcgaaatccgctccagttcgccgcccagctgccagcgatcgctaacgtcatgggcggcggaaaggcggacgccgggcttgttctcgccgtgaaaattgacgctggagagctcaagctcgccccagtagtcgcgcggacgccattcaataccggcaaacagctggcgacggctgcctttcccctcttcaaaattgccttcagcgaagcggtgcccgccgaacaaccgccagctgtcggctagcggcgggctgtagatcgccgtctcaaaactgaggtcgtgcgtgccgctcaccgggttgtcggaatgcagccctttgccaacgctcaggcgcagctcggagagatgatggatctcgcgcgctctggccaggcgctgggtgttcagatcccgtggcgagcgggcgacgacgtcgtcagtcagcagatccatttgccgccactcctgcagatcgagggcgacccaggcctgctggcgctccagctgcaggctggtgggttccagagattccgccgcttttagctggcgttcggctgcccgtggcaatcctctctcctgcagaagggcggcatagtctatctgcaggccctggtttccaggggccgtcgccgccaggcgctgcattcgggcttcggcctgcggcaggtcgttggtagccgctaaatagtgcacgttaagcgactgtgcggtgagccagtcgtcgttcggctgcggcgttggcgagccgtagagacgacggatgtagggcgcattcctggtgaggcgggcgacataccgttgcgcctccgggtactgaccggtgtccagcagagcgtagaaaagctcgtgttcctcattctgttggcttgtcagccacgaaggatgctggtggataagcgtcagcgcaggctcaatttgcttaagggcgataaaagaggagatgacccagccgatggcccagtcgggaacggtctgctgctgggcgatcaggctttggtattcgcggatgacctgcgcgtactcggcgctggcgtacagtgcgcccagacgatcaatacgcgcccggatgatgtcgggcgcagcctgtgggtcggggtgccaggcggcgatcatcgcgtcatactgcgtgagcgccgtgcgggccagcgcgtaacgcgccttttcttcgcgggaaggggtatcggcaaggcgcaccagttcggcggcggcgttcagctgcaagttacgcttttccgcaggcgtcagttcgacgctattcgccaggccgagagcaggggaatcaatccggttgcgggtcagggtcgccatcaggctggccagcgcggttttgttttgcggttcacgatcgaggatctgcgtgtccaccaacagctggtcccagcttttgcccagccgcaggtagacataggagagcgtctgcaggtgcgcaacgctcgcctgctccgccaccaggcgacgcgcttcgctgagcgcctcgccgtccttgcgggcatcggcgagcgttttgatatagccgatacgatagtcgtcgctgccaggggcctggctgagcgcctgctgccagagggtgagcgaggtttgccactgcttctggttgcgcagggcctgcgccgcggcggcggtgccccgtgcgggaagcggcatatagacctggtagcgtcgccagactttcaccacttcatcgtcctgaccggcccagagggccacctgcagccagtccgccacctgagaaggggttaaggcatgccgcagctggtactgctgaaggtaactgagaaagggggcgtactgaccttggcgcgcttgcaagatttgctggtcatagagtgaatccgctccctgaaccagcgccgggaagagcaaaagcaagccgattgatagcgagagtttcgtgttgcgattaaacaataacgtatttgaataaggtgatctttccatttctatttgccatatgttcatcaagaatccattgcacaacacgaccgtcctttgacggtgagttaaaggatgaggatggtcccatttagctgactggcactgcaggtgaatgacctattgcaaactaataaacatatctcctgttgataaatgaatgggtaatttatacccgatacggcaaccgataaatatggataaattatggtctgcgttttaagataattctgtaaaatcgacttcattcgaacgggagtgttcaagttgatttctttaacctactgatataaataaaaaagaaagtcaggtggaattttgtttcaaaatggcggtgtgacttatatttagttggggttagagttttttaggcaatatttaagatgatttctgacaaaaattctcaatagcaaaaaaagcatcttttctgtggattttttttatttataatcaatctgtttatttcctgtcagaacgcaaggagggttttcacagccagattcagatgccgcgctaatgataaatcacaggtctcgttattttcaccgccatgcgaagcgttccatagggggagggaaaacgtctggttgacgagaatttgttgattaaatgttaaagggacgatttgtggcaactttaatgatattggttacccaagattactatctttttcaaggtgttaagaatttttttcctgatatcattcagttagattctagcggaaaagcgattttagataatgaggttgatgaagtctctctgctggttgatagccgctcgccgctttgccattacgattatctcgtgctggcagcggcgaaatccagaaagcgaatatgttgtatcgtcctcgatatgcgtcatcgggaagagcatttactgagcctgaaatcgtttttaaacatgtcattatcacccgcggatatggcgacattatttggcctttttctggagatgaatagcaagcgtctgaccaaagagtggtttgacgatctgcgcttaagtttgtctgaacagttaatgttacgtttactcatggcggggatgaccatggaggaggtggccgtcaatctcaatacgtcactaaaaagcctttaccgcaagcgtactgcgctttatgagcggttggggttagataattttaatgaagcttgcttatttatctttcgaaataagctgctggagcagaccgaacgttcgttatgaagcttcgctgtacagagaatggatgttatcgcaaggtatttgttgacgaaaatctaataaattaaatagatattgataggtacaaccgtcgatacccggcggtatcgatgatggcattaggcatataattccggagctctttggaagtatttaccgccaatgcggtttgctatgcacagcgattattataatgaatatattccttgcgccgcacaggaatagttttgtcataaattaacactaccatggtattccgactcacgcgtcggaataccatgagatatcgtgaaagcatcagaggagcgaggtggatgagaataagggacagtattgctgagcggttagaggcatgcgggctctaccgtcgggcggcatccagatggattgaggtgatgcagcgttgtctggacgatgaggaccgagagtggatccgtcaccatcgcaatcagtgtctgaaaaaggcgcaacgtccgccggcgccgaaagaggagtttgccgacctccaccaggcggcgaaagagacgcaatatcgtatgggcattgcgaagccctatggcgaagcattcaggctgcccggcaaagggaaaacggccgccgagtaatgcctttcttcacgacgtttgcctgacggcttcgccttatccggcctgcgggtcctccacaggttcaaacagcgtaggcccgcgcaagcgcagcgccgccgggcgatacacatcagataccgtactcgcggttgtgccggatggcggcataaatgccttatccggcctacgggtcccccacaggttcaaacagcgtaggcccgcgcaagcgcagcgccgccgggcgatacacatcagacaccgtacccgcggttatgccggatggcggcataaatgccttatccggcctacgagtcctctgctgattcaaacagcgccggcccgcgcaagcgcagcgccgccgggcgatacacatcagacaccgtacccgcggttgtggcggatggcggcataaatgccttatccggcctacgggtcctccagaggttcaaacagcgtaggcccgcgcaagcgcagcgccgccgggcgatacacatcagataccgtacccgcggttgtgccggatggcggcataaatgccttatccggcctacgagtcctctgctgatacaaacagcgcaggcccgtgcaagcgcagcgccgccgggcgatacacatcagacaccgtacccgcggttgtgccggatggcggcataaatgccttatccggcctacgagtcctctgctgattcaaacagcgtaggcccgcgcaagcgcagcgccgccaggcagggggtgatagaacggagttcgatgaagagtccggatgtagaaaagcaaaaacccgccttttgggcgggttctttaaatagtggtgcccggactcggactaacgccgcaggcgttgaacagcgcgcttgccgcgctggccccgaaggggtgagccgctgtgcggcgaataatcgaacggagttcgatgaagagtccggatgcagaaaagcaaaaacccgccttttgggcgggttctttaaatagtggtgcccggactcggaatcgaaccaaggacacggggattttcaatcccctgctctaccgactgagctatccgggcaacggggcgcattaaaccgtaatccgcccaccccgtcaaccaaatttcttaaattacttatcgattgcttatctttgcggcaattctgcgttcaaaggcgcgttttggcttaacttcactgcatgccgttatcgccctcgcgggttttccagccgctggtaatggcgataacgtggcgtagtccggagatgagataatcgccaatgacctcctcgtcctcacgcggcgagctcagggtaatttccgcatccacgccgtggcgataggcgccatgatggctgaaaatggtgccgatataacacttcccgttcagccagaccggaatataggccaccgtctcatagatatagttaacggcgacgccgctgtagtagttatccgcctcgtcagcggaggtgcccggcgggatggggcagatcggcgcgtcgttgtcgctggcgggtctgtctttcagcaggctgccctgcattacctccagcgagcgcagcaggtcagctttatcgccgtcgctcaggctgggggtcagcggctggtctttctccggggagcggatgctgttcagcgtatagcgatagcgaaccgtcaccgcgggcgtctggctggtggtgctgaacgggcgtagcaggtagaggttatcttcgccaaactggccgttgtaccacagggcatacacctggccgttgattttgacccagtggttccactggttagccccgcggccattaatggaaaagagggcgccgggcaccccggcatcgaaatcatcaccattatcactgtcgctgccgttgacggcggcaaaatcatcatcacctcgcttgagcaccccggtgtagctgaagagcccggtgccgcccacgtagctgtcgatgatcagttcgcgtttgccgtcgccgtcgaggtcgataagggtaaagctgactttgccgttttctgaatccgcgctaatcgaggagcgcagaaacgcctgccactcatcatcgctgatatccggggacggtttactggtcgtgatcagcgtatcgtcggcgtaagtgagcgtgaagtcggtaatatggccggttaacggaaactgctcggcgaccttattcagagacaattctggatcgcttttttgcgctttcaacactgcgttatacaacgtgcgcagagccaggttatccgcctctttctgctgcctggggatcacctggctgacaaaggtcggcagcatccaggtgccacccggggtgatttcccgacacataccggtgctgtacttcaggctgggggtaaaggttttaccatcccaaacgcgcgtctcgccggtgacgcagtcggccatgccccgttctttgtgcaaaaagacgatagcgccgtcggcgtagctggaggcctcggtagtgagcagccgcggtttgctcaactgggcgttatcgaccagccacagggcataaccgtcgttatagggcgctcgccagcagagcgcctgcgccagagaatgggttttatccagcgcggtcagcgtgatctggcgatctgccgccggaatggcctgattctgccagtcgtcgcagcgctggttcagcagcggcgtcaggatgggcagcagtttctggcgctgaagcatactcaacggcactggctgcgcgttatggagaaccggggcggcgataatttccggggcgggagtggctggcaaaatggcatcgtcgccggcatcgcctttatccagcagcgcatcggcggtgccggtgcgtcgctgaaacgcatccattttacccagcacctcgcggctgccggcgctggaaagcggcaggtgctggccgttaagggtgaattcgattttgcgctgattcgttaacgcctgtagcagggcggtggtctgatcgctgtcgaggcgaaagtggctctcgtcgagagcgtccagcgcgccaaaatcccggtcgtcgatcagcaggctggcggtggagtcggcggggatatcgtgctcgatttgcgcaaaggttaccgtggcggtgaggtgctgttcgctgcccgcgttgcgggtcaacagcacgctgacctcacccatgcggacgccgtaacccgccgcccggcaggcgccggtattatcgcaggcgagctcccagtctttttgtgcaaaggaaaaaccttgcaggggagccgccagcaggggcgtagagcagaggcccagccaggcagcccagaagaacgcgcgcatatcaatccctgtcagcaatcagtgagggggaaattataggcgcgacgtggcggttaggatatcagaatcaggtcaaggcgccgcccatacggcactgggcgaagcgtagaatatcttcagccagccgccgggcggtatccacatccgtctggctacgtttgaccagcagacggctcagacagccctcgacaatcagctccatctgcttggcgaccatttccgggtcatccacctccagctgagtcagcagctcgtgagtgtaggccagcgaagcctgcttctgctgttccgccagctggtgaatggggtgctgaggatccgggtagaaggtgcaggcggcgataaacaggcagcccgggtaccgctggttgcttacgcaggtggtgagtgcggcatagcgtgccagcagcttttgctctgcgcttaaggtctcgtccagcaggagctgacgacgccaggcatccacctgctggctcagatagcgaagcgcgtcgtacagcagcgcttcgcggtcaggccagaagcgtttcaggtcgctcgtcgggcaggacacgcgctcagcgaccatctccagcgacgtgttggcgataccttcaatttcaagaatcttaatggcttctgccaggacgtcttcacgtagcacggtgttctcctccatctttcctcctaaagtgtcgctcacgcttgccaatcgcgcaaatgggcgctgaatgccgcggcatccataaagccggtgactcgccgctcaggctgttcctgaccctcagcgttgaagaacaggatcgtcggcagacccagcacctgcaggtgtttcagcagcgcgacgtcttgcgggctgttcttcgtcacatcaacctgtaataacacggtgcctttcagcgcctgctgcacgtcaggtgaactaaaggtgtatttttcaaactctttgcaggccacgcaccagtcggcgtaaagatcgagcatcaccggttgacctttcgcctgcgccagcgcctggtcaagctcggccaccgagctgacgcgggtgaaagccaggtgcgcctgctgctcaaccgccggggcgccaaacgcccagtcctgcagaggccgcgcgctgaccagcgcggcggcaagcagaatgatctgtaccagccgcatccacggccgggtagcgcccagagaggtgataaacgcccagctgaagaaggcgacaccgagcattgaccacagccgtaacccccactggtcgccgagtatgcgttccagcaggaagacgggcagggcaaggatcacaaacccgaaggcggttttcacatggctcatccacgggccgcttttcggcaacaggcgattgccaaacacggtcacaaggatcaacggcagacccatgcccagcgcgtaaaggtacagcgtgccgccgcccagccacagattaccgctctgggcgatatacaacagaatggcgcttagcggcgcggtggtgcagggggagcagatcagcccggcaatagcccccatcgcaaagaccccgccgggcgagccgccctggcgcttattgctgagcagcgtcagccgggtctgcagcgacgacggcagctgcagcgtgaacaggccgaacatggagagcgccagcagtataaacaccgccgacaggccgaccaggacatacgggtgctgcagggccgcctggaactgcagcccggcggcggctaccaccagccccagcgcggtataggtcagggccatcccctggacgtaaataaaggccagcagcagggcgcgcgcggtggaaagccgctgttttccgcccagcacgatgcccgaaatcagcgggtacatcggcagcacgcagggggtgaaggcgataccaatacctatcagcagcgcccacagcgccgtaaagggcaggcgggcaggcgtgtctgcaggcggcactgcggcaggcgcaggtgatgtggcgagctccggggccggtcgcggctcaaccggcagcggcgggttgaacgccgggcggctgctcgtcgacggcatgggctcgatggcggttgcctggccgtcgtttgaggccgcctgcacggcgctcagcgggatcactttagtctccggcggataacagaatccggcatcggcgcagccctgccaggtgacggtgagagtagcctctttgtccgcctccttcaccgtcaccggcacggtcaggcgttggcgaaagatctcgcttttgccgtaaaactcatcttcatgccactctcccgccggcagcgccggttcgtcgatcgtcgccccggcggcgctgaaggtaaactgttgacgataaagataataaccatccttgatttgccagctcaggttgacgtcatgctgttgctgctgaaagtcaaaggcgaaagcttgatcagcaggcacgaagttcgagcgccccggcgcgtcgaataacccggcggtggctgatgtgctgcacagcagcaggatcagcgtaatgatgcggtaagccatgagaggtaatcgttgtctccatgcgtgacgggtagaaccagcagttctggggtttgatacgggtggtgtgacttcaggcagtccagcagcgcctgctgatgggcaaggtcagttttgagtagcatctgcacttcatactcctgctcgagtttcccttcccagtaatacagagaggtagcccccggcagcagcgtggcgcaggctgccaccttttccgccagcgcttttgccgccagatcctgggcggtcgcttcgtccggcgcggtacagagcacaacaacagcatcaggcgtagtcatcatgaacctcgtatcagcgaaaagaggcactataacacgcaagatgcggggatattagcgtaacgagcggggaaagtgagggcaacggaaggcgggcccgtagtgggcccgccgccagcggtatttacagcataatcccgccaaagataaagccgaggatcacgcacagcgtgatagcgataacgccggggatcaggaaggcgtggttaaagacatatttaccaatgcgggttgagccggtgtcgtccatctctaccgccgccagcagggttgggtaggtcggcagaacgaacagcgccgagaccgcggcaaacgaggcgatagccgtcagcgggctgacgcccagcagcagcgcggcaggcatcaacgccttggtggtggctgcctgcgagtagagcagcgtggcggcgaaaaacagtaccaccgccagcagccatgggtaattatgcagcagatcgccggccacggcctggatgtcgctgatatgcgctttaacgaaggtatctcccagccaggcgacgccgaggacgcagacgcaggcgctcatcccggacttaaaggtgctggcgttgagcacttcgccggtgtcgattttacaggtgatgctaatcagggtggcgatggtcagcataaataccacgatcgcctcgttacgcggcagcaccgggttcttaatcaggccgacggtatcgctgatggccgtggcgtagaacattaccgccacgatgccgatcaaaaacagcagaacggaacgtttggcgtgcggctgcagctcaaatacctggctgccgcgcagtctgacttcccccttggccagccgctcctggtaaaccggatcgtctttcagttcgcagccgaggaagttgcagacgatagcggtgagcatcaccgccagcagcgtgaccggaatacagatggccagcagcgtcaggtagctaacgcccagcggctcaaggatcccggcaaagaacaccaccgccgcggagataggcgaggcggtgatcgctatctgagaggccacgaccgcaatcgacaggggacgagaggggcgaatgccttgctctttggcaacttcggtgatcaccggcagcgtggagaaggcggtatggccggtgccagcgagcacggtcataaaccaggtcaccagcggggcaaggaaggtaatgtacttcgggtggcggcgcagcatccgttcggcgaggctaaccaggtaatccatcccgccggcgacctgcatggcggcgatagcggcaatcaccgccataatgatttcaataacgtcgaaggggatcgcacccggtttaatttgaaaaataagcgtcaggacaaggacgccaaggccaccggcaaagccgataccgatgccgccgagccgggcgccgagataaatcgccagcaggacaataaccagttctgcaccaaacatatatgccttccttgttttttaacaagttgatattgaattgttgtattttagtaaaaccaaaaagcaaaaaaggcatgtcatcgctgacatgcctttgaatgactaacctgaaagattactgttcgctttcatcggtataacgctttgctttataagcgggatgcatcaggttttgcgcagagaaaatatcatccaactccgccgccgtcagcagtccgcgctccagcaccacttcccgtacgctcttgccggtttcggcacagatcttgccgacgatatcgccattgtggtggccgataaacgggttgaggtaggtgacgatgccgatggagttgtagacgtagccttcacataccgctttattggcggtgatgccgttaacgcatttctccagcaggttgtagcaggcgttggtcaggatatgaatcgactcgaacatcgcctggccgattaccggctccatcacgttcaactgcagctgaccggcttcggaggccatggtcacagtggtatcgttgccgataactttgaagcagacctggttgaccacctccggcaccaccgggttaaccttcgccggcatgattgaagagccagcctgcagctcaggcaggttgatttcgttgaggcccgcgcgcggaccggaagagagcaggcgcaggtcgttacagatcttggacagtttcaccgccaggcgtttcagcgagctgtgaaccataacgtacgccccgcagtccgaagtggcttcaatcagatcttccgccgggacgaccggtaagttgcttacttcagccagcttctgcaccgccagctgttgatagccgtccggggtgttgaggcgagtaccaatggcggtggcgccgaggttcacctccagcagcagctccgcagtgcgcagaatgcttttggtctcttcattaagcagcacattgaaggcatggaactcctggccgagggtcatcggcaccgcgtcctgcagctgggtgcggcccattttgaggatgtcctggaactccacggctttcgcctggaagccttcgcccagctgtttaatcgcatcaattaacttaaggatggaggcatacaccgcaatgcggaacccggtggggtaagcatcgttggtggactggcatttgttgacgtgatcgtttgggttcaggtactggtattcgcctttctggtggcccatcagctcaaggccaatgttcgccaggacttcgttggtgttcatgtttacggaggtaccggccccgccctggaagacatcgaccgggaactggtccatgcatttgccgttattcaggacttcgtcacaggcggcgataatcgcatttgccgcgcttttgggaatggtctgcagctccttgttcgccagcgcggcggctttcttaaccatgaccatgccgcgcacgaattctggtatgtcgctgattttgctgttgctaatgtagaagttttcaatcgctcgcagagtatgaacgccgtagtaagcgtccgcgggaacttccctggtgcccaacagatcttcttcgatacgaatgttgtttaacatgtgaaccttcttttcaagctgccaatgaattcaccaaacacacagaatatccagtattcagtatattttctggccgacgattatttccttaaccggcccggtgcccaagatcatatgctgatgatagcgaatatcagtaagcttgatcacttattacattgcgggtatgagaagatttattaatctgtgaaatgggtcaccgctttcttattcctgagaaaaataagcctttccgctgattgaaaagccgctcagcatccccatgttagtgggatgcgatcagcaaattgatgattacgggcgctgaacgcagcgcccgttgatgaaggagacgccggtgcgttggattccgtttattgccttttttctttacgtttacattgagatatcgatctttatccaggttgcgcacgtgctgggcgtctttatgaccctgatcctggtgatctttagctcggtggtagggatgtcgctggtgcgtaaccagggcttcaaaaacttcctgctgatgcagcagaagatggccgcgggcgagagcccggcggcggagatgatcaagagcgtatcgctgattatcgctggtctgctgctgttgctcccggggttctttaccgacttcctcggcctgctgctattgctgccgccggtgcaaaagcatttgacgatgaagctgatgccgcacctgcgcttcagccggatgccgggcggcggctttagcgccggaactggcggcggagagaccttcgaaggggaattccagcgcaaagatgagcagcgcgaccgtctggaccataaggacgatcgccgcgattaacatcccccggcccggtcagcagatgcgaccgggccgctttctttgcaggcctacacgcttcccgtcgccagcttgcgcctgggtaaaaacagccacagccccgccagcatcaccagcgcgtacaggcttttccagccgaccatcgacagcagcagcagacagagaatgctgcccaccactgccaatagccgatagcgaccgcgaagcaaacgacaacccgccagcatgcacagcagatagatcatgatgaaaatgccattggcgtaaacgatcagcgcgtccagattgatatcgagcagatagatgccaagggtgctaactacgcaggatcccagcacggcgttgagggcgttgcgcgggatctgccgtggcgacagccttgcgaggtagctgtgtggcttatgctgcgcttgcgaccagaccaggcgggcgaagctttgaatatagatgttgaggctggcgaaacaggcgagatagccgatgacgcaggctacccacagcgcttcgacgccgaacagacggaccacgatattcggtaatgacgccgccgccgccatctcctcgccaaaggcgtggaagtgcagcaccagcacggtgcaggcccagtagaccgagccggcaagcagcaggcctatcatcagcgccctggggaaatcacgctcgggatgtttaaactccgaggcgagatgcgcgaaggcttccagaccgacaaagcaccagaacatcaccgacagcgccaaaaagagctgcccgcggtcaatctccgccggggccgggaaggggatctgcgccgggcttatcccgccgcgccaccagactacgacgatcagcgccacaatcagtacggcaaccaacgtctgcaggttggcgctggagctggcgccacgcgaaccgacccaccagacgatggccagggtgcccagctccgccagcagcagctgcgcatcatgccagccgaacagcgcctggccaaaaccggtggcgatgtgcagggcggcggggagtccgaccgggataaccgataaaaacagccagccggtgacgctggccagacgtggcccaaaggccatatcgacaaagtgggccacgccgcccgcgctgggaaaatggcggccgagcagggcgaagacgatggcaatcgggaaaacaaggagaatgagcagcggccatgcccacaggctgttatcgccagcgaccagcgccgggacggcgaagacgccggtacccagcaatgaggtggaaagcaacccaactccctgtcccagccctaactcctgttttaaaccactcatgattcaatcctgcgccagtgaaaaaaaagagagtatcacaatcgcttttccttatgaccgattgcctgacatggccgctttttgtgcgccagcgcaaaggtaaaaattttttttaattttgcccttgaagccgtaaatggccatccccatctctctctgcactagccggtaaaccgcgttcggcccggcgtcacccataactgataatgactttctcgaaggagagctatcaatgagtattcgtccgttacatgatcgtgtgatcgtcaaacgtaaagaagttgaaaccaaatctgcgggcggcatcgttctgaccggttctgcagcagctaagtcaactcgtggcgaaatcatcgctgtcggtaaaggccgcatcctggaaaacgggaccgtgcagccgctggacgttaaagttggtgacatcgtgattttcaacgatggctacggcgtgaagactgaaaagatcgacaacgaagaagtactgatcatgtccgaaagcgacatcctggcaattgttgaagcttaattcgcacgaccctgaacgaatttgaggaataaaagaaatggcagcaaaagacgtaaaattcggtaacgacgctcgtgtaaaaatgctgcgcggcgtaaacgtactggcagatgcagttaaagtgaccctgggcccgaaaggccgtaacgtggttctggacaaatccttcggcgcgccgaccatcaccaaagatggtgtttccgttgcacgtgaaatcgaactggaagacaagttcgaaaacatgggcgcgcagatggtgaaagaagttgcctctaaagcgaacgacgcggcaggcgacggtaccaccaccgcaaccgtactggctcaggctatcgtgaacgaaggcctgaaagctgttgctgcaggcatgaacccgatggatctgaaacgcggtatcgacaaagcggtactggctgcagtagaagagctgaaagcgctgtccgttccgtgctctgactccaaagctatcgctcaggtaggtaccatctccgctaactccgacgaaaccgtcggtaaactgatcgcggaagcgatggataaagttggtaaagaaggcgtgatcaccgttgaagacggtaccggtctggaagacgaactggacgtagttgaaggtatgcagttcgaccgcggctacctgtctccgtacttcatcaacaagccggacaccggtgccgttgagctggaaagcccgttcatcctgctggctgacaaaaaaatctccaatatccgcgaaatgctgccggttctggaagccgtagcgaaagctggcaaaccgctggtcatcatcgctgaagacgttgaaggcgaagcgctggcgaccctggtggttaacaccatgcgcggcatcgttaaagtggctgcggtgaaagcaccgggcttcggcgaccgtcgtaaagctatgctgcaggacatcgctactctgactggcggtaccgttatctctgaagagatcggtatggagctggaaaaagcgactctggaagacctgggccaggcgaaacgcgtggttatcaacaaagacaccaccaccatcatcgatggcgttggcgaagaatccgcaatccagggccgcgtagctcagatccgtaagcagatcgaagaagcgacctccgactacgatcgtgaaaaactgcaggaacgtgtcgctaaactggctggcggcgtagcagtaatcaaagtcggtgcggctaccgaagttgaaatgaaagagaaaaaagcacgcgtcgacgacgccctgcacgcaacccgtgctgcggttgaagaaggcgtggtggctggcggcggcgtagcgctggttcgcgttgcggcgaaactcgctggcctgaccggtcagaacgaagatcagaacgtcggtatcaaagttgcgctgcgcgcaatggaagcgccgctgcgtcagatcgtttccaacgccggtgaagagccgtctgttgtggcaaacaacgtgaaagcaggcgacggtaactacggctacaacgcagcaactgaagaatacggcaacatgatcgacttcggtatcctggacccaaccaaagtcacccgttctgcactgcagtacgcggcttccgtggctggcctgatgattaccaccgagtgcatggtgaccgacctgccgaaaggcgacgcgcctgacttaggtgctgctggcggcatgggcggcatgggcggtatgggcggcatgatgtaatcgtgcgctctacggcataaaaaagcagaaacccctggccagcaatggctgggggtttttcttttggcgcgctttttagtataaggcttatacataaaaatcatttaagctgcatcagagcggcaagcacctccgtttcggtagcgacctggtaagcgcagccggggagggaatgaacgcggctcatgccgacgcagtttgaaggatgacagatttacatccgggccagtgcgtccagctcatcgatcatggggaataacatgcaggtaaaatatttagcagggattgtcggcgcagccttactgttggcaggttgcagttccagcaatgaattaacctctgccggccagaatgtgcgtttcgtgcaggagaagccgggcgcagaatgtcagctgttagggaccgcgacgggtaaacagagcaactggctctccggccagaatggcgatgagggcggttccatgcgcggtgcggcgaacgccttgcgtaaccaggcagcagcaatgggtggcaacgtgatttacggcgtcagcagcccgacacaaaacctgttgtcgagctttgtacctaccgacagcgaaatgaacggccaggtttataagtgcccgaactgatgcgtgacgcctctctctgcgagcgcagagagaggcgtggtcgttagatgaggatcaggcgttaagctccgctttcttctccagatagaaggcgtgcagaggacgcaggcactcttccagactgagcattcttcccggctgggaagggatgacagtactgaagatctggcatggcgccagctccgcgtgcatcgccttgagcttggggcttttctcgataatccgcgtcacaacgttattttccagttctgataaatgcggcgcgctggttttgaccaccgctccggagacaattttcttgccttcgtctgtctcgcagcagtacagcacgcccagataatgggaaaacaggtttagcttccagtcttcctggggatactgctggtaatcgatattgggctgagtggttaagtcgacggtatagcacattaaaaaatccatatttgaacttaaatactgaaccagttcctggtcgccgactgtttttaatgcttgttgaataccgataattaatgcttcgatttgcagatcgtcaatacataaagtactaatttgttcatcctgaaatacaagaattaacgttgactgtgtttcgccaggtttgagcgtaatggacatgattcgccgctcaggggatggttgctgtatttcagccatctcaacctgagggatattggcaacaactgcctcattataggtgataagctcatctttataggcctctccttggttttcaagccgctgaaaaatcacagccattctgctctgcagtatcaggagcagatcggctagcaccggtgcctgaagatagtaaatttcgcaaaagccattttccttcttaacttttagcagcaacgctaaaaatcgctcttcaaaggtaattccggcggtattaaaacctataaacgttccttgcatattcatatcctttattaagcagtagtcaccggcttcgattgtgcgagatcgataacacgatcggcggatgcaatggtcgatggtcgatgcgcgacgataatccgggtaatacttagcgctgaaatagactgattgataaccgactcatttctgaggtcaagatggctggtagcctcatccataaataaaatactcggtttgcgatacagtgcacgggcgatcaggatacgctgcttttgcccacctgaaatacccagcccaagttcgccgacaatggtttcgtatcccatagccatcttcataatttcatcatgaatgttgcaccgtctggcacactccatcacaaaatcaagatcggcgctatcatcgaagccacttatattatcaataagggagccggaaaagagacggtcttcctggagtacgcaggcgataccaagacgatagttattcaaaccaatctttttaatctccagattatccgccagtatttcgccggaatccggcgagagcagtccgcacataacttttaatagtgtggttttccctacgccagatgggccaattaacgcaactgattctccaggagcaacggttatgttcaaatttgtaaagatgggttgtgaaaaaggatcgtattgataactaagatttctcacttcaagttttacgccagtgttttccgtaaaaacacgccgcgatggaagttctttttctggttcactaaatgctatttctgatagacgttcgttgtgcagtgagagcatacgaagctgcatcaccaaatcaatgagattcgatgcacgttgagaaaactgaccccgataggcgttaaatgccataaacataccgagcgtcatctcattatcaattaccataatggcacccaaccacagtaccactacctgatcgattgaggtgataaaggtattaatgccaccaaacatcatatcgaatcgagtttgctttatacctgcattgctggcgtcaacgttaagattcagccaatgctgtgagcgacgttcttttaaattcagtgctttgatcgtagaaatgccataaagtgactccataaagtgggagttagcacgtgcgcctttgacgacctgttcttccgttacgcgacgataaaagctataggtagcaaagcgcataatcgcatagcaaatggtaaagccgatgacgacccagactaaccaaccaccatataaggtcagcatcaccaataaaccgattgtcattatcgagtcgatgatgccggtaacgatactattggtaaatattgagcgaatcgtatccaaagacgagaagcgagactgaatatcacctaaatgccttttctcaaaaaaggataatggcaaacttgtcagatgatcgaataacgtcgttttccattgaatatttgtcagggtatttaacgttaacgacgtccatgcacgtagcatgctaataaacgtgcggaatagggtaaaaaatatcaacccgatacagataacagacagtaagctttggtcgtgagccataatcacatggtcagtgactagctgtgtaccaatcggtaacaggagtccgatagcttctaccactacagagtaagcaaagatcttaatcagtgctgattttaaaccaacaattttatgcattaaatccagcaatcgtaatcgggattttgcttcttcttgctggaagttatgatcgggccaaagttcaagcgctacaccggtaaaattgtttgacatctcattgatgccaatgattcttttacccaacgccggatcgtgaataacaaatgcgtttttccttacctttgtaagaacaacgtagtggttcatcccccagtggatgatgcaggggagtttaagctgctttatttcatcaaggtcaagagctaacgctcggctttttaagccggcatgctctgcagttttgcttagagacattagtgaggagccctgggaggggctaccaaaccgctgacggaaattaaacagatcgatattcaacccataaaaaccacagaccattgccagacaggcaattccacattctgatgattctgactgaagaataacgggcgttttgttaacaagagaaaaatttaactttgcaacaacagttttgaaaagttcgttagtcatggatcggcccagtaatgctttgagttatcttatacacaggggtaaacatccacatatagagcggacgctcttccaggaatacaacagcttgagccttgaggccatttgaaagcgaaagcgttttaccattatattcaaaggttttgttttcaattttcacaatggtcttatagagcgccagttcctgctggtttgtgccgttcgtaacattggtatactcagacatttcttgtcgagatgtgggaacagaagatattgaaagtatttttcccgggaattgaccaaatttatctgatgggaatgcagcataacgaatgttaatttcatccccaggttttacataaggtatactattgttaggtaaccataaaataagataatactctatatcaccggtaggttttatctgtgctagactgctgcctttatcaaccatttggcctttagtgacggtcaatgattcaatacggccttcagtcgttgctttaataataatgttaccgtttgcgtttgattcaaccagttgatttttataatcattaatctggttttcttgtgacgagatttgattgtcaaaatcagctatttttgtaattttatcactattgagctgagtgacctgcgattccagttgcattttctgactcaccagagactggtaagtgctttgttgttgaaaatacaaagagtgttgatagttatattggtctttggtaatcagtccgtcacttaaatacttatcatagctggatagattatcatgcattttctttaatccagcctgggcgttagccaacatgcgattagtttcttttaacgaatcattgattgtttttaactgcttctctaaagaaatggttgtttcttttttattatgattcagttttgaaatgatatcttcagcatttgcgatcttttcattaatgacctctatttgtaccgcactaacattacccgttgtggtgttccgggaaatgtcgatctcatataacggctggcctttggtcacaatatcgccgacttttacatattgggagataacaaagccttgctgcggggcataaacgttgacagagtgaggtagagtaatgacctctccctgaacgtcgattctctgggtaaaggagcaaaatactgtggtggctatcaggatcgcaagaaaagcaaaagagagtaatgcaacaagccatgctggaagccctgcgagcagcagtgcctttcctttccagtgatgctttttatactcaatcgcttccttgcgatagattttttttaacatagttatcgcttaaattataaaatgaaaaggcccgatacgtcaggccttaattactaatgaatgcttgtcaacaaactgttgagctaatcattggcgcgtaaacttagttgctccagaagttcagggtgccgtcataaatagcatccattacgcccagagcataatccagagtcatatcccagccaacgatacccgctgcaataccaaagcaaacgccaccgagaataaccccggcgatcatccctacaccctggccgattgagccgataccgaagataccgccacttacgccaccccaacgtccggcgtacgctgtaccaaaaatagcgcccagagaggcgcccagtgcgatagcgccaacttcttttgcggcccaggtgacgatatcggtaagagtatcggtcagcgcaccgccagaaatttcttccatttcaaatacagttaattggtgcatgattagtcctttaactaaaattaaaattatatattcattccagaccagaatttggtccgcagaaaagatagtcgttgctgtagtatgaatcaactcaactaaatatgaattgttgatgaaattagaggttaatagtgaatcaaatctaaactatttataggttcataaaacagtaactaattcagcaggtggtggcacgcagctattatcgatgtgctgcagatatattgatttattcttgcattcatatatgacatttttttggttgttgacataaaaataaaaaaaaggtggatatcattatccaccttttgtaggggtatggaggttatacttttactcttcctgtatgacaacttcaagcatagcttttacatgaccggaagagacttcagcgctattgtcactcatgcgataatagtcggcggtgaaggtaaagttttgtgatgcctgtgccttggcgaagctataagtttcggcgtcgtaaaatattataggcttgttgtcaattttgaagataacgccaacgttatttgcggcttcggttccagttatcatgttatcgatgatcccatccccggcagaactggtgccattaacagggttaaaccagtagtaaagcttgttgccaactgaaccttgtgggcaagtcacatccattttgatagttttttgtgatggagttgtacctcctcgagaaatggacattaatgtgtttttttcaattttattcagggtgatttggctaggccctgatactgaaatatcgcaagaggtatctttatatgaaatagtcttgaacttcagggttgctgttaacaaaaggcggtcagctgcccttgggttggtgcttaagttacctgctgagaatttaaataccgggtttgtactggtgccggatgtatcgatgacctgctttgttttaattaaccataccgtcataaatttataatcttcattcgattctaaaataggtacgattgtagattgagcaacagcaggattaatagaaccatttttgctgctcagaagatctgaaaactgaaagccaattccatctatgccggtttcatagactggtttgccccttatacccgtgacgccggtaacttccggtgctgttgattcaacaatatactggtctcccattattttgctgcactcaaatgttttataatgtccggtaccgacttttttagtatagaggactgtacccaccggaattgttgggtctgttgcgattttaggacttatgttaaacattgcttgtccagcggaaccataataatcgcatttggcaattacctcgctacaacagcatagtagggataaaaaaagaagtatttttctcattctttattgttccttggtcaatattagcgacaaaccgtttcgatttgactgatgccagacgctttgccttccctggctggtaaagtaaatgaagcgttacattgctgcgctgcgcttttgccccactggacgttaaggatcccggtctcttgcaggccggacatatagaccatcccggcgtcgctgacgatacttggctgcgatttactatctccggcgagcagaaccattgcgccataaggcacgtcctggccgctggcggttttcagatgcacaaaggcccgctggccgatattgccgtcataattagcacgcacgatagcgccacgcgtcggaacaacgctcttcgtggtttctggcagctccatatcttcaccaagcgtggtgctgtccagcgtgatatcggtacgacgataaggtgtaacgtacgggacgatagcgtaaccgcgatagtcggtggagatggtgttatcgttggtcaacttgacgttatccaggcccggcgctttaaccagcacggcggcgtcagtgatgtcctggccaagtgtaatgccatcggcatgagcgacgatgctgccgttggcgccgtagtcaatacgttggctgttattgtcatagctatagccggcattaaggctgccgcgggcaccgttataggtcccacgcatatcaccgctgtaatattcccggttgctgtacccttgctgcaggctccattccaggctgtcgttatctagcccgacgccaccaatggagaccgactgatcggtagaccctgggttgctgttggttaactgatagctggtataggtacccggcagccagttgctcagtggcagcgttacggtcagagtgatgcgctgatcgtcctgggcgtctttaccggagctatctccgctccaggtgtaacggttatagctgtagcccagatagtagttcacattgcggaagccgccgttgtaccccacgctgatcgacttgttggtgcgcttatcgtcccaataatcttcgattaacccgctaacggacagactacccaaacctttacctaagctttggttaaccgtcaggttggtacggttgcgcagcgaacgcggactatagttgccgtcattagagtagctatccagcacctcggagagggtattaaacccgcgggtagagtagcggtagcccgcgatggtgacgttggtgccggtttcgacgatgtttttcccgtaacgtacgcgccaggactgcccggaggtcttttcatcgtctttcttttttgaccacgcctgggtgacgtctgccgaggcggcgcctagctcgccgaggttatagccgagacccgtcgatagcgcctggtagcgcgaggccgcctgcatgccgccatatactgtcaggctgctggagacgccgtaggtcgcggtagcctgagtaaatggcgtttcatcgactccaccatcgtaaggacgatatttaccggaagtaatctcatactccagttgattttcacgcaccatgaccggcagggtggcgaacggcacaacaaattcttgtttggatccgtcggactcttccacgctgacgtaaaggtcgccgctaccgccgcttgggtacatatcggtgatttcaaatgccccgggcgccacataggtctggtagacctgataaccgttctgtttaatcgttacgcgggcgttggttttagcgataccacgaataatcggcgcatagccgcgcatactttccggcagcatcgacgtatcggtcgccagttgtatcccggtaaacggcacgctgtcgaagatggtcgagagcgatgaactctcgcccattaccaggttactgttgatcgggcgaatgctgcgctgcatatagagataggcggaatcccagtctccggcaccgctattgtttttattccaggtgctgaggttacggatacgccatgggccaacgttgaggccggactgcaggttcaaactgtagtattcatcattggcctgcatgtcgttcgagccgctgaactgataattcaccagtaaagcgttaatgccgtcatcaaactgatccggtggaatatacccttgcgcggtggtggataaggccgcctgcggaatagaaatatttaaacgttgggcggtgaagtcaaaatccgctttggtatccgggatgacagtaaggttagtgcaaccatttttatcctcgaccagttcaggaaacgctttaacgcgtacaccatactccgctaacgtttttagactcaggcaaggagtgagcgcgggctcgcggttatcgacggtagcacgactattggcgacaaacttcatcgtccgggtatccaggtagcgaccgttaaacatgatatcgacccgataatctcctggcgcctgtgcattctgggtttgaaaaatggataagtcaggagtggttgatggatcgctaccattcaatgaactaatgaatgagggatcgaaaaagtcacgtgcttgcgctttattattcaaaccagaaagcaatgcaggaagcattgcgataaagacggtggatagtttgaataatccattattcttatttggcatagacacatccctataatgataaaataaatttcttattacagcgatgaggagtagagcgacccagctccgccataatcattgaccactttccaggtaatgctggaagcattaatattttcttttaacaccacttctttggtcgtcattggggcgaccgagttgacttccggcttcacttctttgccgccaatctggatgctattgaaataatagaaaaagggcgttggatttttgatcgttagctttgtgccagatttgcgccattcaagctttttcgcttcggtattaggggagaggtcgaaaagtgctttagggcgatagaccagacgcatgcggtggcggaccgccagttgaatggtgttgttattcgctttggcgtcatctgccggagggatcgccatcacgttaaaatagtacatggattcccggtcggtcggcgcattaacgtttccgttagaaaaaagacgaaccgtattctgttgtttcccttcaaggcggaacagcggcggagtggccataaaagagggcgctttccctgccggagcttcaacccaggatttaatgagatagggaatatcatctttattttcgatttgggcggtaatttcacgcgcaccttctttatacagatagcgggtagattcaattacaataccggcatgggcaatactgctgaggagtaatgcgcaggatgcggtgagatttattaaggtcctgaacatggcttttctctgaatgcaaaaagggcccgccgtaaagcgggaccctttggggaaaaattaaacggtgtaatcgatagtaaaggttgcaacccctttaaccggaccttcggttactgtggtcgcagcgttggttcttacataaccagtggtgtacttcagctgagtaccgttggctgcagagtagctttcggtcatggtgtcagaaccgtcgaaggctacgcgatgggaatcgctgacgcgctggataccaataccgatacccgctgcaccgttagcagcggtgttgtccagaatggtattgtcgctggaggtggtgccggaaacgagaactttcaggcctgtaaccgggctagagctgccctgtgcacagtctttcacgtcaaaaccgaagtcctgagttttgaacagtttaccagcggcttcagcatttgcttcagtggtggttacagtgatcagctgaacgataccgttgttcagggtaccagtcggggtcacgacgcaagagttagctgcatcagagacttcacccagtacagttacctgagcggtgttggttgccattgcctgagcactcagcactgcagatgcagcgaccattacagctacgattgtctttttcatttaattaatccatatatagatacttagtcctgtgtagaatcgataacagttatcaagggaatggagtatgcattcgcattgatattgaaaataagcgtcagctttcctttatatagtgctgagaccaatcatcctgttgaacgacgctaccatatcgcttgccatagcgaaccatggagaagcgggagtaatttaaaagtctggtgcaaaaaatgcttgtgaattattgatgaagcacccgtgaatttaatgctgccccccatctctgatgagatgtggattccagttgagattaatttaatctgaaaatgtgaccattaagcaagttagctatcgcttgtttttttatctgcggtatcctgtgggctgaacttcaatgtgaaatgtacctgtttccatctgaaacaagaatgttcacataatcgtttggttgaaatcatttgattttattatggataatagggttacgtggggcaaggatatggatgacgcagtattatttaatgggtgtataattaatcaggagattatatttaatgccaatatgaatgagctgcggccgcttgccggggacggggagtgcatcagcctcaatgcgccaaccgccagatgcttgctgctgcttttgcagaattgcggcaaagtcatttcgcgggatgagttcctggcggctgtatgggaaacacggggggtggtcgtttcgcaaaatacgttctatcaaaatatctctttgctgcgaaaatcgctggtaaaagctgggctatctgaggatatcattatcaccgtccggcaaaaaggctttagcgtcgctccgaatacattggtcattcctctctctgatgaagagtgcgataatatgaatcgggtgacattaacgcattatcagaataataaagttgtcgactttatttctgaagaaaaggaaaagcctgacactcatttaaatcttccactaatagaaaactcatcaaagcatggcagtgatttgatggcaaataaaccggaagaaggtgaaaaagcatctgagcggttgcatgttacttttaaaatacccgtatggttaatcgcgctaattgtcgtgatgattgtaattaatattattgtgttggtcgtgctaaaccggtagctcgtcacagccaggggttatagcgcggtgcgatagtcatttgctggtcaccttaacacccgtctgtcgaaatcttcctatccgaaggtctgccagaacgtcctggcagaccttcagtttattaacgctgcttcagccctaaatccagcggcgtcttgctgggttccccgccaatctcgcgcgccagcttcggcaccatatagccagagatgagggtcaatagttcgcgcatgatttcacgggcttcatcatcgctgaccatgaagtgcgccgctccctgcacccgatccagcacgtgcaggtagtagggcattaccccggcgtcgaacagcgcattactgaggtcggccagggtttgcgcgttgtcgttcaccccgcgcagcagcacgctctggttgagcaacgtgacgcccgcctgacgcagcatggccatcgccgcgcgaaactcaccgtcaatttcattcgcgtggttgacgtggttaaccaggattacctgcagcgacgaacgctggaggcgactggccagcgtctcggtgatgcgcgccgggatcacaatcggcaggcggctgtgaatacgcaggcgcttaacgtgcggaatagcttccagctgggtcattagccagtcaagctcatgatccttcgccatcagggggtcgccgccggagaagatgatttcatcaagctgcggatgcgccgcgatgtagtccatcgccgtctgccagttgcgcctggtgccctgattttcggcataagggaagtggcggcggaaacaataacggcaattgactgcacaaccgcctttcaccagcagcagggcccggttgcgatatttgtgcaacagaccgggcaccacgctgtgctgttcttccagcggatcggtggagtagccgggggcgacgataaattcttcctcagcggtaagtacctgacgaagcagtggatcgttagggttgcctttctccatgcgggcgataaacgcgcgcgggacgcgcagcgggaacaggcgtctggcctcgcgtccggccagcagtttttcatcagcgtctacatttaaaagacgcagcagttcatcaggactggtcacaacattggcaagttgcgttatccaatcttctctggatggggtatttagggttacaatatgcgccattttgtggcttagctaccagttaaacaatttcagagggccttatggcgacttactatagcaacgattttcgtgctggtcttaaaatcatgttagatggcgaaccttatgcggtagaagccagcgaattcgttaaaccaggtaaaggccaggcgtttgcgcgcgttaagctgcgccgtctgctgaccggtacccgcgttgagaaaaccttcaaatctaccgattccgcagaaggcgcggacgttgtcgatatgaacctgacttacctgtacaacgacggtgagttctggcacttcatgaacaacgaaaccttcgagcagctgtctgctgacgcgaaagcgatcggtgacaacgctaaatggctgctggatcaggctgagtgcatcgtgaccctgtggaacggccagccgatcgcggtcaccccgccgaacttcgttgagctggaaatcattgaaaccgatccaggcctgaaaggcgacaccgcgggtaccggcggtaaaccggcgaccctgtctactggcgcggtggttaaagttccgctgttcgttcagatcggcgaagtgatcaaagtggatactcgctctggcgaatatgtatcccgcgtgaagtaatttcgcgtcatgatgaccggcgtagcctccgtgctgcgccgctcttttcgtacaggcacaacgagcacgatacatgaagcgcagcgttaaactcctggtgttactctttctgagcagcgcgctgttggctggctgcaataccgcccgcggtgtgggtgaagatattcagggcctgggccacgctatctctcacgctgtgagctgaatttccctgccgtttcgttaatggcgcttgcctcccggtatgtcagcctcctccacgcatactccttttctcttaaaaatcgcaaagatcccttcatctttggacggtttgtctatgcttatagggcatgaaaacaaaactgacactaaggatgacattatggtgaaaaaaacgattgcagcgttctttacggttttggtcctctcttcagcactgaccgcttgtaacaccacgcgcggtgtcggtgaggatatttcagacggcggcaacgcaatctctggcgcggcaaccaaagctcagcaataaacgccgtcaacggtacggtttagcgccgtaccgttcttcacttctctcattccgttggatatactcaccacgacttttcatccaccttacgggacgacccgtaagcgtttctcatccggggacggccccagcaaaggagccttatgtcctggatagtcttgtttatcgctggcctgctggaagtggtgtgggccgtcggcctgaaatatacccatggctttagccgcctggttcccagcgttatcaccatcgtggcgatggtggccagcatggcgctgctctcatgggcgatgaaaaccctaccggtaggtaccgcctacgccgtctggaccgggatcggcgccgtgggcgccgccgtgaccggtattgtgctgttaggggaatccgccagcgccatgcgtatcgccagccttgtctgtatcgtgattggcatcattggcctgaagatcagcgcgcactaatcatagcgctgattgacccagaccagtttgccgacatcaaagccctgtcgggtggcaatgtccagcatctgctgcctgacctccggggcgatggtcggcgcccgggccagcagccagagatagtcgcgatcggggccgcagaccagcgcgtaacgatactccttatccagagcaatgacgttatagctgccgtagaaagggccgaagaaggaaatcttcagcgcggcgcggctgggctccccggtaaagtacgctaccccgtccgttttctgccacataccacggtcggggttatagcctttattgaccacgtccaggccaccgtcatcgcgtgggtgccaggcgatcgtgaccttttccagcccgctttcaaaagggtggtcaaagcgggcgatttcataccaggtacccagatagcgctgaacgtcgaagggactgaccacggtgacgcccggcggcggggcgggcgtgctgcaggcgacagacaggaacgagacggcaatcgcggtgattatcggcaggatacgcatggcatgctccttgctggcttttaagctaagtgtagagtccagcagggaaaaggcggcaagatttttctatgaagcgagcccggtagcagaaatgcgaccgggctcttgcaggatcagataaacagtacgccaacgagggtgatgacgctgaggattgccgccaggccgtagaagacccatttaccgttgggcacatggattttcagatcgtgcatggcgtggtgaatacgatgcaacccacaccacagcggcaggacaatcatcagaaagatgaatgcgcggccgataaagctttgggcaaaggccagcacacgctcatagctaaaggcgtcggccggggcgagccccagcggcagcaggatgccgaccagcagcaccatcaccggcgcgacgatcgcgccccacatgccgcctgcgccaaacagcccccagaatacgggttcatcggaacgtttcggattgggattaatcatctcagcctccttaccagaacagggcgacaaacaggatcaccacggtgaccaccgccgtcaccatccagagccctttaatgaccggctctggccccattttttcgcctttgatgatgacgttggcggctttcggcgccagctcaaaccaggttttggtgtgcagcagcgccgccgccagagtaatcaggttgaggatcaccaccaccgggttttgcaggaatccgatatatcccgcccagctctcggcgccgtgcttgagggcaaacagcccataaatcagcacaatgctaaaccataccgtcggtaccgccgtgccttcccgtaccatgtagaagcgataaaacggcagctttttccaccaggtggaggtcattggtcgcacgtagggtttgcgtttcgtcgtcataatgcactccttagcgtggtttcagggtggcgataagaaagtctttcgagctttccaccttgccctgctggatcgcggccgccgggtcgacgtgcttcggacacacttccgagcagtagccaacgaaagtacaggtccagacgccattctggccgttaagctgcgccatgcgttcctttttaccgtggtcgcggctgtcttcgttatagcggtgggcgagggtgatcgccgccgggccgataaattccgggttcaggccgaactgtggacaggcggcatagcacagcccgcagttgatgcagccggaaaactgatggtatttcgccatctgggccggggtctgcttgtttggcccctggtcaggcgtgcggttattgccgatgatatacggcttaatggcttccaggctttcgataaagtgggtcatgtccaccaccagatcgcgctcgatcgggaagttggccaatgcctccaccttgatgcctttggtgtaatcgcgcaggaaggttttgcaggccagcttcggcaccttgttgaccatcatgccgcaggaaccgcagattgccattcggcaggaccagcggtagctcaggtctggcgccaggttgtctttgatgtagcccagcgcgtccagcagcgaggtctgttcatcgtaaggcacgtcatagaacgcgctgtgcggtgcggtgtcgacctccggattgtagcgcaccacttcgactttcaggtttttcatctcagccatgggtggtctccttcttctcagccgcgtccgcttctgcgccatagacacgttttgccggcggcagcgtggtgatcttcacatcgccatattccagacgggtagtgccatcggcctcgcggaaggcgagagtgtgcttgaggaagttgacgtcgtcgcgttcggtacagccttcatccagacgctggtgcgccccgcgcgattctttacgggcgatggccgagtgcgccatacattcggcaacgtttaaaccgtgccccagctcaatggtgtaaagcagatcggtattgaacacgctggaattatcggtaatgcgcacgcgcttaaagcgctcctgcagttcagccagcttgtcgatcgttttctgcatcagctccggcgtgcggtagatgccgcagccttcctccatcgacagccccatttcatcgcgaattttcgcccagttttcgttaccttcctggttgacgagatctttcaggcgctgctccacatcggcagccagcgcatcgagggcggcgccgtttgcctcgcccgcctgagcggcgcgctgcatggcctgctccccggccaggcggccgaagaccaccagctcggccagcgagttggagcccagacggttggcgccatgtaagccaacggacgagcattcgcccacggcaaacagccctttgatccgggtttcgcactgctgatcggtttcaataccgcccatggtgtagtgcgcggtcgggcgcaccgggatcggctctttcaccggatcgacgccgacgtaggctttcgccagttcacagataaacggcagacgctccagcagttttttctcgccgaggtggcggagatcgaggtagaccacgtcgccgcgcggcgtcgggatggtgttccctttccgccactcgtgccagaaggcctgggacactttgtcgcgtgggcctagctccatatatttattcttcggttcgccgggcggggtttccgggcccatgccgtaatcctgcagatagcggtagccgtttttgttgaccagaatcccgccttcgccgcggcagccttcggtcatcaggatcccggagcccggcaggccggtcgggtgatactgaacgaattccatgtcgcgcagcggcacgccatggcccagggccatccccatcccgtcaccggtgacgatgccgccgttggtgttgtagcggtagacgcgcccggcgccgccggtagccagcaccacggcgttagcgcggatctgcaccagggtgccttccatcatattcatcgccaccaggccgcgggcctgcccgtcatcgaccagcaggtcaaggacgaaatgttcgtcaaagcgctgaatttggggaaactgaagggaggtctggaagagggtatgcagcatgtggaagccggttttgtcggcggcaaaccaggtgcgttcgattttcatgccaccgaagcgccggacgttgacgctgccgtcggggcggcggctccatgggcatccccactgctccagctgggtcatttccgtcgggcagtgatgaacaaaatagtcgacgacatcctgctcgcacagccagtcgcctcccgcgacggtgtcgtgaaaatggtactcaaagctatcgtgatcctgggcaacggctgcggatcccccttctgcagcgaccgtatggctgcgcatcggatagactttagaaatcagggcgattttagcgttggggttggcctgagcggcggcgatagcggcacgaaggcctgccccgccggcgccaattacggcgagatcggcttgaaaagtttgcacgacattcctccagttttagtgtatttcgccgccgggctggcgaaaaagtatcactgctcctttataggtacaggagtatagccttagggtcagtatggaaaattgacgtgttcgatttttttatcgatatgtgcggttatttatcagtggtatttatgcgtcagggttaacgatagattaatggcatgtagtctgccggagattgcacaaaatttgtttcactcgccggttgcgagtagacttcgtgcccttaatttgcaatcggagaaagtaccatgagcgagacggcaacctggcagccgagcgcacccattcccaatctgttgaagcgcgcggcggtgatggcggaaatccgccgtttctttaccgatcgcggcgtgctggaggtggagacgccttgcatgagtcaggcgacggtaacggatattcatttgttcccgttcgaaacccgtttcgtcggcccgggccattctcaggggcttaacctgtacctgatgaccagtccggaataccacatgaagcgcctgctggcggcgggttgcggcccggtcttccagctgtgccgcagcttccgcaatgaagagatggggcgtcatcacaatccggaattcaccatgctggagtggtatcgtccatgctatgacatgtatcgcctgatcaatgaggtggacgatctgctgcagcaggtgctggagtgccaaccggcggaaagtctctcctatcagcaggcgtttcagcgccatctggaaattgacccgctctctgccgataaagcacagctgcgtgaagtcgcagcgaagctggatctgagcaatatcgccgatactgaagaagatcgcgataccctgctgcagctgctgttcaccatgggcgtggagccgcacatcggcaaagatcgaccaacgttcatttatcatttcccggcgactcaggcctctttagcgcagatcagcccggaagatcatcgggtcgctgagcgctttgaggtctattacaaaggtattgagctggcgaacggtttccacgagctgaccgacgcccatgaacagcgcctgcggtttgagcaggataaccgcaaacgcgccgcgcgcggccttccgcagcagcccatcgataacaacctgctggcggcgctggaggcgggtctgccggactgctccggcgtggcgctgggcgttgaccgcgtggtcatgctggcgctgggcgctgaaagcatcggcgaagtgattgcctttacggtagaccgcgcctgatcgctttttcacctccctccgccggcgggtgggggaggtgaaagacgactttggacctgacaccctcgccccggctttagcccgaatacccacaatttccatccgtgattttgctactatccgcgctctttttatgaggccaggcgtcgctcgtcgggcgatgcccacgtttggatagatttatgcatcaacaactcaagaagatgagcctgatcgggctgattctgatgatcttcacctcggtgtttggctttgccaacagcccatcggcgttttatctgatgggctatagcgcgatgccgttttaccttttttccgccctctttttctttatcccgttcgcgctgatgatggcggagatgggctcagcttatcgtcgcgaagagggcgggatctattcctggatgaaccacagcgtcgggccgcgctttgccttcattggtacctttatgtggtttgcctcgtacgtagtgtggatggtgagtaccgccgctaagatctgggtcccgctatctacttttttgtttggcgcggacgaaacccagacctgggcgctgggtagcctgacgccgacgcagacggtcggtattctggcggcctgctggatggtcgtggtgacctttattgccgtcaaagggatcaataaaatcgctaaaattaccgccgtcggcggtatcgcggtgatggggcttaacctggtgctgctgctggtgagcggggcgatccttctgcttaacggcggtcatttcgcccagccgttaaacttcaccctttcgcctaatcccgggtatcagtcgggcatggcgatgctgtcgtttgtggtatttgccatctttgcctatggcggaattgaggcggttggcggcttagtggataagaccgataagccggaaaagaactttgccaaaggtattatcatcgcggcgattgttatctcgatcggttactcgctggcgattgtgctgtggggcgtgagcgccaactggcagcaggtgcttggcgcgcgttcgaccaacctcggcaacatcacctatgtgctgatgaccagcctcggggcgacgctgggccaggccctgcacctgacccctgcggcgtcagccctgaccggggtctggttcgcccgtattaccggcctgtcgatgtttctcgcttacaccggcgcgttcttcaccctcagctattctcccctgaaagcgattatccagggcacgccaaaagcgctctggccgtcggtgatgacccgtctcaacgtcaacggaatgcccgccgcggcgatgtggctgcagtgtctgctggtcggggtgtttatcgtactggtatcgttcggtggggatagcgcttccgcgttttataacaagctgacgctgatggccaatgtctctatgaccttgccttatctgttcctgaccatcgccttcccgttcttcaaggcgaaaacccatcttgaccggccgttcgtgatcttcaaaaaccgtccgtcgacgctgctggcgaccggcgtggtgctgctggtggtgaccttcgccaatatcttcaccattatccaacccgtcatcgacagcggggactggaacagcaccctgtggatggtcggtgggccgatcttcttctcactgctggcgctggggatctacgaaagctaccgtcggcgcatggcgtccggcgcgctggtgatggagagttaaagagcctgcccggcggtgccgccgggcaggggatggtttacaggctaccagccgtacggcggctggtttttccagccgaggtcatggttttactgctttgcctgccgtcaatactttccagacgcatctggaacggagggaacggcatttcaatgccatgctcgcggaagcccgccaggatcaactgatgcatctcatggcgcagcggcatgcggtgccccatctccgcggcaaaaatacgtagctcgaaaatctggatcccctgctgcaggtcgacgagaaacgcctccggcgccggggtatcgatgaccagcgagcagcgatgcgccgcggcgatgagaattttcgtcacctcttcggtatcggcgtccacaggcgccggcaccgtcagcaccacgcgggtaaccgagtccgacagcgaccagttgataaactgttcggtaatgaacgccttgttcggcacgataatctctttccggtcccagtcgctgatggtggtcgcacgggtattaatgcgggtgacgctgcccgtcaggtcgcgaatggtgaccgtatcgccgatgcggatcggcttctcaaacaggataatcaggccggagataaagttggcgaagatctcctgcaggccaaacccgagacccacacccagcgcggcgaccagccactgcagcttcgaccactcaataccgatcatcgagaagcccaccagcccgccgaccagcatcagcagatacttagtgatggtggtgatggcgtagccggtgccgggcgttaaatcgagatgctggaggatcgccagttccagcagcgcgggcaggttgcgtaccagctgagtggtgatgatcagcaccagaatggcaatcaacaccgcgccaagcgtaataggctcaaggctttccaccccttgtaccgtcgaggtcacgtcccacagcgagatattctcaaggaagccaaacgccgagtgaatctccgaccacagcacgatgaccgatagcagcgcgatcagcatcagcagggagcgcacaagccgcagcgactgggtactgatggcatcgaggtcgacctcgctgacctccgtctccaccgacccttccgggctgctgacgtgaacgggctcatcttcgccgcgggcgcgctgagcgagaatttccgcgcgacgatggcgggcccggtcgaaggccagccggcggcgctggatcagcatccagcggcggatgatgtgatagaccaccagcagcaggaaccagatggcgaccgaggtttccagacgcgcaagcagcgcctgggcggtggcgaggtagccgacggcggccgccagcatggccaccagcggggcgccaagcatcaggttccacagcaggcggttcaccatattgtcgccattcccctctttatccagatagagcggaataccggcgtgcttaaggctcagggtgaccaccgccagcgcgccgcagatcagcaggaagcacaggcggcccagcgaagcggagaattcgcggtcgttaagattatcgaacatgatcagcgccataatcagcggcacaatcagcccgatgctcatcaggtagtagcgcatcgccttcgccacgcggctacgcggccagccgaagtgggcgataaacagcccgtttggccgggcgaaggtggcgcagatcatcaccacccacagcaaaggcaccgtcgcggtgactccatcgccaatcgccaccgccagcgggaacggccaggcggactgcagaccatagccgagcgtcatccacagcaccggcagcggcgaggccaccagtatcgaccagaagaccgtgcgcagcgtcagccagaagtgatcctgggtgactttccccacccgggcgctggagcgctcgagaaagcgggtgaaatggcgccgcgagctgatgctaaagccaaccagcagcagggcggcaaacagcggtagcagggtctctttgctggtaagcatcatcgcgctggctttgcccagttcgctgatggtatccagggagatcaggcgccgcagatcctggacgatctccagcggccatgagaagccgatggggctgacgtccgaagtccagaacagatagcggtgggtggcttcgttgatctctttcagcgcgtcttccagctggccgttggcgaccttcagcttggtgagctccagcatcagggtgtcgccgccgcgcagcagcgagttcagcagctcgttctgcgtgcgcagctgcgcctgcaggatcttgttctgctcgctggtcagcggttcgccgtcggcctggcggatctgccgcagctgcggctgcttactcagcaaatcttcaaagcgcagacgctgcacgcgcagctgcgccatttccgtatccagctgctgcgggcgagggcgctccggcagccgcgccacctgggcgcgcagggcttcgcccagcagattggaggagcccagccactgcgactgctcgcgcagggtgtttaacgcctggcgcacctgcagcgtttgattcgtcgcctgtcgctgctgggatgccaccagatccatgcgctgcgcctgctggttcagcgcctgggagagctcacggttgaccttaaactgggcggtgatgtccggcggcaggttttcactgttctccgccagcagttcggtactctccagcgccttttccgcctcccgctggcgctggctgttttgcagattgcgcagcgcctgcagataggcatccagctgctcgctctgtttttgcgccagctcggaacgggcgcgcgacagctcctggcggttgttggcggagagctgggcgaggtcgagttcatccaccagcgccttcagacgcgccgattccgcctgcagggcaagattttgcgcctgggcgagagcattgttgccggtttgcgtgccgatgcggcgctcaacctcattgagctgacgacgggcatcggtttgctgctgcggcagctggttcagggagtcggcgatttcacgcgcgcgatcctgctcctgctgcgcctggcggctcgattccagcagctgactgctgacctgcaggatctcctggttcagcgcatcggcggtcaggccggttggcacctggcgcggctcttcgctcagattattgagctgggcacgcaggctttgaaacagtttggggaaattgtcgataacgtcctgatactgacgggcgcgctcgagggatgattttcgctcctcaagcgcgttcagcgcggactgcagaacttcaacggtttcaggctgggcgggctttgccgccttcgcctgttccagttcctgggttatctgtttagcatccggggctgtcgcagcgtacgccccgaaactgaggctcaaggccaacaggaaagtgtatatcaggcgcacggcataacccttttgctgaagaattaaccttggtcttgtttatcgtcaaccagcgggctggcgcggtgttcggcgcggatctcttcttccggtaacggcgcgggttcagcggcggcggtcgcttccactgttgtcgccagcggttggccgatcttggtcacggacaggctttgcagcgtgtcgaccagcttcacctggcccggggcaaacaggttgatcacggtggaacccagtttgaagcggcccatctcctggcctttcagcaaggcgatggagccttcgttgtcgccagcgggccaggtccagcgtttaataatgccttcgcgcggcggggtcacggtgccggaccacacggtctcgatgctgccgacgatagttgcgcccaccagaatttgcgccatcgggccaaactcagtatcaaacaggcagatgacgcgctcgttacgggcgaacaggttcgggacgttctgcgccgtcaagtggttaacagagaacaggtcgccaggaacgtagatcatttcgcgcaggatgccgttgcacggcatgtgtacgcggtgatagtcgcgcggcgacaggtaggtggtggcgaagctgccgttacggaacaggtcggccatctgatagttgccggccagcagggcttccagactgtagtcatgacctttagcctgcaggattttatcgttctcaatggcgccaagctggctgatcacgccatcggccggcatcaccagcacgtttggatcggtattcaacgggcgaacgtcgtcgcgcagcgggcgcacgaagaaatcgttgaaggtgcgataagccgcggtatccggcttctgcgcctctttcatatcgaccttgtagtatttcacgaacagatcgatgaccagcttcgtcagccaacctgcgcgtttgctcgcaccccagcctgcgaggcgggtgagccacagtttaggcagaatgtattgcagtgaaagtttaagatcgtttaacaaagtagcctccaggccatgatatgtcgttcctgaccccgcctgcgggcggggacctgaaaaaaggggacgattctatacgtaaaactcgccaaatggcatccgcgtaagctgcgtcatcatcgctgcccggcagcgcctgacgtgatgctcagcttaatgatcagtcatcggacgaggaaaagtttttacgcgtttttacctgtacctgcgccatgctttccaggatgcggtggtagttctcaaaacggctttcggcgatcttgccgttctctaccgcttcgcgaagcgcacagccaggatcggaatcgtgtttacagtcgcgatatttgcaacggcctaaataatcatggaattcgacaaagccgttggtgatttgttccgcttccagatgccacaggccgaactcacgtacccccggtgaatcaatcacatcgccgccgtgcgggaagtggtagaggcgtgccgcggtggtggtgtgttgacctaagccggaaacgtccgagacatcattggtgaggatctgatcctcgttcaacccgagcagggcgttcagcaggctcgatttaccgaccccggactgcccggcgaagatactgatgcggtcggtcagggccgcttccagcggcttaaggccgtcctgagtccgactggaaaccagcagcacgcggtaaccgatgttgcggtagatatccatttgctcattgacgaagcgcagaccatcatcatccagcagatcgattttattcagcacaatgagcggctcgatatcctgcgcttcgcaggccaccagatagcgatcgataatattcagcgacagctcaggcaggatcgcggaaaccaccacgatctggtcgatattggcggcgataggcttcacgccgtcgtaaaaatccggacgcgtcaggacggaggcgcgatcgtgcaccgcctcgacgatccctttgacgcttacgccgtcggcggcgtctttgcccggccgccagaccacgcggtcgccggtgaccagcgagcggatcgtccggcggatattgcagcgatgcacgctgccgtcagcggattcgacgtcggcatgcataccaaagcgactgatgacaatgccttccgacgtttcgccaaacaggttgtcatcgtagtcggccttctccgcagtggttttcagacggcgctggtggttggctttgacgcggcgctgctggcctttggagagtttatttttactcaatcgaactggctcctggtcgccctgatggggcaaaacctctatgatacacgctattttagatgaatatagtcacgcgagaagggtggaaaatagcatgagtgcaaatgaaaacaacctcatttggatcgatcttgagatgacagggctggatccggagcgcgatcgcattatcgaaatcgccaccctggtgaccgatgccaacctgaacattctggctgagggcccgaccatcgcggtgcatcagtcggacgctcagttggcattaatggacgagtggaatgtgcggacgcataccggcagcggtctggtggatcgcgtaaaggccagcaccgtcagcgagcacgatgccgaactggcgaccattgagtttcttaagcagtgggtgccggcgggcaagtcgccgatctgcggcaacagtatcggccaggatcgtcgcttcctgtttaagtacatgccgcaactggaagcctatttccactatcgctatctggacgttagcacgctgaaagagctggcgcgccgctggaagccggaaattctcgacggctttaaaaagcagggcactcatcaggcgatggacgatatccgcgagtcggtcgccgagctggcttactaccgcgaacacttcattaagctgtaaaccgcgaccgggccctgtgcgcggcccggtacacttttctgcgttatttaaaccacttctgctgcatctgctggaagtcaggtgtcgccatgaccgcggccagggcatcgttgatggcgttcagcagctccggatcgtctttgcgcaccgcaatcgcatactgcttaccgtaataagccgggtcggtggcccgttcatccatgatggcgtagtcagggttctcctgctgccaggcgtcgagggtggcgaagtcgcccatgacgccggttatttgcccggctttcagcgcggccagggcgctggcgacatcgtcgtaagggacagcctgtacggctttctgtttatcacgcaggtagcgctgatgcagcgtgcctttcaccacgccgacttttttagccttcagatcggcaaaggtatgggcgacatctttgttgacgatcactaccccggagagcgcctggcgatagggtcggctgaaggcgacctgcttctcacgcatcgggatcacttccatgccggcaatcaccgcgtcaaatttcttaaagcgtaaagccgggatcagggtatcgaaacgctgcgccgtgaactggcactgcgcctgcatctgctggcacagggcgtgcgcgagatcgatatcgaagccaacgggctgatttttgccgttggcggtgacaaacggtggattggccgtggtggtgccaaaatggagcgtctcggctgacgcggttccgatggccagcgtgctcagcagcaggacggtgaggacttttctcatgctaattccctgtttggcgtcggggtggcctcgttatacgtcgcgccaccgctgtatgatgcgagcgattttgcgtcattcagccgggcggaaaaagcgattttgcccgttatgacgcttatttatacaattcagcggcgtagatggcgagaaaatgtccatttaaacaaaaaacgcaaaaaagtgatcgtcagggggttgcaggggcatcgaattctcgtataatgcgcctcccgtaacgacgcagaaatgcaaattacgacgccatcgaaatatggcaaaaaatgcagtaacgcgggaatagctcagttggtagagcacgaccttgccaaggtcggggtcgcgagttcgagtctcgtttcccgctccaaaatttgaaagcaccatcctgatcaaaggatttcatctcgcagatgcggggcgaaagccgaagattaagcgggaatagctcagttggtagagcacgaccttgccaaggtcggggtcgcgagttcgagtctcgtttcccgctccaaaatttgaaagacacaccacaccagtcgcagttttcaggttgctagacggtagcttgaatgacgatgattaagcgggaatagctcagttggtagagcacgaccttgccaaggtcggggtcgcgagttcgagtctcgtttcccgctccaaattttcttccatctcttatttatccacagtgcaatccagcgccggggatgattttcgtttggtccgcagaaatactgtgaacagagttatccacaggttgtcgttccgtcactggcggcgcaaatgcttcgctttgtaaatagtatctttgtatgttattgaaatttaacaaataaatttcatttcaaaatgttaatccgatcacttgaccttggtctgcgccttgaaacgcaatgtgttttagattttattcacagcctgtgaatgaatcaggcgtcgcgcggcaagcctttctctaccactctgaccagacgtaattttttcggcaactgtacttcaacggcgtcggcgttccgctttttcagttgctgggcaatcgcccactcaatgtgttcgtcgagaagcgggtgctcgccccggcggctctccagggcgcgaagatgggcttcatcccagggcgcattgcccaacgcgacggcgatattgcgcagccagcgcaggtggccaatgcgacgaatcgccgacccttcggtcaccttcagaaaccacgcttcgctccaggcgaacagctccaccagcggcggggcatgcagcgctttgcgtgggctgaaatcctcttcatcggtgagctgtgagaaacggttccacgggcagatcagctgacaatcatcacaaccgtaaatacggttgccgattagtggacggaactcctcggggattgcaccttccagttcaatggtgagataggagatgcagcgccgggcgtcgacggtatagggctcaacgatggccccggtgggacagatggtcatgcaggcgacgcagcgcccacactcctccgcgatcgggctgtcgaccggcaggggcagatcaatcagcagttcgccgaggaaaaagaacgatccggcgtcgcggcttaagataagtgagtgcttacctgtccagcctaggcccgctttttctgcgattggccgttccaggataggcgcggaatcgacaaaaggtctaaaattgagcgaagcacactgttcctgaatcttctcccccagctttttcaggcgattacgtagcagcttatgataatcacgcccgagggcataacggctgacgtaacccagcgtgggatctttcagggtgcgggcaaaggcggcgttagcgggcagatagttcatccgcacgctgatgacgcgtaacgtaccgggcagcagttcgtggggacgggcgcgcatcataccgtgacgggccatccattccatttcgccgtggtattgtttatccagccatgcctgcagtttgggttcactggcgctgaggtcggtatcggcgatccccacctgctggaacccaagctctgtgccccattgtttgatttgttgcgctaactgaacgagatcgaggggctgtgacatgatggaccatacaatgacgaaaaaccctgacagtataccatacaacatttggcctgcggaggcgctgcgcctggccgaacgagaggcggcggacagcctggggctgacgctgttcgaactcatgcagcgcgcgggcgaggcggcgttccagctggccagctgtgcttatcctgcccgcgcgcactggctgatcctctgcggacatggcaacgacggcggcgacggggatgtcgtggcgcgtctggcacaggccgcggggcggcgggtgacgctgctggcggtggagagtgacagcccgctgccggaagaggcgcaggcggcgcgggaggcatggcttaacgccggcggcgtgatccatgcggcgactatcccatggcccgacgatatctcactgattattgatggcctgctcggcaccggtctgcgcagtgcgccgcgcgatcccgttgcggcgctcatccaccaggcgaaccaccacccggcggcggtggtggcgctggatatcccttccggcctgaatgcgcagacgggcgcgacgccaggtgcagtggtacaggccgaccatacgctgacctttatcgccctcaagccggggctgctgaccggcaaggcgcgggatgtcgtcgggcaactccaccatcatgcgctggggctcgaacgctggctcgccggacaaagcactccgctgacgcggttttgcgccgcccacctcgccgactggctgccgccgcggcgggccacctcccataaaggcgatcacggcaagctggtgattgtcggcggcgatcgcggcacggcaggcgctatccgtatgtgcggtgaagcggccctacgcagcggcgcgggactggtgcgagtgcttactcacccggagaacgtggcgcccattgtcaccgtgcggccggaattaatggtagatgagctgacgccgcagactctgaaagccgcgctggagtgggctgatgtggtggcgattggccctggcctggggcagcgcgaatggggacgcagcgccctgcgcacggtggaaagttttaacaaaccgatggtctgggacgccgacgcgctgaacctgctggcattcaatcccgataaacgtcacaatcgcgtgctaacgccgcaccccggcgaagcggcccgtctgctgaacgtcagcgtggcagaaattgaaagcgatcgcttactttctgcgcagcgtctggtaaaacggtatggcggcgtggttgtgctgaaaggcgcgggcacggtggtggccagtgaaagcggggcgatgggcattatcgatgccggcaatgccgggatggccagcggcgggatgggcgatgtgctcaccggcatcatcgccgcgttgttaggacagcacctgacgccgtatgatgctgcctgtgccgggtgcgtcgctcatggcgatgccgccgaccgactggccgcccgcgagggcacccgcggcatgctggcgaccgatctcttttccacgctcaggcgtgttgttaacccggatgtgattgacgtagaccatgattaaccgagtgattcctttacccgatgagcaggccacgctggcccttggcgaccgcatcgcgcaggcctgtaccggcgccaccgtgatttatctgtatggtgatttaggcgcggggaaaacgaccttcagccgcggctttttgcaggcgctcggtcaccgcggcaatgtcaaaagcccaacttataccctggtggagccctataccctcgagaacctgatggtgtatcacttcgatctctaccgtctggcggatcctgaggaactcgaatttatggggatccgtgattattttgccgacgatgccatctgcctggtggaatggccgcagcaaggcgcaggtgtcctgcctgacccggatgttgaaattcaccttgattaccaggcacaagggcgtgaggcacgtattaccgcgatctcctcacggggtgaatctttactggcgcgtttagccttttagcctgaaggatgacgggatgaagtatcgcataaccacctggcttgccgctgcgctgatgctgtcgagtcttcacgccactgcggcgagtttatccgatatccaggtctctaacggagaccagcaggcccgtattaccctaagctttgtcggtgagccggagtactcctttaccccacagggtaaacgtctggtggcgctggatatcaagcagaccggcgtattgcagggactaccgctgcagtttagcggcagcaacctggtgaagagtattcgcgccggcacgccgcaggatacgcagacgctgcgtctgctggtggatctgacggaagatggcaaaactcgggcggtgaagcaacagaacggggcgaattacacggtggtctttaccatcaacgccgacgcgccgccgccgccgcctccgccgcccgtggtggtgaaacgggccgacccgccgccggtgatgccttcccggacgacgacgtcagggcgtaacccgttcagctcgtcgggtcatgaacggcagacggtgatgacctcctctcagccggcgatgaccaacaatcagaccgtgactcgcccggcggcccgcacggtgtcggcggatgataaagtcattatcgccattgatgccgggcacggcggccaggatcctggcgcgattggcccgaacggcaccaaagagaaaaacgtgactatcgctatcgcgcgcaagctgcgggcgttactgaacgccgatccgcagtttaagccggtgctgacccgcgacggggattactttatttcggtgatgggccgctctgacgtggcgcgtaagcaaaacgccaatttcctcgtctctatccatgctgacgccgcgccaaaccgcgatgccactggcgcctcggtgtgggtgctctcgaaccgtcgcgccaacagcgaaatggccggttggctcgagcagcatgagaagcagtctgaactgctcggcggtgcgggcgatgtgctggcaaacagccaggccgacccctacctgagccaggcggtgctggatctgcagtttggtcattcccagcgcgtcggctacgatgtggcgaccaacgtgctgagccagctgcagcgtattggccacctgcacaaacgccgcccggagcatgccagccttggcgtgctgcgctcgccggacatcccgtcgatcctcgtggaaacgggctttatcagtaacaacggcgaagagcggctgctggggagcgatgattaccaggagcagattgcggaggcgatttataacggcttacgcaactactttatgcagcatccgctgcaggcggcgcctcgcggcgaggcggcgcagaccgccagcgccgcggcgccgggcgggatgttgattaactaaggagcaggggatgccgattcaggttctgccgccgcagctcgccaaccagattgccgccggcgaggtggtggagcggcccgcgtcggtggtgaaagagctggttgagaacagtcttgatgcgggcgccacgcggattgacattgatatcgaacgcggcggcgcgaagctcattcgcatccgcgataacggcagcggcatcaaaaaagacgagctggcgctggccctggctcgtcatgcgaccagcaagatcgcctcgcttgacgatctggaggccattattagcctcggctttcgcggcgaagcgctggccagtatcagttcggtagcgcgctttacgctgacttcgcgcacggcggagcagcaggaagcctggcaggcgtatgctgaaggccgcgatcaggcggtgacggtgaagccggcggcgcacccggtcggtaccactctggaagtcctcgatctgttctataacaccccggcgcggcgcaaattcatgcgcaccgaaaagaccgagttcggccacattgacgaggtggtgcgccgcattgcgctggcgcgcttcgacgtcactatcaacctcagccataacggcaaggtgatgcgccagtatcgggccgtcgctcaggatggccagcgcgagcgccggctggggacaatttgcggcgccgcttttctcgaacatgcgctggcgatcgagtggcagcatggcgatctgaccctgcgcggctgggtcgccgatccgctgcataccaccccggcgctggcggaaattcagtattgctacgttaacgggcggatgatgcgcgatcggctgatcaaccatgctatccgccaggcctgtgaagacaagctaggggccgatcagcaaccggcgtttgtgctgtatctggagatcgatccccatcaggtggatgtaaacgtccacccggccaagcatgaggtgcgtttccatcagtcgcgcctggtgcacgactttatctaccagggcgtactgagcgtactgcagcagcagcttgacgcgccgctggcggaaaaagacgacccgccggcgccgcgcccgatgccggagaaccgcatcgccgcgggaggcaaccagtttgcgcggccagcggaagcgcgggagcctgcgacccgcttcagcatcacgccatcgcgtgagcctgcggcctccagcggcaaaccgggcggcgcgagctggccgcatgcgcagccgggttaccagaagcagcagggagcgctttatcgtcaactgctcgacacgccaacggcgccaaagccagcgttgcagcctccggcggcggcagagttggccggtcacagtcagagctttggcagagtgttgacgattgttggcggcgactgcgcgctgctggagcgcgagggcggtctggcgctgctgtcgttgaccgttgccgagcgctggctgcgccaggcgcagttgaccccgggagcggaggcggtatgtgctcagccgctgctgatcccgctgcggttaaaagttacggaaggggaaaagcaggcgctggccgccgctcagccggcgctggcgcagctagggatcgatgtgcataccgatgccctgcacgtgacggtgcgcgcggtccctttacccttaagacaacaaaatttacaaatcttgattcctgaactgataggctacctggcgcagcaaaacgcattcgacgtcggcaatatcgcccaatggatggcgcgtaatctgacgagcgaacagacgtcatggaatatggcgcaggcgattgcgctgctggcggacgttgagcgtctttgcccgcagctggtgagaacgccgccgggtggcctgttacaacctgtagatctccattcggcgatgaatgccctgaaagatgaatgatgtaaccgaggcgagcctgcccaaggcaatttttttaatgggcccgacggcctccggcaaaaccgcgctggcgatagccttacgtaaagttttgccagtagagttgattagcgttgattccgccctcatttatcggggaatggatattggcaccgccaaaccggatgctgcggagcttagcgctgcgccgcatcggctgctggatattttggatcctgcggaggcctattccgcggcggattttcgccgcgatgcgctggcggcgatggcggatatagtcgccgccgggcgaattccgctgttagtcggcggaacgatgttgtatttcaaagcgttgctggaaggattgtcgcccttaccgtcggctgacccagaggtcagagcgcggattgagcagcaggccgcagagcaggggtggaatgcgttacatcagcaattacaggagatcgatcccgtggctgctgcgcgtattcatccaaatgatccgcaaaggctttcccgggcactggaagtttttttcatttcgggtaaaactttaacggaactgacgcaaacgtcaggagacgctctgccatatcaggtgcatcagttcgccatcgccccggcgagccgtgaactgctccatcaacgcatagaacagcgttttcatcagatgttagcttcaggttttgaagcagaagtacgggcgctttttgcccgcggagatttgcatacggacatgccttccatccgttgtgtcggataccgccagatgtggtcatatctcaatggcgagatcccgtatgatgagatggtttatcgaggtgtttgcgccacgagacagttagccaaacgtcaggtcacctggctgcgcggttgggaaggtgtgcactggttagacagtgaacaacctgaacaagcgctcaacaaagtattacaggttgttggtgcgagccagaactgaacgtgtacaattaaacggtatcgtgcgtaattttttttgagaatcgtaaggttctgagtacaaaacaagcatacatataaggaaaagagagaatggctaaggggcaatctttacaagatccgttcctgaacgctttgcgtcgggaacgcgttccggtttctatttatttggtgaatggtatcaagctgcaagggcaaattgagtctttcgatcagttcgtgatcctgttgaagaacacggtcagccagatggtctataagcacgcaatttctactgttgtcccgtctcgcccggtgtctcaccacagcaacaatgctggcggcggttccagtaactatcaccacggtggtagcgcgcagggttcttctgcgccgcaacaagacagcgacgacgccgaataaggccagtgctgtttttccacgccggggagccaggttttctgcgttccccgctggtattttataaggggtttacgcttgtttgaccgttatgacgccggtgagcaggcggtactggtacacatctatttttcgcaagacaaagatatggaagatctccaggagtttgaaactctggcctcttccgccggtgtcgaagcaatgcaggtgattaccggtagccgtaaagcaccgcacccgaagtattttgttggtgaaggtaaggcagtcgaaattgcggaagccgttaaagcgaccggcgcttcggtcgtgctcttcgatcatgccctgagtccggcgcaagaacgtaacctggaacgcctgtgcgaatgccgggttatcgatcgcaccggtcttattttagatattttcgcccagcgcgcgcgcacccatgaagggaaattgcaggtcgagctggcgcagctgcgccatatggcgactcgccttgtccgcggttggacccaccttgaaagacagaagggcgggattggtttgcgtggcccgggtgaaacccagctcgaaaccgaccgccgtttattgcgtaaccgtatcatgcagatcctgtcgcggctggaaaaagtcgagaaacagcgcgagcaggggcggcggtcgcgtgcgaaagccgatattcctaccgtgtcgctggtgggctataccaacgccggaaaatcaacgctctttaaccagatcactgccgccgaggtctatgccgcgaaccagctgttcgccaccctggacccgacgctgcgccgcattgacgtccctgacgtcggcgaaacggtgctggccgataccgtcggctttattcgccacctgccgcacgatctggtagccgcgtttaaagcgacgttgcaggagacgcgtcaggcgacgctgctgctgcatgtgattgacgcggcggatgtccgcgtgcaggaaaacattgatgcggtaaatacggttctcgctgaaattgaggccgatgagatcccggcgctgctggtgatgaacaaaatcgacatgcttgacgattttgaaccgcgcatcgatcgcgacgatgaaaataaaccgattcgggtctggctttcagcccagaccggggttggcgtaccactgctttttcaggcattaacggagcgtctttccggtgaagtggcccagcatacgctgcgcttaccgccgaaagaagggcgactgagaagccgtttctatcagcttcaggcgatagaaaaagagtggatggaggatgacggcagcgtgagtctgcaggtgcgcatgccgatcgttgactggcggcgcctctgtaagcaagagccaacgcttgttgactatgtggtttaaccttgcagcttgcctgaagatattgacccctgtggggatatcaaaaacaaatatggagcatatacatggcgtggaatcagcccggtaataacggacaggaccgcgacccgtgggggagcagcaaacctggcggcaactctgagggaaatggcaataaaggcggtcgcgagcaggggccgccggatctggatgatatcttccgcaagttaagtaaaaaacttggcgggctcggcggcggcaagggcggactgggcggcggcaatagcgcgcaggggcctcgcggaccgatgggcgggcgtattgtcggcatcgttgccgcggcggcagtgattatctgggcggccagcggtttctataccattaaagaggccgagcgcggcgtggttacccgttttggtaagttcagccatctggttgagcctggcctgaactggaaaccgacctttatcgataacgttcaggcggtgaacgtggagtcggtgcgcgaacttgcggcttccggcgtcatgctgacctctgacgaaaacgtggtgcgcgttgagatgaacgtgcagtaccgcgtcaccgatccggagcgctatctgtttagcgtgaccagcgcggacgacagtctgcgtcaggccaccgacagcgcgctgcgcggcgtgatcggcaaatacaccatggatcgcattctgaccgaaggtcgtaccgtgatccgtagcgatacccagcgtgagctggaagagacgattcgcccgtacaacatgggtatcactctgctggacgtcaacttccagacggcgcgtccgccggaagaggtgaaggccgcgtttgacgatgccattgccgcgcgtgagaacgagcagcagtacattcgtgaagcggaagcgtataccaatgaagtccagccgcgggcgaatggtcaggcgcagcgtatcctcgaagaggcacgcgcctataagacccagaccgttctggaagcccagggtgaagtggctcgctttgcgaagatcctgccggaatacaaagccgcgccggaaattacccgcgagcgtctgtatatcgaaaccatggaaaaagtactgagccacacccgtaaagtgctggtcaatgacagcaaaaacggcaatctgatggttctgccgctggatcagatgctgaaaggcgccgctgcgccggcagcaaagagcgatagtagtgacgccagcgatctgctgcgcctgccgccagcatccagctcaagcagcgccagcacctcatcaacctcgagctcaaccgggggtagcattatggaccaacgccgcgctaacgcgcagcgtaacgactaccagcgtcagggggaataacgatgcgtaaatctgttatcgcgatcattgtcatcgtgctggtagtgctctacatgtctgtctttgtcgtaaaggaaggcgagcgcggtatcacgctgcgtttcggtaaagttctgcgcgacgacgaaaacaagccgctggtgtatgcgccaggcctgcacttcaagatcccgtttatcgaatcggtgaagatgctggatgcgcgtattcagaccatggacaaccaggctgaccgtttcgttactaaagagaagaaagacctgatcgtcgactcctatatcaagtggcgcatcagcgacttcagccgttactacctggcaaccggcggcggcgacgtctcccaggccgaggtactgctgaagcgtaaattctctgaccgtctgcgttctgaaattggtcgtctggatgtgaaagatatcgtcaccgactcccgtggtcgcctgaccctggaagtgcgtgatgcgctgaactcgggttcggccggtacggaagatgaggttagcaccccggcggctgacgacgcgattgctaaagcggcagagcgtgtagaagccgaaaccaacggtaaagtgcaggtgatcaacccgaacagtatggcggcgctgggtatcgaagttgtcgacgtacgtatcaaacagatcaacctgccggcagaagtgtcggaagcgatttataaccgtatgcgcgcggagcgtgaagcggttgctcgtcgccatcgttcacagggtcaggaagaggcggaaaaactgcgcgcgactgcggactatgaagtcaccaagacgctggcggaagccgagcgccagggccgtatcctgcgtggtgaaggtgatgcggaatcagcgaaactgtttgccgacgcgttcagccaggatccaggcttctactcctttatccgtagcctgcgtgcctatgagaagagcttccagagcaatcaggatgtgatggtcctgagtccggacagcgatttcttccgctatatgcgttcaccggattcggcgcgtaaataagccggagaaggtgtaaacctgaagtaataatgcgaaaaggcgcctgaaacaggcgccttttttcatgctgcgagggcgggaattagttgccgagtagcttgttcagcaggccgccgatcaccggcaggcctgccagcgcactttcgatggtgccgccgatagaagagccgatgctttcgcctaaggttttgcccaggtccggcgccaggtcggccagattgagggtgccaagcagtggcaggttaatgctcagggcatcagtgcccatcgtccatgcggctgcgccgaccttgctgcctaaggccgccagaccatcctgtaaccagcctgcgccgctcacattttcgatttcaaatgcggttaattctctcatcataatcttcctgattaagtagacgtaccgggttgtagtacgcgatggcatagttacaatttaaaaaatatccagcaatacaattagttgtgaattttgtttcacctttccggttcataatgaagctgaaatacgggacaatgtgaaatgagggaatgaattcaccatgctggccgatgacgcccgcgagggcggcaatgatacttttcaattagggttgacgatgaactccaccatttggctggcgctggcgctggttttagtacttgaagggcttggcccgctgctttatccgcgcgcctggcgcaaaatggtcgccagcctgagccagctaccggataatttattgcgtcgttttggcggcggacttgtggttgccgggattgtgatctactacatgttgaggaaatcgattggctgatcaaaaagtggtcggatttgccttattttggatgcaaaaagtgctgtaactctgaaaaagcgatggtagaatccatttttaagcaaacggtgattttgaaaaatgggtaacaacgtcgtcgtactgggcacccaatggggtgacgaaggtaaagggaagatcgtcgatctcctgactgaacgggctaaatatgttgtgcgctaccagggtggtcacaacgccggccatactctcgtaatcaacggtgaaaaaaccgttctccatcttattccatcaggcattctgcgtgaaaacgtcaccagcatcatcggtaacggcgtcgtgctgtctccggccgcgctgatgaaagagatgaagggcctggaagaccgtggtatcccggttcgcgagcgtctgctgctctctgaagcctgcccgcttatccttgactatcacgtggcgctggacgtggcgcgtgaaaaagcgcgtggcgcgaaagcgatcggcactaccggtcgcggcattggcccggcttacgaagataaagtcgctcgtcgcggtctgcgcgttggcgatctgttcgataaagcaaccttcgccgataaactgaaagaagtgatggaatatcacaacttccagctggtgaacttctacaaagcagaagcggttgactaccagaaagtgctggacgatgtgatggcgattgccgacatcctgaccagcatggtggtggacgtatccgacctgctggatcaggcgcgtcagcgcggcgacttcgtgatgttcgaaggcgcgcagggtacgctgctggatatcgaccacggtacctacccgtacgttacgtcctctaacaccaccgcaggtggcgtggcgaccggctccggcctgggcccgcgttatgtggattacgtactgggcatcattaaagcttactcgactcgcgtcggtgcaggtccgttcccgaccgagctgtttgatgaaactggcgagttcctctgcaagcagggtaacgaattcggcgccaccaccggccgtcgtcgtcgtaccggctggctggacgcggtcgcagtccgtcgcgcggtgcagattaactccctgtccggcttctgcctgactaaactggacgtcctcgacggcctgaaagaagtgaaaatctgcgttggctaccgtatgccggatggccgtgaagtgaccaccactccgctggctgccgataactgggaaggtatcgagcctatctacgaaaccatgccgggctggtccgaaaccaccttcggcgtgaaagagcgcagcggcctgccgcaggcagccctgaactacatccagcgtattgaagagctgaccggcgtgccggtggatatcatctctaccggtccagaccgtaccgagactatgattctgcgcgatccgttcgacgcgtaatcactctcaaggggcgccgttcgggcgcccttgtttttgctgttcgcccgccccatttcaaataaattagcggcctgagcgctggctggtttatcatcaataataatgatgtcgctcgacataccctgttttcttttccctgaggtttatgtgcagttaacgagtttcaccgattacggactacgcgcgctgatttatatggcgtcgctgccggaaggacgaatgaccagtatctcggaagtgaccgaggtctatggcgtctcccgtaatcatatggttaaaataatcaatcagttaagtcgcatgggctacgtgactgccgtgcgggggaagaacgggggcattcgcctcggcaaaccagcaggacagatccgcgtcggtgacgtggtgcgtgaccttgaacccttatcgctggtcaactgcagcagcgagttttgccacattacaccagcctgtcgtctgaaacaggcactagctgaagccgcgcagagttttctcaaggaactggataactatacgctggctgatttggttgagaagaatcaaccgctttacaaattattgctggtggagtgacgccactctgccggagatgacaacggaggaaccgatatgtcacaagatccattccaggaacgcgaagctgagaagtacgcgaaccctatcccgcgccgggaatttatcctcgaacatttaactaaacgggaaaagcctgccagccgcgatgagctggccatcgagttaaatatcgagggcgaagagcaaaccgaagcgctgcgccgccgcctgcgcgcgatggagcgcgacggtcagctgggcttcacccgccgccagtgctatgccctgccggaacgcctcgatctcctcaaaggaaccgttattggccaccgcgatggctatggtttcctgcgcgttgaagggcgcaaagacgatctgtacctgtcgtcagagcagatgaaaacctgtattcacggcgaccaggtgctggctcagccgctgggcgcggaccgtaagggccgccgcgaagcgcgcatcgtccgcgtcctcgtgccgaaaaccagccagatagttggccgttacttcaccgacgctggcgtcggctttgtcgtcccggacgacagccgcctgagcttcgatatcctgatcccgccggaagagataatgggcgcgcggatgggctacgtggtcgtggtcgagctgacccagcgaccaacccgccgcaccaaagcggtgggtaaaatcgtcgaagtgctgggcgacaacatgggcaccggcatggccgtcgatatggcgctgcgtacccatgaaattccttatgtctggccgccggcggtggaaaaacaggtttccggtctcaaagaacaggtgccggaagagtcgaaggtcggacgcgtcgatttacgctcgctgccgctggttaccattgacggcgaagatgcccgcgacttcgatgacgcggtgtactgcgagaagaaacgcggcggcggctggcgcctgtgggtcgccattgccgacgtcagctactacgtgcgcccggggacgccgctggatgcggaagcgcgcagtcgtggcacctcggtctacttcccgtcgcaggtagtgccgatgctgccggaagtgctgtctaacggtctatgctcgctgaacccgcaggtcgatcgcctgtgtatggtgtgcgagatgacgatttcgtcaaaaggccgtctgaccggttataaattctatgaagcggtgatgagttcacatgctcgcctgacctacaccaaagtgtggcatatgctgcagggtgaccaggaactgcgcgaacactacgcgccgctggtgaagcacattgaagagctgcataacctctacaaagtgctggagagcgcccgcgaagagcgcggtggtatctcatttgaaagtgaagaagctaaattcatcttcaatgccgaacgccgtattgagcgtatcgaacagactcagcgtaacgatgcgcataagctgattgaagagtgcatgatcctggcgaacatctccgccgcgcgcttcgttgagaaggcgcaggagccggcgctgttccgtatccatgataagccaaccaccgaagcgattacctccttccgtaccgtgctggctgagctgggactggagctgcctggcggcaacaagccggagccgcgtgattacgcagagctgctaacctccatcgccgatcgcccggatgcggaaatgctgcagacgatgctcctgcgctccatgaagcaggcggtctacgatccggaaaaccgcggtcactttggcctggcgctgcagtcatacgcccacttcacctcgccgattcgtcgttacccggacctgtcgctgcaccgcgctatcaagtatctgctggccaaagagcagggacataaaggcaacagcaccgagaccggcggctggcactacagcatggaagagatgctccagctgggtcagcactgttcgatgaccgagcgccgcgccgacgaagcgacgcgcgaagtgtctgactggctgaagtgcgacttcatgcaggatcaggtgggcaacatcttctccggcgtgatcgccagcgtgaccggctttggcttcttcgtccgcctgaacgatctgtttatcgacggtctggtacatgtttccagcctggataacgactattatcgtttcgatcaggtggggcagcgtctcattggtgagtccggcggccagacctatcgcctgggcgaccgcgtggaagtccgtgtggaagcggtcaacatggacgagcggaaaatcgactttaccctgatctccagcgagcgtgcgccgcgtaatgtcggcaagaccgcccgtgagaaagcgaaaaagagtacctctggcaagccgggcggccgtcgccgccaggtgggtaagcaggtaaacttcgagccggacagcgctttccgtaaagagaaagagaccgcccgaccgaagaaagagaaaaaagcgaaaaaaccgtcggcgaaaacacagaaaatcgccgccgcgacgaaagccaagcgcgcggcaaagaagaagatcgccgagtgattgacctcccttcaccctgaagtctgctgacgcaggatggggtgaagggggcagataacagaacctaaaacgagtacatcaatgagtgaaatgatttacggcatccatgcggtgcaggcactgctggagcgcgcacctgagcgttttcaggaagtttatattctgaaaggccgtgaggataagcgcttgctgccgctgatccatgccctggaagcgcagggcgtggtgattcagctggccaaccgtcagtttcttgatgagaagagcgaaggcgctgtgcaccaggggatcattgcccgcgtgaagccggggcgtcagtatcaggagaacgatctgccggatctgctggcgcagctcgatcaaccgttcctgctgatcctcgacggcgtaaccgatccgcacaacctcggcgcctgcctgcgtagcgccgacgccgccggcgtgcatgcggtgatcgtgccaaaagatcgttccgctcagttgaatgcgacggcgaagaaagtggcctgcggcgcggcggagaacgtcccgctgatccgcgtcaccaacctggcgcgcaccatgcgtctgctgcaggaagagaacgtctggatcgtcggaactgcaggggaagccgaccatacgctgttccagagcaaaatgaccggcccgatggcgctggtgatgggcgcggaaggcgaaggcatgcgtcgtctgacccgcgaacactgtgatgaattgatcagcatcccgatggcgggcagcgtctcctcgctgaacgtctcggtggctaccggcatctgtctgtttgaagcagtacgtcagcgcagctaaggtattttttcagaaaaagccatcttaaataagatggctttttttttacgtctattgctaaaatatacaacgaagttgatatagattgtatttattatttaatacttaatatatggaataatatatgggatggattcctcaagcgctcgcgagtgcgctccagcaggcggctgagttaaatgtaaaaattgattataacgatcattcatttatcattataatgaatgattacggcgatctacgacttaatgtgttattcacctcccgacaaataattatcgaaactattatctgtccgctgagcgctattcaacggcaggacttgtttaacgccttcattttacgccatcaaaaattactccctctctcctcggtcgcgatatcccgccttaagaatgatgaatattatgtcgcgtttggtgccctgtcgctcaattcctcgctggaagatgtggtgctggagatcgcgacgctggccgctaatgcattagatcttgctgagttgatagaacaatatacgaacaaataacaaggaatgctattgatgggaatattaaagagcctgtttacgctgggtaaatccatggtctcgcaggccggagagacaattgaggaagcgcagggcgtcaggatcctcgaacaacatattcgcgatgcaaaaagcgcactggataaagcaggccaatcgcgtgtcgacctgctcgcacgggtaaaactaagcaacgataaactgcaagatctgcgtgcgcgtaaagacacgctggaagcacgtgccctggaggcgctgaataaaaatgtcgctgcggatttgattaacgaagtcgctacagagattgcccgcctggaaaacgagattgctgtagaagagcgagtgctcgctaaccttgaattttcgcgcgatggcgttgagcaggccgttcatgcgacagctcaacgtatcgcccagtttgaacagcaactggaagtcgttaaggcgacggaagccatgcagcgggcgcagcaggcggtcacaacatccaccctcggggcgtcttctcgggtctccaccgcggcggaatcactccggcgtttgcaaactcgccaggcggaacgccaggccaggctggatgctgctgcgcaactagaaaaggtggcggatggaagcgaccttgttgagaagctcgcgcaagccggcattggtacaaccgacaaaagctcggctgaggatgtactggcacgtcttcgtcaacaacagagcaaatgattgcggccccacggtcagttctgtcctgatgggcgagtctttgaggagtggtcatggcccatttttttcagcgtctttttgctaaaaagagtacgccgactcccgtacgcggtccgctggggttacatcttaaagcgggttttacgctggataccctggcgtttcgtctgctggaggataaccttctgattgagctgccgggcgaggcatataccattgccgcgaccggtcaaattgatttggggggcggcagccggatttatcgttactacaccagcggcgatgagtttctgcaaattaatactactggtggggcggatgtcgatgatatcgatgatattaagctctttgtctatgtccaaagcgatggtatcagccaggaaaaatactggcgttcggcaatcagcccagcgagtattggtaccccgacatttagctggcgccagcagcgttggcagcgtttttttaacggcggcgagccagggaacattgcgccagtttatatgctggagaaagtcgaaaatcagcagcatgccgtatgggaggttcataattttacgatgggctatcagcggcaggtagcagaagaaatgtgggagtacctgctgctaaacggagaagagtcgtttaatgaccggggagaatctgaatggctcttctcgtacgcgttgggagtggatattccactcacctcactggatattattgggtaatttcacggaagaaaaatatgcacgttctgaactcattactggctttttgtacctatttttttatcggtgcagcgatggtgatcttgtttctttttatctattcaaaaatcaccccgcataatgaatggcagctgataaaaaataacaatacgtcggcctcgctggcgtttagcggaacgctgttgggatatgctattccattatccagcgcggcgataaacgccgtcagtattgctgattatttagcctggggtgtcattgccctggtagtacagctgattatctatggtggtgtacggctatatatgccggcgctaagcgaaaaaattattaatcacaatattgccgcaggcttatttatgggctctgctgcgctggccggcgggatttttaacgccgcctgcatgacatggtaatggacgatcatggctaaaaaacgtaaatccagatcccgtaatacggcgcaaaataaagcccaggccactcacgcttccctcgcgcgggttaatcgcccggcgagcgcggtgcaggcaaaacgaaaccgctacagcggcaaatacctgaccctggctattatgggcggcgcggcgttctttgcgcttaaggcctgtagcgatgatacgaatgcggataatggcggtgacggcgtgttttactcctccgtcaatgattgtatcgatgggggtaacagcgccagcgtctgcactcacggctggaacaatgcgaagtcggaattttttgcccatgtgcctaagcaaatgagccaggaaagctgcgaggcacagtatgtcgactgctattttgacagcatcgatcggagctggacgccgatgatgagcggttttttactcagccgggcggtgcgtaaaggtcgcgatgaagaatatacctattacaatggcggctcgtcctattcttccagggctgtctggcgaacatcgtcgggcgcgtatgcctggcgcagtggtaaaaacgatattgccaccagccatacgctgactgcgaaaaaaacggcgactgtttctcgcggcggctacggacgatcgtccagcgcgcgcggccattggggaggttgaacgatgctgcgacacactattcctgtacgcagggatctggatcggattgcggacgaacacggtttcgattttcatgtaattgacaacgagatttactgggacgagagtcgagcctaccgctttacattacgccagatagaagagcagattgaaaaaccgaccgccgaattgcatcaaatgtgcctggaggtcgttgatcgagcggtgaaggacgaacagctgttgcagcagctggcgatcccaccgctatactgggatgcgattgctgaaagctggcgccagggggatccttctctctatggccgtatggattttgtatggtgcggtgccgacgctccgcttaagttgctggaatataatgcggatacgccaacgtcactttacgaagctgcctggtttcaatggttttggctggaagacgccagacgcagcggggtgatcccgcgtgacgccgaccagtacaatgcgattcaggaacggctgattgcccgctttagtgaactttacagcccggaaccgctctacttttgctgctgtgaagggagtgatgaagatcgcacgacggtgctttatctccaggactgtgcgcaacaggccggtcaggaaactcgttttctctatgttgaagagctgggactcggcgtcggcggtatgctgaccgatttggatgacaacgttatccgtcgggcgtttaagctttatcccctggagtggatgatgcgagatgataatggcccgctgctgtgtaagcggcgagagcggtggatcgaaccgttatggaagagtgtactcagcaacaaagggttgatgccgctgctatggcggttctttccccgtcatcctaatctgctacccgcctggtttgccaatgaatcgccacagatcgcgccgggcgagagctatgtgcgtaaaccgatcttttcacgtgaaggcggcaacgtcaccatctttaatggtcagcagcagattatcgaacatgctgatggagactacgcagaagagcccatgatctttcaggccttccagcccttgccgcgctttggtgacagctacacgctgattggcagctggatcgtggatgatgaggcttgcgggttggggatccgggaagataataccttgatcactaaagatacttctcgttttattcctcactatataaccggctaaggctgcttttgtgatctctctccatcgccagtggccgggtcctggccatacttatggctatcgccattgatggagggagacacgatgcactggcaaacgcacaccgtttttaatcaacccaccccgctgaataacagcaatctgtttctgtccgataccgctctgcgtgaagcagtggtccgcgaaggcgccggctgggatggcgatctgctcgccagcattggccagcagctggggacagccgaatcgctggagctgggacgcctggccaacagcaatccgccggagctgctgcgctatgacgccaccggcgcccggctggacgacgtgcgcttccatcccgcctggcacctgctgatgcaggggctgtgcgcgaaccgggtacataatctcgcctggcaggaggatgcccgcgaaggcgcgtttgtcgcccgcgccgcccgctttctgctccatgcccaggtggaggccgggacgttgtgcccgattaccatgaccttcgccgcgacgcccctgctgcagcacgccctgcccgcgccctttcgcgactggctgtcgccgctgctgagcgaccgttacgatccgcaccttgcgcctggcggccagaagcgcggcctgctgatcggcatggggatgaccgagaagcaaggggggtctgatgtgctgagcaataccactcgcgcggagaaaacggcggaagggttttaccgactggtgggacacaagtggttcttctcagtgccgcagagcgatgctcacctggtgctggctcaggctccggcggggctctcatgcttctttgtgccgcgtctgctgcccgacgggcagcgtaacggcgtgcgtcttgaacgcttaaaagagaagctcggcaaccgctccaacgccagtagcgaagtggagttttatgaggcctgcggctggctggtgggcgacgaaggcgacggcgtgcggcagatcctcaggatgggcggcctgacccgctttgactgcgcgctgggcagccatgccctgatgcgtcgcgccttctcggtggcgctgtatcacgcgctacagcgtcaggcgtttggcaaaaacctggtcgaacagccgatgatgcgccagctgctggggcaaatggcgctccgtctggaggggcagaccgcgtttctgtttcgcctggcgcgggcctgggaccatcgggatgatgcccgggaaagcgcctgggcgcgcctgtttacgcctgcggccaagtttgccatctgtaaggccggtatcccgtttgtcgccgaggcgatggaagtgctgggcggcatcggctattgcgaggagagcgaactcccgcgcctctaccgtgagatgccggtcaacagcatctgggaaggctccggcaatattatgtgcctcgatgtgatgcgggtgctgagcaagcagccggcggcgatggagctgctggccgcggagtgtgcggaggtgaaaggacagaaccgccatctcgaccgcgcatggcgtcagctgcagcaactgcggaaacgacccgccgaagagcaggggagagagattgcccggctggtctatcgtcttggcgcgggggcgcagatgctgcgccatgcttcgccgccgctggccgaagcctggtgccggatgatgctcgacacccgcggcggcatacgtcttgacgcgccgaccctcgacgacctgctgctgcgggctatggggcgcgggcgccaggcgcctcaggcgtagagaatggcctgcacgcgccagctgtccggctgttgttcctcgtacctctgaataatgcgataccaggaggcgccttgctcgtctgctttgcgggcaatggcgtgctctacatcctgttggctaccggaaagattagtgacggagatcagaccgatttcattcaggccagtgacgcaatccgcgctggcgaattcggctgactgcgcggacgtattggccgtcgcagcggttaacagcaggctggatagggtaaaagatcgtttcatcgtcagctccatttcacgtagtcccaagggcagtccgttgctaacgtcctgccaggtggttggccgaacgttattatgcacaggagaacgtgaatggacgcaaagctgtgtaaagcagatttaaagacgccgcctcgttatcgacgatagaggatcgcctgcgaataccactggccgggtaccatggtgtcatcgatcatgatgatgacgtagtaatcggctttggccgcttctgctttggccttcagcgccgcttcgacatccatcggcgaaccgtacatcagtacgctcaccgtggccattttatgcaggccagccgtctggtagcgctggatctcctgcggatggtcggtggcgggcggcggggcttccggcgttccctgcagggcgctacacccgctgaggacgatagccagtaaccacggtgaaaacctgcgcataaccatatctcgtttcctgatagtgatagtgtagtggtagccttaacaggattgccggggaatgttcccgaactgttatctctgacgcgattttcgaatgaaaatgttgtgaaagcgtaaccgggttctcaacattatgaatcgtagcaaactgggttgcctggtgaatgaattttcccatgacgcctaaccacgatagagaaggaagacgataaatgattgcactagaaatgcgcaacctcggcggtggtgaaattttacatgcctgtccgcaggagagtctggataagcccttgccctgtatcgtcttttatcatggctttacctcgtcgaagctggtctacagctactttgcggtggcgctggccgaggccggattccgggtgatcatgccggacgcgccggagcatggggcgcgctatcagggcgatgaggccgggcggatgcagcgcttctggccgattctgcagcagaatttcagggagtttcctgcgctgcgcgaggcgataatcgctgaaggatggctggaaggggagcggctggcggtggcgggcgcttcgatggggggaatgacggcgttgggcatcatgacgcatcaccccgagctgaacagcgtcgcctgtctgatggggtcgggctattttcgttccctgtcgcaaaccctgttcccctcgcctgattttgatgtcgatagcctcaacgaatgggatgtcagccatcagctggcgtcccttgcccggcggccgctattgctctggcatggcgatgccgatgacgtggtgccgccggaagaaacctttcgactagaacaggcgctccggcaggcggatcttgccgccaggctgacctgtgtctggcagaaaggcgtccgccatcgcattacgccagaggcgctggctaccacggtcgccttttttcagcagcacctttaaacgcggattacgctgacgccctgatcctcaagctgtttgaggatcgcggcatcggcctgtttgccggtgatcaccacgtctatttgtccggcctggctgaatagcatcccggcgcgctcgccgatcttgctgctgtcgaccagcaccgccagtttgccgaccacgttaagcattttttgctcggccatggcggtcaacatatccgttttgtagaggccttcggcggtgagccctttgccgctggtaaacatccagtgtccggcatagaggctgttctcgctaccgtgggggctgagggtgatggcgtggctgcggttgtactggccgcccatgataatcacgctgtcatgctcctggtcgatcaggtagttagccagcggcagatagttggtgatgatctgcaccggtttgccgcacagttcccgacccaacagaaaggcggtggagccgcagttaatgacgatgctctcacccggcgcgatcagttgcgaagcggcgcgtgcaatacgcactttttcatccagattttgcgcctggtggatgttcatcggcgtccagcgggggcgctgttcgctaatggcttccgcgccattacgaacctttttcagtttgcggctttcatccagcttgttgatatcacgtcgggcggtagcgggtgagatcccgagccgcgacatcacctgctccacggtaacaaaccccgtttgggcgagcagatccagcagaatttggtgcctttgcgcttccgtcatgagcgaatccgattaaaagtgaacggcaaagatgatatttgaaatcatgtgaaaatactaaccctgcggcggggtatttccggcaggcagggcctgccggcggcgacttacaggaaggatttgaaaggcagatccggctcaatggtgaagcaatcgttgaaaccgcgcgggtagtgatattcgaaattgtctttatccagcggccaggtaaatttgccgccgacctgccagataaacggcttgaagccgtacttcagacgatcctttttcatctcccacagaacgcggatctcctgcggatcggcctgaaagtttgaccagatatcatggtggaacgggatcacaactttggcgttgagcgactctgccatgcgcaggatatcggcgctggtcattttgtcggtgatcccgcgcgggttctcgccatacgagccgagggcgacgtcaatccgatgctcgttgccatgcttcgcgtagtagttggagtagtgggaatcgccgctgtggtacaggttgccgcccggtgttttaaacaggtagttgaccgcgcgctggtccatgccgtccggcagtacgccagcggctttttggtccgccgggagggtgatcagcgcggtgcgatcgaacgcatcgagcgcatggatctcaatgtctttgatctgcacgacatcgccaggtttcatgacgatacagcgcgctttcggcacgccccaaccgatccacaggtcgacgcaggttttcgggccgataaacggcacatcggccgggcagttctgcatgacggcggcggcgacgttgacgtcaatatgatcgttgtgatcgtgggtcgcgaggaccgcgtcaatctggcgaatggcgaacggatccagcacgaacggcgtggtgcgcaggttaggctgtaattttttcacgcctgccatccgctgcatctggtggccagttttcatcagcggattgccgtggctctgtttgccagtgccgcaccagaaatcgacgcagacgttagccccgccttcggattttaaccagataccggtacagccgagccaccacatggcgaaggtgccgggcgcaacctgctcctgctcaatctcttcattcagccagctgccccattccggaaaggtgttcaggatccatgattcacgggtgatggtctgtactttactcatcgtgctcttcctcgtattttcaatagtaatcaaattttgattggttttgatttatgttgtcactggattttcaagattgcaatcttgttttccatcaattttacgaagatatgcgcatcacctctcaagggttccagcatccataaaggttgtgcttttctttatctatatgatttgaaaatgtttaattatatttctgcgctactgatcggcaatagtcacaatgaaatagaggattattgcggcgcgcgtcacatttaatcaaattcaatcttgttgtgattatttttgattattagagtgggcagcgagaaatgctgagcgtaaggcgcgttcagcgccttcaccatcgggagtgtgttatggcaatcctctacaacatctttaccgttttctttaatcaggtgatgaccaatgccccgctgctgctgggtatcgtcacctgtctgggctatatcctgctgcgcaaaagcgtcagcgtgattattaaaggcacgatcaaaaccattatcggcttcatgctgttacaggccggctccggcatcctcaccagcacttttaaaccggtggtggcgaaaatgtcagaggtgtacggcatcaacggcgcgatctctgacacctatgcctcgatgatggcgaccatcgaccggatgggcgaggcctatagctgggtgggctatgcggtgctgctggcgctggcgctcaacatctgttacgtcctgctgcgccggataaccggcatccgcaccatcatgctgactggccatatcatgtttcagcaggcggggctgatcgccgtctcgttctttatctttggttacggaatgtggacgaccatcatctgtaccgccgtgctggtctccctgtactggggtatcacctccaacatgatgttcaagccgactcagctggtcaccgacggctgcggcttctccatcggtcaccagcagcagtttgcctcgtggattgcctacaaagtggcgccgtatctggggaaaaaagaggagagtgtggaagacctcaggctgccaggctggctcaatatcttccacgacaacatcgtttccactgcgattgtcatgaccattttctttggcgcgatcctgctttcctttggtattgacgtcgtgcaggcgatggcggggaaaacccactggacggtctatatcctgcagaccggtttctccttcgcggtggccattttcatcattacccagggcgtgcggatgttcgtcgccgaactgtccgaagccttcaacggtatctcgcaacgcctgatccccggcgcggtgctggcgattgactgcgccgcgatctatagctttgcgccgaatgcggtggtgtggggctttatgtggggcaccatcggccagctgattgccgtcggcattctggtaggcattggctcttcaattctgattattccgggctttatcccgatgttcttctccaacgcgacgattggcgtctttgccaaccacttcggcggctggcgcgcggcgctcaaaatctgcctggtgatgggcatggttgaaattttcggttgcgtgtgggcggtgaagctcaccggtatgagcgcctggatgggaatggcggactggtcgattctggcgccgccgatgatgcagggcttcgcctccatcgggttggcgtttatggctgtcatcatcctgattgctctcgcttatatgttcttcgctggccgcgcgctgcgcgccgaagaagacgcggaaaaacaactggcagaggcctctgcccaataaggagttctgattatgaccgtacgtattctggctgtgtgtggtaacgggcaaggcagttctatgatcatgaaaatgaaagtggatcagttcctgacgcaatccaatatcgaccacacggtgaacagctgcgcggtgggtgaatacaaaagcgaactaaacggcgcggatatcatcatcgcttcaacccatatcgcgggggagattaccgtctccggcaataaacacgtggtgggggtgcgtaatatgctttcccccgcggatttcgggccaaagctgctggaggtgattaaagctcatttcccgcaggacgtgaaataaggagcggctatgaaactccatgaatcactggcgcagaatcactccattcgcctgcaggcggaagcggaaacctggcaggaggcggtgaaaatcggcgtcgatctgctggtggccgccgacgtggtggaaccgcgctactaccaggcaatcctcgacggcgtcgcgcagcacggcccctattttgtgatcgctccgggattagccatgccgcacgggcggccggaagagggcgtcaaaaaaaccggctttgcgctggtcacgctaaagaaaccgctgattttcaaccacgaagataacgacccggtcgacatcctgatcaccatggcggcggttgacgccaccacccaccaggaagtgggcatcatgcagatcgttaacctgtttgatgacgaagccaatttcgaccgtttacgcgcctgccgcagcgagcaggaagtgctggatttaatcaaaaacgccaccgcggcggctgtttaaaaggaacactatcatgtcattacctatgttacaggtcgccctggacaaccaaacgctggccagcgcttatgaaacaacccgtctgatcgccgaagaggtagatatcattgaagtcggcactatcctctgcgtcggtgaaggtgtacgcgcggtgcgcgatctgaaagcgctgtatccgcataaaatcgtgctggcggacgccaaaattgccgatgccggcaagatcctgtcgcggatgtgcttcgaagccaacgccgactgggtcacagtgatctgctgcgccgatatcaacaccgccaaaggggcgctggatgtcgccaaagagttcaacggcgatgtgcaaattgagctgaccggcttctggacctgggagcaggcgcaggcgtggcgcgaggcgggtattcagcaggtggtctatcaccgcagccgcgacgcgcaggcggcaggcgtggcgtggagtgaggcggatatcagcgcgattaagcgtctgtctgatatgggcttcaaagtgaccgtcaccggcgggctggcgctggaagacctgccgctgtttgccgggatccctgttcacgtctttattgccggacgcagcatccgcgatgctgcctcgccggtggaagcggcgcgccagtttaaacgctctatcgcccagctgtggggttaaggagcgactatgttggcgaaatccattccgctcggcatctatgaaaaagcgctccccgccggggagtgctggctggagcggctaaagcttgcaaaagcgctgggctttgatttcgttgagatgtctctcgatgaaacggacgcccgccttgcgcggctggactggagcccggagcagcgtctggcgctggtcaaggcggtggctgaaaccggcgtccgggtgccgtcgatgtgccttagcgcccatcgccgttttccgctgggtagtgaagacgacgcggtgcggcatcaggggctggagatcatgcgtaaagctattcagctggcgcaggatgtggggattcgggtgatccagctggcaggctacgacgtctattaccagcaggcgaacgatgagacgcgccgccgctttcgtgacggcctgaaacagagcgtcgagatggccagccgagcccaggtaaccctggcgatggagatcatggactacccgctgatgaactcgatcagtaaagcgctgggctatgcccattacctgaataatccgtggttccagctttacccggatatcggcaatctgtcggcgtgggataacgacgtccagatggagctgaaggcggggagcgggcatatcgtggcggtacacgtcaaagacacaaagcccggcgtctttaaaaacgtgccgttcggcgaaggggtggtcgattttgaacgctgcttcgaaacgctcaagcagaccggctactgcggaccgtacctgattgagatgtggagcgaaaccagcgctgacccgctggcggaggtggcgaaggcgcgtgactgggtgaaggcgcggatggcccgcgcgggcctgatggaggcggcataatgcaacagctgaaacagcaggtgttcgaggccaatatggatctgccgcgctacggcctggtgacctttacctggggtaacgttagcgccattgatcggcagcgtgggctggtggtgattaagcccagcggcatcgcctacgagtcaatgaccgtcgatgacatgtcggtggttgatctgcaggggcacgtggtggaagggcgctggcgtccctcctctgataccgccacccatctggcgctctatcgccgttatcccgaccttggcggggtggtgcatacccattcgacgcacgccaccgcctgggcgcaggcggggctggcgatcccggcgctcggcaccacccatgcggactacttcttcggcgatattccctgcacccgggcgcttagcgcacaggaggtggacgaggcctacgagctgaacaccgggcaggtgattatcgaaacgctgggtgaggccaatccgctgcataccccggggatcgtcgtctatcagcacgggccatttgcctggggcaaagacgcccacgaggcggtacacaacgcggtggtgatggaagaggtggcgcgcatggcgtggattgcccgcggcattaatccgcagttgcagcccatcgatagctggctgatgaataagcattttcagcgtaagcatgggccaaacgcctactatgggcaaaagtagatagcgcgctccggggctttcacccctcacggtgaagcaactggtctggccccggagccgtttttaatcctgacgataggccgacggcatcacgcgcatgccgatgagcgtgaccacgcaaattatcgccccggcgtaaaacgtcgaggcggcgccgaaggtttcccacagtacccccgcgccggtgctggccagcagcagagccaggccactcatcagattaaacataccgaacgccgtgccgcgtagctccggtggcgccgtatgggcgaccatcgccgccagcaggccctgggtcattcccatatgaatcccccacagcgcgacgccgatcagcagcgtgctccagtggccgctgagcgccagcacgatatcggcgaggatcagcaccagcagcccccactgcagcagtttgctgtggctcatgctgtctgagagtttaccgaacgggtaagccgtgaggctgtagaccaggttcatcgccaccatcaccagcgggatggtaaagagcgggatctccatctgctgggcgcgcagcaccagaaaggcttcgctgaagcgggcgagggtgaaaatgctgccgatcgcgaccacccaccagtaggcggcggagagctttttcaggttttcgcgcttcagcggattgctgcgtttgtgcgcgatggcggattttggctcctgtaggccgaatccgagcaggagaatggagagcacggcgggaatgaccgccacccagaaaatagcgtgaaaatcgttggcccagataaacatcagcagcaccgccagcagcgggccgagaaaggcgccgacggtatccagcgcctggcgtagtccgtaggcggcgccgcggatctccggcggggtgacgtcggcgaccagcgcatcgcgcggcgcgccgcgaatacctttgcctacgcggtcaatcatgcgggcgctaaacaccaccccggcggtaggggcgatggcaaacagcggtttactgagcgcgcccaggccgtagcccagcagcgccagtcctttacgcttgccgacatagtcgctgattgcgccggagaagaccttcaggatcagggcggtggcttccgccagtccctcgataagaccgataattatcacgctggcgccgagggtagtggccataaacagcggtaagaggctatggatcatctcggaggagacatccatcagcaggctgacgccgccgagtacccaaacgcctttggggatacggcctaaggtggcgaaacgcggaaccatcaatcactcctgattatcaaatggcgagtggctgattaaatcaggttgcgatgacgctggtaagtcggtttgtaaaataattctcaattgcgtttgggcgcagacctcgcttcgcccctcgcgaggagaggcgaagaatcgggcaggcgttagcggtatatcaccgcgctggcgcgaagcgggccgttggtttcgggttcgtgcatcaggataggctgaaagtatttcgccccctgcgcatcgctcatctggctaagggcctgttcggcctcgtgctcagtggccatattgtgattgatatagataacgccgaggctctgcacgtcgtccatgttgcgggcctgacgttcggtgatttggatagctgccagcgcgttggcgctgaagaaaagcgcagccatcatggcgatgattttcagtttcatatactacgctcctgactgacagtcctgacgctgactcggggctctcctgtgatcgttgggctttgatagaagtgtaatcgctgcgcgttcatcgcatggcgaccttttctgatgcagttgttcaaaaaaatgccgcttcctttattggttaattttaaatcacccacttagcccagcttggcgcttagtgcgaattatttgtgcaaatgcgcttgtgttcctgaggggccgccattagaatgacgcgtcaatttttcagccgccctttaacacgttccttgcctccatgggccgcggctgacccagacaggaggctgaataatccgtaaggagcaattcgatgcgtcattacgaaatcgtttttatggtccatcctgaccagagcgaacaggttccgggcatgatcgaacgttacactggtgcaattactgcagcagcaggtacgatccaccgtctggaagactggggccgccgtcagctggcttatccgatcaacaaactgcacaaagctcactacgttctgatgaacgttgaagcgccgcaggaagcgatcgatgagctggaaactaacttccgcttcaacgacgccgttatccgcagcatggtaatgcgtactaagcacgctgttaccgaagcatctccgatggttaaagcgaaagacgagcgccgtgagcgtcgcgaagatttcgccaacgaaaccgcagatgattctgaagctggggattctgaagagtaatcctgatgaccaaccgtctggagctgtccggcattatttgcaggactccacttcgtaaggtcagcccgtcaggaattcctcactgccagttcgtgcttgagcatcgttcagtgcaggaggaagccggttttcaccggcaggcatggtgtcagatgcccgttattattagcggtcacgaaaaccaggccattactcacagtataacggtcggtagcgcagtaaccgttcgagggttcatctcttgccataaggcaaagaacggcttgagcaaaatggttctgcatgccgagcagattgaattgatagattctggagactagccatatggcacgttatttccgtcgtcgcaagttctgccgtttcaccgcggaaggcgttcaagagatcgactataaagatatcgctacgctgaaaaactacatcaccgaaagcggtaagattgtcccgagccgtatcaccggtacccgtgcaaaataccagcgtcagctggctcgcgctatcaaacgcgctcgctacctgtccctgctgccgtacactgatcgtcatcagtaatcggtcacggtccattaatacgactttgagaggataaggtaatgcaagttattctgcttgataaagtagcaaacctgggtagcctgggtgatcaggttaacgttaaagcgggctacgctcgtaacttcctggtcccgcagggtaaagctgttcctgctaccaagaaaaacgttgaattcttcgaagcacgtcgtgctgaactggaagccaaactggctgacgttctggcagcagctgaagctcgtgctgagcagatcaacgctctggaatccgtaaccatcgcgtctaaagctggcgacgaaggtaaactgttcggttccatcggtactcgcgacatcgctgacgctgttactgcagcaggcgttaaagttgctaagagcgaagttcgcctgccgaacggcgttctgcgtaacgttggcgagcacgaagtgaacttccaggttcacagcgaagtattcgctaaagttatcatcaacgtggttgctgagtaatcggcctctgacgttctggtaacaacaaaccgccggccttgtgccggcgttttgctttttagcgcctttcattttgcggcggcgtaacgcttgctgtcgtcttctctgctatcgcgcacgcacaaagctgccgttcgactggcgggtaaacagcacctgctggccgttgccggtatcgatagtgagcccggtgaccacgccgttggcgttctgccgaatctgcaccgtctgtccgctctgcaaagtacttagcggcttgccagcgccttcaacctgcgccatggcgtagacgtcagtggccggcagcccatgatcgcggaacagctgcgccagggttttgcctgactcgatgcgataggtccgccattgctgctcaatacccggcgcggactgctgtgatgaggattgataaggctgggtggcggcgggctgctgcgtctgcgcctgatccggctgctcatcctgaatcggctccggagcgaccggcgccatctgatcggcgtcgctcacggtaggcgtattagtgatcggcggcagcggaacggcctgattgccgccagcttgcggctgggactgcgactgtagattcaggttcgcttcacggctggtggacgccgggctttggctatcatcggagggaagcagaataccgataataaccaacaggaagccagcgataattccccggcggtgcatcggaggcagcgggtccaggaggcgaaaatgatccggggcgtgccagattttcgccagggtagatgtcagttcaaagcgcccgggcatggctttcctcctgctccgcatatttatatcctgctcatgagtatagatggctaacgtcctgatgaccggaacaaagtgaagttaacctgctgccgcctattgtttctttttcgctgagatttgtcatcatccgccgacaaagttttacccatttcgctatggctgttatgctttcgcacgcttttatcttgatggttatcacccaaaaaggaacgacgatggcaaccccaacttttgacactatcgaagcgcaggcaagttacggtatcggcttgcaggttggacaacagctgagcgaatccggcctgcaggggctgctgccggaagcgctggtggcgggtatcgccgatgcgctggaaggtaaccagccgcaggtgccggtggaagccgttcaccgcgcgctgcgtgaaatccacgagcgtgctgacgctgtgcgtcgcgagcgttttcaggccatggccgctgacggccaaaaataccttgatgaaaaccgcgagaaagagggtgtgaacagcaccgagtctggtctgcagttccgcgtactgacccagggcgaaggcccgatcccggcgcgtactgaccgcgttcgcgtgcactacactggcaaactgatcgacggcaccgtcttcgacagctccgttgctcgcggtgaaccggctgaattcccggtgaccggcgtgatcggcggctggattgaagcgctgactctgatgccggtaggttccaaatgggaactgacgatcccgcacaacctcgcctacggtgagcgcggcgctggcgcatcgattcctccgttcagcaccctgatcttcgaagttgaactgctggacattatctaaacagcagcggcttcctcttccccgcggcaggggaagccataaaaatagcgtaaaatccttaagttaaaaattaattggaattatgttttgcattcatcacgtatgggtgtatttttgtgagctatttcgcgttagatgagtgatataacactcactttaaacataaaattaacattatatctaaatcatagtattcatccctccgattcttacctaatatcgactagcccttgctggggttaatgacagacgacgggccatcagagcctgaacaacacagacaggtacaacaggaagaaatcacatggtagatcaggttaaagtcgctgctgtcgagcaggagccgactgaacaatcgctacggcgaaatctcacaaaccgacatattcagctgatcgcgattggcggagcgatcggcaccgggttatttatgggttctggcaaaaccatcagccttgccggaccatccattatctttgtttatatgattatcggttttatgctgtttttcgtgatgcgtgccatgggcgaattactgctgtcgaacctcgaatataaatcctttagcgacttcgcggccgatctgctggggccgtgggcgggctactttaccggctggacctactggttctgctgggtagtgaccgggatggcggacgttgtcgccatcaccgcctacgcgcagttctggtttcccggactctccgactgggtcgcctcgctggcggtgatcctgctgctgctgggcctgaacctggccaccgtcaagatgtttggcgaaatggagttctggttcgcgatgatcaaaattgtcgccatcgtggcgctgatcgtggtcggcctggtaatggtgatgatgcatttcaaatcgccgaccggggtcgaagcctctttcgcccacctgtggaatgacggcggctggttcccgaaagggctgagcggcttcttcgccggcttccagattgcggtgtttgccttcgtggggattgagctggtgggtaccaccgccgccgaaaccaaagacccggaaaagtccctgccgcgggcgattaactccatcccgctgcgtatcattatgttctacgtcttcgcgctgattgtgattatgtcggtgacgccgtggagctccgtggtgccgagcaagagcccgttcgttgagctgttcgtgctggttggtctgccggcggcggcgagcctgatcaacttcgtggtgctgacctccgcggcctcctcggccaacagcggcgtgttctctaccagccgtatgctgttcggtctggcgcaggatggtcaggcgccgaagatgttcgccaagctgtcgaagcgtgcggtgccggcgaagggcttaaccttctcctgcatgtgtctgctgggcggggtggtgatgctgatggtcaacccgagcgtgattgccgccttcaccatgatcaccacggtgtcggcgattctgtttatgttcgtctggaccatcatcctttgctcttacctggcgtatcgcaaaaaccgccctcagctgcatgagaagtcgagctacaagatgccgctaggtaaagtcatgtgctgggtgtgcatggccttcttcgtctttgtgctggtgctgttgaccctggaagacgatacccgtgaagcgctgatggtcaccccgctgtggtttgtgctgctgggcgcgggctggctgtttgccggcaaaaaacggctggcgaaataaacgaaaattttaacgttgcttgcaacggcccgtcataaaaaaggccacccagagtggccaaataagacggacaatgtcgagggcgcccgcgggcgcctttttctttactttccgccgagggcgcgcgggaacagcacattattttccaggctgatgtgttccatcagatcgtcgatcatctcgttgataccgttatacatcgccttccaggtggtacaggcttccggcggcggcgtcacgttgtgagtgatgtgcttaatgacttccagcagttcacccgcttcatcatgctcgctttccatcacgctgatcggccccccggcctgggcgcccattccctgtttaatcatcgggaacaggatctgttcctctttcatcatgtggctggaaagctcctgatgcagcatggtcaggtacttagtcagtcctttcggcacgttcggtttatcggcatggacgcgttcaaccttggtggcctgcaggatcagctccggcagctgttcacggtgccggtcgtgatagcgaacgatgatatggtcgataatctccgcgaggggcgccgcgcgccagtcgcgggagagaggctgttcggccagtttcgccagctcggcttcaatcaccgcgacatccagcgctttgcgcgacgcggcgcgcgccagggtctgtttgccgccgcagcagtaatccatatcgtattgacggaacagggcggaggcgcgcgggatggtcagcgccagctcgcctaaaggttggtcacggaaagccatagcagttacctcgtcatcaggaatataagatgtattttaaatgcatctttttggcgagggaataccccttaaggaggcgaggctactttttttcgtccgccagcggctgcagcatcggtttttccggtctggcgcgtacggcagagaccacgccgagcaccagcagcaggatcccgctcagggtcagcagcggcggtaagctttgccgcagcaggaaggtatacagcagtccggccagggtttcgaagacgataagcgggccgaggatcaccgtcggcagccgctggctggcaatattccagcatagcgcgccgacccatgagcagagcaccgcgatggccagcatcagcgtaataaacaccgccggacgcgggccgaagggcaggggaaacccggcctgctgaccgtgcagccaggcgcaggcggcgagatagccggccagcgaaaccggaagcgtcaccagcgcctgagcggtagcccacatcattggcggttgatgcgggttctcccgcagccagcgggcgttgcgcagagcataccaggcccagcagaccaccgatcccagcgccagcgcaatgccggagccgtagcgccacgggctaaaattcggcagcccctgacgcagctccgcgacgttaacgcagatcaggcccacggcgatgcagatcagcgccggaaacaggcgccgccacggcagcttcccgtcgcgctggctgtagagcagattggcgaacaccggcagtaccaccggcagcgtgccgataatcatggtggaaaccggcgccccggtgcgctgaatggcgctggccaggcagacgtaatagataaggttccccatcattgtcaggcccagcgcggtccaccagtcgtgccggctcaactggcgcagtcgcgcgcgcccgagccacgccagcggcagggcgatcaggcccagcgccagatagcgtcccatcgactgcagcatcgccggatactctggcaccagcaaaggcccgacgaaaattaaaccccacatcagccccgccagcagggcgtataacacaccactaatcatcattgcatccgttgtcattaccgttgtctgcagtgtagaagggggtcgggcaggaatattgtatgagattgcgcattagcgcctggcgacctgcttctgatagcgcaccggcgtaatgccgtaacgctgggtgaaggcgcgggtcaggtgggactggtcggtgaggccgacggctatcgccacttcggcggcgggcatgccgtgggtgaggaacgctttggcgcgccacagacggatggccatcagcatctgatggggcgttacgtgatagtgggctttaaactggcgctgaaagtggtacgggctcagcgccgccacctgcgccagctcgtcgagggtgatgggacgcatatagttatcgtgcaggtagtcgcgcacgcggtcaaagcgatgcccggcctcaccctgcgcagaggcatggtgggccagagggcggaaggcgtcgatgaggtcgagcagcagtccctgctgggccagcggatcgtcgctatgccacaggccataaatcagctggccaatctgtcgggaacgcaggggatcctcgcggaccacctcgctgaaccaccagtcgcgcaccccggtgatggcttccagacggtccggctccagataaatcatccggtagcgccagccgtcggcggtttccgcttcgccggtgtgcagctcgtcgggattcatggtgacaatggagtttgcggcggcaatatgctgactgccgcggtagcgaaagcgctccgcgccttgctcaatcacgccgatgccgaaggcttcgtgggtatggggttcaaaggcgtagcgggatatatgggcgtggtaaagctccaccccgggcagctgttcgagatggcgaaagcgcgcgcggtctttttcatcactaaattggagtggtacgccctgcatgcctgcctcccgacggttatcccttcaatatgagagaggaaccgccgggacgcaaccgcaaaagctgagaggggcggttacagaatgcctttcacgctttcagcaagggaggtggtcgggcggccgatcagcgtactcagggtgcggctgtcgtcaaacagtccgcctttcgacgcgccgacatcggaatccgccagcatatcggcaagcccggccggcaggccgacgcttttcagcgcggcggcgaaatcggcttcgctgaggttctggtagaccacgtttttcccgctttgcttgctcagctcggcagccaggtcgctcagcgtccaggcgttatcacccgccagttcgtaaattttgccttcatgaccctcactggcgataacgcgggcggcagcggcggcataatccgcgcgggtggcggaggcgattttaccctcgccggcggcgccgataaacacgccatgctccagcgccggcggcgcgctggccagatagttttcggtataccagccgttacgcagcagggcgtaagcgataccagagtcggccagcatctgctcggtttcgatatgctctgcggccagacccagcggcgaagtgtcggcatgcagcaggctggtataggcgatgaatttcaccccggcggctttggcggcgttaatgacgttgcggtgctgtacagcacgctggccgacttcgctggaggagattaacagcagtttatccacgccctgcagcgcggcggtcagcgccgcttcgtcgctgtagtcggcctggcggacaaccacgccctgctggctgagcgcctgggctttggccgggttgcggacaatcaccacaatctggctggcagggacggtgttaagcaggtcttgcagaacgtagtggccaagctggccggtggcaccggtaagagcgatcatgggtcttctccttcgtgtttattggcagttgtggtaagctaccaccttaactaacttttagtaagtacgtacaaaaaggtaagtgtgaaatggccgaaccgacgctgagcgagaaactgcgcaccggcaatttgtttgcggaacagtgcccgtcgcgcgatgtgcttaaacatgtcaccagccgctggggcgtgttgattctggtggcgctgcgcgagggaacccaccgtttcagcgatctgcgccgtaagatgggcggggtcagcgaaaagatgctggcgcagtcgctgcaggcgctggagcaggatggttttatcgaccgcgtctcttatccggtggtgcccccgcacgttgaatatagcctgacgccgctcggcctgcaggtgagcgagaaggtggccgccctggcggactggatcgaggttaatctgccctcggtgctggctaaccacggggagtgaaaatgtatcactccctgtagccccggtaagcgcagcgccaccggggaacaggcattacttgctcaaatccagctgataaatggcgaagccgatatcatcggtggccacctggcgcattggatactgcgctttctctttgataaacgccgcggctttgtcgccaggcgaggtctcaaaacgaatatccaacggcgtgttgctgtggatcggcgccagacgccagttgttatccgccgccggatggatcgcgccttccttcttcgattgcgcgccaatccacgccgccagcaccgaacggttttcatccggtgaggcgaaggcgatatggctctcaccggtgccggcgaatttgccgccgtaagcgcgatagttattggtcgcgaccaggaaagtagcctgcggatcaaccggttttccattgaaggtcaggtgcttaatacgctctgcctgcggatggatcatctgacattcgccgtcgtagcgggccggctgagtgacgtcgatctggtagttcaccccgtcaatgacgtcgaagttgtaggtgcggaagccgtcccagttgatcagcgactgcggcttgctgctggcgggatcgatctggttaaactgtccggcagagcattccagccactccttaacctctttcccgctgaccttcatcaccaccagggtgttggggtagagatagaggtcggcggcattgcggaaggtgagctggcctttctccacttcgacaaagctcgccggatcgtttttacgcccgccgactttaaacggcgcggcggcggagagcaccggcagcttcgccagatccgggtcgccctgaatatagtgttcgacgtaggctttctgcgccatgttgaccacctgcaccgtcgggtcgtcctgcaccagcgccagatagctgtacatgttgtcggcggacttgccgatcggcttgctgacgaattcgcgagtggcgtcatgatcggctttcagcaccgccaccagcttgccatcttcggccgccagtgatttcttcgccaccgcgtcatagattggccgcgcttccgctttactctgagttacctgccatttaccgctgtcgttatttagcaccagatcgaccaccccgagatgatcgccccacattcccggcatcaccgccggtacgccgttcagcgtccctttggcgatatccgcgcctttgatgttggcgaagtctttacccgggaacaccgcgtgggcatggccgaacataatggcgtccacgccgggcacctggcttaagtagtaaaccgaattctcggccatcgcctgatacgggtcggcggagaggccggagtgagcgaccactaccaccacatcagcccctttcgcccgcatctccgggatatatttgcgcgcggtttcggtaatgtcattgaccgtcaccttgccgttaagattggctttatcccaggtcatgatctgcggcggcacaaagccgatatagccgatgcgcagggtgtgggattgaccgtcgctgtccacgacccgggtatcctggagcaggtacggcgtaaacatcggttttccggttttggcatcgatgatattggcgttcacgtaggggaacttcgccccggccagcgccttgtgcaggaagtcgagaccgtaattgaactcatggttgcccaggttgccgacggcgtaattcagggtgttcatcgccttatacaccggatgtacatcgccctctttgagcccttttgccgccatatagtcgcctaacgggctcccctggatcacatccccgttatccaccagcacgctgtttttaacttctgcccgcgcctgttcgatcagggtggcggtacgcaccaggccgaatttctccgtggcggcatctttgtaatagtcgaagtccatcatattgctgtgcagatcggtggtttccatgatccgcaggtcgaccgtcgcggcgttgacgctggcggcgatcagcgtggccaggagcgttgcgctaaacttaatcatcagaggcgtccttttttatgagcgatagcacagaagaaaatgtatttatattctgttgcttacagaaatgtgaatcttgccagaaaagcgggcagagaaaccgccatcgttatcacagatagcggaactcgcggtgatgcgatataaataaaacaacgagttaacgccactgtaaccagacgaggtggagaatgttagaacaagtatgtcagcttgcacggaatgcgggcgatgccatcatggaagtctacgatggaaaccagccgatcaacgtcgccagcaagaaagatgattctccggtcacggcggcggatatcgcagcgcataaagtcattgtcagcggcctgcaggcgctggatccggataccccgatcctctccgaggaggacccgccggcgtgggaagtgcgccagcactggcagcgctactggctggtcgacccgctggacggcaccaaagagtttattaagcgtaacggcgaattcaccgtcaatatcgcgctgattgaaaacggcaagccgacgctgggggtggtctatgcgccggtgatgaaggtgatgtacagcgcgcaaaatggcaaagcctggaaagaagagtgcggcgtacgcaagcagatccaggtccgcgatgcccgtccgccgctggtggtgattagccgctcccatagcaacgatccggagctgcaggagtaccttgagcaacttggcgaacaccagaccacctcaatcggttcgtcgccgaaattctgcctggtggcggaaggtcaggcccagctctatccgcgcttcgggccgaccagcacctgggacaccgccgccggccatgcggtcgcggtggccgccggggcgcatgttcacgactggcaggggaaaaccctcgactacacgccgcgtgaatccttcctcaaccccggcttccgggtctctatttattaagcaatttatgcagcaggtcgatcacctgctgcacctcttgttgggtgagggcgccgtctttagcccactgcacacgcccgttcttatccagcaccacgatcgccgagctcttctcgtccagctgccaggccttccgcaccaggccgttgctgtcgacgataaattgcgaccatgggaagagctttttattactttcaatgctgttgcgtacaaacatcccggtgcccgggatggcgtcgtcagtgtttacaatggtggtggtctgatagcgatcgtgcgggaagcccgccgctttaatcgcctcgatcaggttggcattcttctcttttgctgacgagcgtccggcgatgtgctggaccacgcgcacttttcccgccagctgggcgctattccagtttttatagctaaacttttccttatccagaataagctctccccgatccgcgacgccaacgggcgccacgcgctggccgtcgacgaagttatgcgctgtggccagcagcgggagaagcagtaacgaggcggccagtatgctacgtagggtcatgcgcaatccttaatcatttttatgcaggtgatccgaccacttggtctcgtttaatcataagtgcgattggcggtgattacccgcaatgaggatgccagtttgcgtgttgacgcacaaattagtcgtaaaacggcgacttatacttacttcatcgtatgtctgaaacgaaaattctgaattattgtcatcaaagggtaaataaacttatacatactgggtccctctgagattctggactatagttttagggcattaaaatttgcgctcccaagacgtgggctaactgtggcaccacaagagcgtaaccctggcaggagagaagaatgaaaattttccaacgctacaatccgctgcaagtggcgaagtacgtgaagatcctgtttcgtggacggttgtacatcaaggacgttggcgcatttgaatttgataagggcaaaatccttatcccgaaggtcaaggacaagctgcatctgtcagtgatgtccgaagtcaatcgtcaggtgttgcgtctgcaaactgagatggcatagcctggcacgtagcagtacgtagtaggtaaaagacggctcccgatgggagccgttgatgtttttagcccttcatttccgcatagcgtttgcgatattcgcccggtgggatgccgttatgtttacgaaacaagcgggtgaaatagaccggatcgctgtagcccaccgataaagcaattttgttaagtgggagtgtgggataaccatttgggccataaaaaagggcggatggtcatccgcccttaggagagagaaaagattacgctcaggcgttctggctttccgccgtttccgcctgcttcggcaccagcaccgttggcttgttatcgatgcgggtcaccagcagctggtcgatacggtagttatcgatatccacgacctcaaacttatagccggagaacttcaccgcgtcggtgcgtttggggattttacgcagcataaacatcataaagccgccgatggtctcgtaattcccggactgcgggaactcgtcgatatccagcacgcgcatcacgtcatcaatcggcgtaccgccatcgatcagccacgagttttcatcgcgggcgacaatctgctcttccagcccctggccgacgaggtcgcccatcagggtggtcatcacgtcgttgagagtgatgatcccgaccaccagcgcgtattcattcatgatcaccgcgaagtcttccccggcggttttgaagctttccagcgcttccgacagggtcagggtgtccggcacgatcaacgtgttgcggatctgtacgccgccggtcagcaccaggctctggttcgccagcacgcggttcagcagatcttttgaatcgacgtaaccgataatgtggtcgatatcttcattacagacgaggaacttcgagtgcggatgttcggccactttattcttcaggctctgctcgtcttcgtgcaaatcaaaccaaatgacgctttcacgcggggtcatggaggaaggaacggtgcgggactccagctcgaacacgttctcaattagctcatgctcctgcttgcgcagcaccccggccagcgcgccggcctcgaccacggcatagatatcatcggaagtgatatcgtctttccgcaccatcggcagtttgaagatgcggaagatcatgttggccatgccgttaaacaaccacaccagcgggcggaagactaacaggcagaagcgcatcgggttgatgatgcgcagggccactgtttcgggcgcaatcataccgatgcgtttcggagtcaggtcagcaaacaggatgaacaagctggtgaccagggtaaaagagatgatgaagctcagctgctcggagagctccggcgacaaatacccgctgagcaggctatgaaacgccggtgagaaagccgcgtcgcccacaataccgccaagaatggcgacggcgttgaggccaatctgcacgacggtaaagaaggtgcccgggttctcctgcatcttcagcacccgctgtgcgttgacgttgccttcatcggccagcagtttcagtttgattttacgtgaggcagccagtgaaatttccgatatcgaaaaaaacgcactgacggctatcagacagagtattactaaaatactgtttaacatatcttttctgaccgttgaggccagatcctcggaagggaagttgataactcaaatgtggaatacataaaaaaccggtccgaaggcgctggaccggctgtcacactggctagtatagcgtaagggaatgtaaagccgccagagcgttcattgaccgcctcgctgttgaggcggaaatcagaattacgcctgaggcggcaggcagacgccaatgccgccgatgccgcaatagccgtgcgggtttttatacagatactgctggtgatcgtcctcggcatagtagaacggtttggcggtggcgatctcggtggtgatgtgacgggtatcgtgcgcgtcgttcatcgccgcctggaagcgcgcgaggctggcctttgccgcctccgtctgttccggggtcagcgggtaaatcgccgagcggtactgggtgccgtggtcgttaccctgccgcataccctgcgccgggtcgtgattttcccagaacacctgcaataactgctcatagctaatcacctgcggatcataaaccacgcgtaccgcttccgcgtgaccggtctggccgctgcatacttcgcgataggtcggattgggcgtatagccgccagtgtaacctgcggcggtgctgtaaacccccggcaattgccagaacaggcgctcaactccccagaagcagcccatggcgaacagcgccacttccatccccgccgggacgttggtcatcgagtggccgttaactgcgtggagcgtcgccactggcatgggggtattgcgtccaggcagcgcatccgcctgggcgacaagatgcgttttatcaaatagactcacggttggcctctcaatacagaaatcgtcgttaaggttgtaacgaagcgtgtcttttaacacaataaatacgcgtaatacgtctagattaatacataagaattatttgggttattgccactttttcaaccctatgttgttagggttttgttaagccgtggagcggcgccagtgtttcctgtagaggaaacagggatattcaggagaaaatgtgctaaaaatccgccagttatgtgtcaccagccttttgctggtcagcggggtcgccagcgcagcgaatgtgcgtttgcaggttgagggattatccggggagctggagaaaaacgttcgcgcccagctttccaccatccagagcgatgaagtcacgccggatcgtcgctttcgcgcgcgcgtcgatgacgccattcgcgaaggtctgaaagcgctgggttattacgagccgacgattgaatttgatttgcgtccgccgccgaaaaggggacgtcaggtgctgatcgccaaagtgaccccgggagaaccggtgcgcattggcggaaccgaggtgattctgcgcggcggcgcccgcaccgatagcgactacctggcgctgctgaaaacgcgcccggccatcgggacggtgctcaaccacggcgattacgacggcttcaagagctcgctgacccgcgtcgccctgcgcaaaggctactttgacagcgagtttcttaagagccagctcggggtctccctcgaccgtcatcaggcgttctgggatatcgattacgacagcggcgaacgctatcgctttggccacgtcactttctctggctcgcaaatccgcgatgaatatctgcaaaacctcgtgccgtttaaagagggcgactactacacctcgcaggacctggccgagctaaaccgccgcctggcggcgaccggctggttcagttcggtggtggtggcgcctgattttgctaagtcgcggaaaaccaaggtgctgcctctgcagggcgttgtctcgcctcgcaaagagaacaccgtggaaaccggggtcggctattccacagacgtcggtccgcgggtgaaagccacgtggaaaaaaccatgggtcaactcgtatggtcacagcctgacctccagcgtcagcctctccgccccggagcagcagttcgactttacctataaagtcccactgctgaagagcccactcgaacagtattatctgatgcagggcggttttaagcgtaccgacctcaatgatacccaggccgactctaccaccctgggtgtctcgcgtttctgggagatgtcgagcggctggcagcgagcgattaacctgcgctggagcctggatcactttacccaggcgaacgtcaccaacaccaccatgctgatttatcctggggtctcggtgaaccgcactcgctcccgcggcggcctgatgcctacctggggcgattcccagcgctactcggtggactattccaacaccatgtggggctcggacatcaacttcatcgtgatgcaggcccaggacgtctggatccgtaccctctatgaccgccaccgctttgtggtgcgcggcaaccttggctggatcgaagcggacaactttgacaaggtgccgccggatctgcgctttttcgccgggggcgaccgcagtattcgcggctataaatacaaatctatctcgccgaaggacgatgacggcaagctgatcggggcctcgaagctggccaccggctcgctggagtatcagtacaacgtcagtggcaaatggtggggcgccgtctttatcgatagcggcgaagcggtcagcgatattcgcgagagcgatttcaaaaccggcgccggggtgggcgtgcgctggcagtcgccggtggggccgatcaagctggatatcgcccggccgatcggcgacaaagaagagcatggtttacagttttacatcggtctggggcctgaattatgagtttatggaagaagataagcctcggcgtcttaatcgtgttggtgctcctgctgggaaccgtcgggttcctggtggggaccaccaccggcttgcatctggtgttcaaggcggcggatcgctgggtaccggggctggaaatcggcaaagtgaccggtggctggcgtgatttaaccctcgataatgttcgctacgaacagcccggcgtggcggtgaccgccggtcagtttcacctcagcgtcaggttgcgctgcctgtgggacagcagcctgtgcgtaaacgacatcgcgctgcgcgatatttatgtcgccgtcgataccaagaagatgccgccctcagcgccggtcgaggaagaggacagcgggccgctgaatctctccactccttatccgatcaccctcagccgcgtcgcgctgcataacgtcaacgtcaaaatcgatgataccgcggtctccgtacgcgacttttccaccggcctgaactggcaggagaaaaatctgaccctgacgccgacctcgctgcaggggctgctgatcgccctgcctaaggtggcgaaagtggcgcaggagcaggtggttgagccgaaaattgacaacccgcagccgcaggaaaaaccgctcggcgagacgatgaccgacctcttctcgcagccggtgctgccggcaatgaccgatgtccatctgccgctgaacctcaatattcaggcgttccgcggcgagcagctgcgcctgaccggcgataccgatatcaccgtgtataacctgctgctgaaagtcagcagtatcgacggccagatgaagctcgacgcccttgatatcgactccgatcagggcaaggtcagcgcctcgggcagcgcgcagctgcaggataactggccggtggacattaccctcgccggaaccctgaacgtcgacccgatgaaaggggagaaggtgcagctgaaggtgggcggcgaagtgcgcaaaacgctcaaagttggagtggacttaagcgggccggtcgcggccacgctgcgcgcggatgcgcagctggcggaggccgggctgccgcgcaatatggagctgaagagtaagcagctcgcctggccgttcagcggcgagaagcagttccaggccgacgatgtccagctgaagttcagcggcaaaatgaccgactatgcgctggccttctccaccgcggtgaaaggtcaatcgctgccgccggcgaaaatcgccctcaacgccaaaggcaatgaacggcagatcaatctcgacaagctgacggtcaacgccctggaagggaaaaccgagctgaaggcgctgctcgactggcagcaggcgatcagctggcgcggcgagctgaccctcgacggcatcaacaccgccaaagaggtgccggactggccgtcgaagcttaacggccggatcaagacccagggcagcctgtacggcggcagctggcagatgtcggtgccggagctgaaaattaccggcaacgtgaagcagaacaaagtggatgtggcgggctcgctgcagggtaacagctatctgcagtggaaaatcccgggactgcatctggcgttaggcccgaacagcgctgatatcaaaggcgagctgggggtgaaggatcttaatctcgacgccaccatcgatgcgccgcacctggataatgcgctgccggggctcggcgggacggcgaagggcttggtaaaagtgcgcggcactgtcgatgcgccgcagctgctggccgacatcaccgcccgggcgctgcgctggcaggagctgaccatcgcccaggtcaacgtcaaaggggatgtgaaatccaccgatcagattggcggtaacctggacgtgcgggtggatcgcatcagccagccgggggtcaatatcagcctggtgcagctcaatgccaaaggtacagagaaacagcatgagctgcggctacgcgtgcagggcgatccggtttccggtcagctggcgctggcaggcagcttcgatcgtcaggccgaacgctggaagggctcgctgagcgatacccgcttccagacgccggtggggccggtagcgctgacgcgcagcattgcgctggactatcgcaatctggagcagaaaatcagcatcgggccacactgctggaccaacccgaacgccgagctctgcgtgcctgaaaccattgacgcgggcgccagcggacgggcgcgggtgaatctcaaccgcttcgatctggcgatgctcaagccgtttatgccggaggcgacccaggccagcggcgtgtttaccggtaatgccgatgtgagctgggacaccaccaaagagggactgccgcagggcaaagtgaccctcagcgggcgcaacgtcaaggtgacccaggtcgtcaacgacgcgccgttgccggtggcgttcgatacgctgaacctcagcgccgacctgcacaacaatcgcgccgagctgggctggcttatccgcctgaccaacaatggtcaactggatgggcaagtgcaggttaccgacccgcaggggcggcgtaatctcggcggcaacgtcaatatcagcaacttctcgctggcgatgatcaacccgattttcgctcgtggtgaaaaggcagagggaaggctcaacgcccgtctgcgtctgggcggcaatgtgaaaagtccgcagctgttcggccagatgcagctgagcggggtggatatcgacggcaactttatgccgtttgatatgcagccgagccagctggcgatgaacttcaacggcacgcgctcgaccctgcaggggacggtgaacacccgccaggggcaaatcgccctcagcggtaacgccgactggacgcagatcgataactggcgggcgcaaattgcggcgaaaggcagccgggtgcggatcacggtgccgccgatggtgcgtctcgatgtatcgccggatgtggtgtttaccgccacgccaagcctgttcaatctcgacggcaaagtggatgtgccctgggcgcggatcgtggtcaacgaggtgccggagagcgcggtcggcgtctcctctgatgaagtgatgctggataaaaacctcaagccgattaagcagcagagcgccagcatcccgatcaacagcaacctgaccattcacgtcggcaacaacgttcgtctggaagccttcggcctgaaagcgcgtctgaccggtgatttgaaagtggcgcaggacaagcaggggctgggcctcaacgggcagattaatattcctgacggccgtttccacgcctatggtcaggacttgattgtccgcaaaggggagctgctgttctccggtccgccggatcagccgttgctgaatatcgaagcgattcgtaacccggatgccaccgaagacgatgtgatcgccggcgttcgcgtcaccggctccgccgatcagccgaaagcggagatcttctctgatccggttatgtcccagcaggaagcgctgtcttatctgctgcgcggtcagggtttgagtagtggtcagagcgatagcgccgcgatgacctcaatgcttattggtatgggggttgcacaaagtggtcaggttgtgggtaaaatcggcgagacgtttggcgtaagcaacttggcgttggacaccgaaggggtaggcgattcttcccaggtggtggtcagcggctatgtactgccgggtctacaggtaaaatacggggtcggtatcttcgattccctggcgacgctgactttacgttatcgcctgatgcctaagctatatgtggaagcggtgtctggcatcgaccaggcgctcgatttgctctatcagtttgagttttagcaatgcgaatatttgtttacggcagtttacgacgcaaacaaggcaacagccactggatgaccaacgcccagtggctgggcgctcatagtgtcgacgattatcagctgtacagcctgggccactatccaggcgcggtgcccggcgaaggcacagtacatggtgaagtttatcgtattgatgcatcgacgctggccgaactggatgcgctgcgcaccaaggggggcgagtatgcgcgccacctgattcagacgccttacggcagcgcatggatgtatgtctatcaacgttccgttgagggttgtacgttgatagcgaacggcaactggttggatcgcgaccagtattaaccacgacagcgccaccttcgggtggcgttgttttttattacttcagttcccatggcgtcattctggcgccctgacgtctggcataacgtaatatggcctgatgtaccttcactctaccggccacccgacgtgacaggggatgggcaatcatacggacaaactccatcactattaacagcaggttaatcgggagcagggtgcctgtcagcctggtaagcatttcacgataaaatggccaactgcccagattaatcatggtgtcgtgcagtttgatggtgagcgtaaaaaacatcactatgagtacgaggccgtacgcgattttataaattgatgccatctgctgattgccgggatgaaaggggctattttttaaataaacactgccatcactgacattgtataacgcctgaagatcatcgtatccatgccggcgtgcggcgataacccagtccccatcggcaagaaatggcgggcgacaacgattattcagggcattgctcagccaggtcaagcgcgctgaaaaaaacgagtgacgagtcgccagctgaaaacaggcgccttctttgataaaataaggccttaccctcgtagcgatccatatttgataataactattcagaatcacgccttcttcaagcgcaaattcttttggcagcgctatctcgttgttggccgatggtggatgcctttcagaagtagcgggtagaatttccagacgctgacagaatgaaatatcgccttgcttcgttcgctgcattttcgcattgagaacacgtaacctgagtgagaaattgcaagagaaaaaagagaagatgccgaagggattcaccaacattgtgataaaacataataataaaaaaatatccaaccatggagcacaagcgagaatgatcaagcaaacaaaaaagaccaagccgacaggtcgaagaagctttttaatactcagcggctgccgggaaggttcgagcaaaatgtggccatcgcttaaccagtggatccagtaactgccatcctttaggcggcaagtgccgatatgtagcggctggccgagcctcagacggtcaaaaagcgaggggtctttaaaatggcgtttatcggtataaaaggcatgctcgcctgcaatgaggcgtaaatagctttgctcttcagaggcggcagtggtgaagccggtaaaattcacggtgaaataatgggtctgtttcacaaggttccttccttgatgaaatgatggtgttttacgtatcacgcgttgccgacccactccttaccagagcgggagatgatccttcgccagccacatcgcggaagccagcgtcgtcagcgcgaggaataataatcgtcgtgttggggtgctgaacattacatgatctcctcgagcgcggtatggcgggccgctccctgcaggtagtgccgcatcgccgagcgcatcttcatccagtcagccacccggtgtgacaataaccaggccgtcgggccaatcagctccagtaccgccaggatcccgccgaaactgagtaataatagggacagcatgtccagtgaatcctgaattaaccacccaaatcccctggctggtttgtatgggttatttagcgacatgccgagtatgaggaggtacatcaccagcaccatgccataaaacaggttatagactagcgacatttgccggtcaccgggataacagggatgatttttcagaaaagcgcacccgtcgctgacgttgtataacgccttgacgtcgttatctttccgttggtagacgacgactatccgatcgccgatagcgagaaagggcggttgacggcggtaaaaaaagggatgcaggccgaagttggcgaagccgttctgccagaagaaggccagcggcgccgtgtcgcattgtatcccaacgccatggtattcccgcgttgggttccccgcgaaccatttcttaaaaatgatattgctaatttttcccgtccggacggcatagcgttccggcagggcttgcgtaaaaggcttcgccgactggcggagggtttgcgccgtagtcggtagcggctggcaaaaggaaaagtcgcggcggcgggcctgcgccatcttcgccaacagatcgcgcatggcggggtgcatttttagcgcccggtggaacagtagctcgcagaggccggttaacaacgcgatgaaggccagtatcgcgataatgccgaagccgaaccttccccattctgaggtgatcatcatgagcgggataagagcgacgatgagcgtcagcaggctgatactcagcagcggccgggcccagcgctttacccgttgactgggctcaaggagcgtttcgccatcgctgagccagtggatccagtaactgccgttgtccaggcggcggacgccaaggtgcagaggctgattgatcgtcaggtggtcaaaaagcgaggggtcgttaaaatagcgtttatcggtataaaagacatggtcgccggcgataagacgcagatacccctgtttttcacaggcggcggtcgtgaagccagaaaagttaagggtgaaatagcgaacgcttttcacgggacaccctccatggtgttatcgcggctatccgtgccgcaatcaggcaggggatgaccctgcctgagacagaattacttctgcttagcgcgctcgaaagaggcaacgatttcggctttcgccgcttccgcgttgtcccaaccgtcgactttaacccacttgcctttttccagatctttgtagtgctcaaagaaatgagtgatctgggctttcagcagttccggcaggtcgttcacatcgttgatgtgatcgtattctttgctcagcttggtgtgcggtacggcaaccagtttcgcatcttcaccagattcgtcggtcatcttcagaacgccaaccggacggcagcggatcacggagcccggctgcagcgggtacggagtcgggaccagcacgtcaaccgggtcgccgtccagggacagggtgtggttgatgtagccgtagttgcacggatagaacattgccgtggacatgaaacggtcaacgaacagtgcaccgctctctttgtcgacttcgtatttgataggatctgcgttcgccgggatttcgatcacgacgtagatgtcttccggcagatctttgcccgcaggtacgttgagtaagctcatgtctgtttcctttaaaatgtatggcaaacaagtgctcggtattatagccaactcacatcgaaagtcttcgcttctttttcccgatatcgccgcagagtgctccgaatttttcgcgtaataatgacatgaaaatccataaacatagccacatcatgaataaatttatgtaaccgttttcattgcatttgattgatttatcatactgcttaaaaaaacgtcataaaccgcaacagccgcgctccctgcgaagccttatcggctctccgctgggcagtagggccatcattaacatctcatttacttttttgaagtgtgatgtaacgcattcagttacatcaccgattgtctatagtttgtccgcaggtgagactttaaccaacaataaccctacgaggatacccttatgtggaagcgcttacttcttgtcacagcagtttccgcagctatgtcgtctatggcgatagctgccccgctaaccgtaggtttttcgcaggtcggttctgaatccggctggcgtgcggcggaaaccagcgtcgcgaaagaggaggccgccaagcgcggtatcaccctgaagatcgctgatggtcagcaaaaacaggaaaaccagatcaaagcagtacgttcctttattgctcaaggggtcgacgcgatcttcattgcgccggtggtggctaccggctgggaaccggtgctgaaagaggcgaaagaggccaagatcccggttttcctcctcgaccgttccattgatgttaaagataaagatctctacatgaccaccgtgaccgccaacaacgtgctggaaggccagctgattggcgactggctggtgaaaaccgtcgacggtaagccgtgtaacgtcgttgaactgcagggcaccgttggggccagcgtggccatcgatcgtaagaaaggcttcgccgacgcgattgccaaagcgtcgaatatcaaaattatccgctcccagtccggcgacttcacccgcagtaaagggaaagaggtcatggagagctttatcaaagctgagaataacggcaaaaacatctgcatggtgttcgctcataacgacgatatggccatcggcgccatccaggccattaaagaagctggcctgaagccgggcaaagatattctgaccggctccatcgacggcgtgccggatatctataaagcgatgatcgctggtgaagccaacgccagcgtcgagctgacgccaaatatggccggcccggcgttcgatgcgctggagaaatacaaaaaagacggcaccctgccggagaagctgaccatcaccaaatcgacgctgtatctgccggatacggcgaaagaagagttagagaagaagaaaaatatgggctactgagtggggagcccctcattccatccctctccccggtgggagagggtaaaaagcagcgttccagaaaccccgggaagcccagcgcgacccggggtaacctgacatcatttgaaggtgacatcgattatgagcgccgaggcacaccaggagatccttcgcaccgaaggacttagtaaattcttccccggcgttaaggcgctggataacgtcaactttagcctgcggcgcggcgaaatcatggccctgttgggcgaaaacggcgccggaaaatcgacgctgatcaaagcgctgaccggcgtttaccatgccgatcgcggcactatctggctggaaggccaggctatttcgcccaaaaataccgcccatgcccagcagctggggatcggcaccgtctaccaggaagtgaacctgctgcccaatatgtcggtggcggataacctgttcatcggccgtgagccgcggcggtttggtctgctgcgacgtaaagagatggaggccagggcgacggcgctgatggcctcctacgggttttccctcgacgtgcgcgagccgctgaaccgcttttcggtggcgatgcagcagatcgtcgctatctgtcgggccatcgacctgtcggccaaagtgctgatcctcgacgagcccaccgccagcctcgatacccaggaggtggagatgctgttcaccctgatgcgccagctcagggataacggcgtcagcctgatcttcgtcacccattttctcgaccaggtctatgcggtcagcgaccgcatcaccgtgctgcgtaacggcacatttgtgggctgccgtgagacccgcgagctgccgcagattgagctggtgaaaatgatgctgggtcgcgaactggaccataatgccctgcagcgggcgggccgtaccctgctgagcgataaaccggtagcggcgtttgaaggctacggtaaaaaaggaaccatcgccccgttcgacctgcaggtccgcccgggagaaattgtaggcctcgccggcctgctgggttccggacgcacggaaaccgccgaggtgatcttcggcattaaaacggcggacagcgggaaggcgtggatcaaaggcaaacctcagaccctgcgctccccgcatcaggcttcctgcctcgggatcggcttctgtcctgaagatcgcaaaaccgacggcattatcgccgccgcttcggtgcgggaaaatatcgttctggccctgcaggcgcagcgcggctggctgcggccgatcccccggcgtgaacagaacgagatcgccgagcgctttattcgccagctggggatccgtaccccgagcgccgagcagccgatcgagtttctctccggcggcaaccagcagaaggtgctgctctcccgctggctgctgaccaaaccgcagttcctgatcctcgatgagccgacccgcggcatcgacgtcggcgcccatgcggaaattattcgcctgattgaaaccctctgcgccgatggcctggcgctgctggttatctcttctgaactggaggaactggtgggttacgccgatcgggtcattatcctgcgcgatcgccgacaagtggcggagatcccgctcgccgagctctctgttccggcgatcatgaacgctattgcggcataaggagtaacccatgatgcctcgatctctttcgcaaaccggcccggagaagcgacacttcacctggccgaagggcaccccgcagattattgccctgctgctggttctgctggtagacagcctggtggcgccccatttttatcaggtggtgctccaggatggccgcctgtttggcagcccgatcgatattctcaaccgcgccgcgccggtggcgctgctggcgattggcatgacgctggtgatcgccaccggcggcatcgacctgtcggtaggggcggtgatggcgattgccggcgcgacggccgcctcgatgaccgtcgccgggcacagcctgccggtggtgctgttggccgcgctggccgcgggcgcgctggccggattgtggaacggcatcctcgtggcggtccttaagatccagccctttgtggcgacgctgatcctgatggtggccgggcgcggggtggcgcagttgatcaccgccgggcagatcgtcacctttgattccccggccctggcgtggctcggcagcggatcgtttctgctgtttccgacgccggtgatcgtcgccgccgctacgctgctgctgttctggctgtttacccgtaaaacggcgctgggcatgtttattgaggcggtagggatcaacatccgcgcggcgaaaaacgccggcgtcaatacccgcatcgtggtgatgctggcctatgtcctgagcggcgtctgcgcggcgatcgccgggatcatcgtggcggcggacattcgcggcgcggatgccaataacgccgggctatggcttgagctggacgccattctggcggtggtcatcggcggcgcctcgctgatgggcgggcgctttaacctgctgctctcggtggtgggggcgctgattatccagggaatgaacaccgggattttgctctccggcttcccgccggagctcaaccaggtggtgaaagcggtggtggtgctgtgcgtactgattgtccagtcgccgcgctttatcggtttactgaaaggggtacgcggccatgataaaacgtaatttaccattgatgatcacccttgcggtgtttgtgctgggctacctctactgcctgacccagttccccggttttgcctcaacgcgggtgatctgcaatatcctgacggataacgccttcctcgggatcatcgccgtgggcatgaccttcgtgatcctctccggcgggatcgatctgtcggtggggtcggtgatcgcctttaccggcgtcttcctcgccaaagcgattggcttttggggaatctcgccgctggtggcctttccgctggtgctggtgatgggctgcgccttcggcgcgtttatggggctgctgattgacgccctgaagatcccggcctttatcatcaccctcgccggcatgttcttcctgcgcggcgtgagctatctggtgtcagaggagtcgattccgattaaccatccggtgtacgacaccctgtccgggctggcatggaccattcccggcggcggtcgtctcagcgccatgggactgctgatgctgctggtggtggtggccggtatttttgtcgcccatcgcacccgctttggcaaccaggtgtatgccatcggcggcaacgccacgtcggcgaatctgatggggatttcgactcgcagcgccacgatccgtatctatatgctctccaccggactggcgacgctggccgggatcgtcttttccatttatacccaggcgggctatgcgctggcgggcgtcggcgtcgagctggatgcgattgcctcggtggtgatcggcggtacgctgctaagcggtggcgtcggtaccgtgctgggaacgctgttcggggtggcgatccaggggctgattcagacctacatcaacttcgatggcaccctcagctcatggtggacgaaaatcgccatcggcattttgctgtttatctttatcgcgctgcagcgtgggctgaccgtgctgtgggaaaatcggcagaatgcggcggtgacgcgggtgagcggggcggggagtcgctaagaaatgctcctcccgcaggcgcgggaggagcgggcagggcgcttaggcgtccgggaacgctttaataaagttctcgacgtcttctaccatgtggttgttgccgacgaagaaggagcgacgctgatgcaggctttccgggataatatccagaatacgctctttaccgtcgctggccttaccgcccgcctgttcggcgaggaaggccatcgggttgcattcatacagcaggcgcagcttgccttccgggtggctggcggtgctcggatagagatagatgccgcctttcagcaggttgcggtggaagtccgccaccagcgagccgatatagcgtgaggtataaggacgctgagtcgctttgtcctcttcctgacagtacttaatgtacttcttcacgccctgcgggaatttgatgtagttgccttcgttgatggagtaggtattgcccttctccgggaagcgcatacgctcctggcatagacagaagacgccaagggacgggtcgtaggtgaaggcgtgaacaccgcagccggtggtatacaccagcatcgtcgacgatccgtagaccacatagcccgcggccacctgcttgttgcccggctgcaggaagtcttcttctgtcaccggcgtgccgacaggcgtcacgcggcggtagatagagaagatcgtaccgacagagacgttaacgtcgatgttagaggagccatccagagggtccatcagcaccacgtatttggcgtgttcacacccttcgaagacgacaatctcatcttcttcttcagaggcaatcccggcaacaatatcgcgtgctcgcagtgcggcttttaatttttcattagcgaacagatcgagtttttgctgaacctcgccctgaacgttttcagcaccgctggcacccaggatatcgaccagaccggccttgttgatatcgcggtggatgatcttggcgcccaactttattgctgacaacaaagcagtcagctcaccggtggcgtgggagaactcgtgctgcttttcaacaataaactcacctaacgttttcataactcgttccctgcatttttatgttgagtaaaacgaacgcaacaatcttaacaaagaatcaaaaaagtgcgcacaggtgaatcgcgccagcaaaatacagattcgcctgaaatgcatttcgccagggcccgggatatgggtaaaatgtgccccggataagaaaaggaaatgacgaatgcgcattcatattttaggaatctgtggcacgtttatgggggggctggccatgctggcgcgctccctcggtcatgaggtaacggggtcggatgctaacgtctatccgccgatgagcaccctgctggaaaaccaggggattgatttaattcagggctatgaccccagccagctggagccccggccggacctggtgatcatcggtaacgccatgactcgcggcaacccgtgcgttgaagcggtgctggaaaataatattccctatatgtccggcccgcagtggctgcacgacttcgtgctgcgcgatcgctgggtgctggccgtcgccgggacccacggcaaaaccaccactgccggcatggcgacctggatccttgaagcctgcggctataaaccggggttcgtgattggcggcgttccgggcaatttcgacgtctccgcgcgcctgggcgatagcccgttcttcgtcattgaagccgacgaatatgactgcgccttcttcgacaagcgctccaagtttgttcactactgcccgcggacgctgatcctcaacaaccttgagttcgaccacgcggacatctttgatgacctgaaggcgattcagaaacaattccaccatctggtgcgcatcgtgccgggcaaaggcaaaattatcctgccggagaacgacatcaacctgaagcaggtgatggcgatgggctgctggagcgagcaggagctggtgggcgagcagggccactggcaggcgaaaaaactgaacgccgacgcctcgcagtgggaagtcttactcgacggtgaaaaggtcggcgaagtgaagtgggcgctggtcggcgagcataatatgcataacggcctgatggcgattgccgcggcgcgtcacgtcggcgtgctgccggcggatgccgcgaacgcgctgggcagctttatcaacgcccgccgtcgcctggagctgcggggcgaagccaacggcgtcaccgtgtatgacgatttcgcccatcatccgacggcaatcctcgccacgctgcaggcgctgcgcggtaaagtaggcggtaccgcgcgcattctcgccgtgctggagccgcgctctaacaccatgaaaatgggcgtctgcaaggacgatctggcgccgtctctcggccgcgccgatgaggtgttcctcctgcagccgcagcatattccgtggcaggtggcggaagtggcggaagcctgcgtccagccggcccactggagcgccgacgtcgataccctagcggagatggtggtcaaaaccgcccacccgggcgaccatatcctggtgatgagcaacggcggcttcggcggcattcatcagaagctgctggataagctggcgcaaaaagcggccgcggctgaataagcgcgtacgcctccggtcactgccctccgcgtgagggcagttttgttttagctaccaggaattgtgtgatgctgacctgcgaaagcgtacgttctactgactcgccccatttcgccatgctggacgcgctttacgcgcgcgcctttccgtggcacgagcagcgcgaaagcgaggccaaacgtcaggcgctgagccacccgcgctacgcgctggaagcatggttcgatgaaggcgtctttgtcggcctcagcggctgctggcagtttgccggctacggttatatcgaacatctggcgatcgacgacacgctgcgctcccgcggctatggtaaacagctgctggcgcagatcctgacgcgcgccccgctgaccattctggaaatcgatccgctaaccacggccatcgcccataaacggctgcgcttttatcagtcgatggggttccatgctaatccctgggcgcatcatcacccgagctatcatcagggcattgcggatcatgagctgctggtgctgagctacccgcagccgatcgatgagcggcagtatcagcagtttgcccgggatctcgggcacgaggtgatggggcgggagtagcccggctcggcgtaccgctccgggcattcgactggcggcgctgttactctttggcgatcggcgtctcgttctccgcgactttgttatcgccctgaatcttagcgattttctgctcaacggcggctacctgggcgctgtcgtgcagcagggtgtaggttagatcaaactgcgcgctggcgcccggctgcagctgcttcacgcgtttttgctcgcgttcaatggtcaccggataggcgtagctggtccccggctcgataccggtgacatagccctgcttgacggtatcggtgtttttccacagcgtcaggaccggcagctgacgggtatcaaactgaatagaggcccctttatcgcccgctttgttgaccacggcggccagggtctggtgattttcatcggccagcggctgaatattaaataccatctcgtcaaaatctttggtcggtccctgataggtctgccaggtttttaacccgctcttcgcgtaatcattgaacgggctgatgctggacatcggggcgaggaaacgcgcgccttcttcgaggatcggggtgccgaagttgctgtggtagatgatctgataatcatgcggatagtcggcatggttggttaagacgtcatgtaagctgaagctgttgctgcccggcacgtagcgcagttcggtcagggtctgcagatcggcttttttaaaggtgctctctttcaccagcccgcggatgcggatttcatacggcgcgctgtcggccacctccacctccaccagagaggccggcgtgttgcccgccttgccgtgtagggtataaatttgcccgtccgcggtcaccggatggccggtccattcatagccgcagcggaccatcatctcgttgaatccttccagccggccgaggccattgcggctttcgaggttgataaacgccgggttgacgacctctttaaccggcgaatcccagcccatccggctgccgaaaccctcaatacgcagcaagttcatgccgcgtgtcgggctcagggtgatggtcaggccgtctttactgtgaatggtgaggattttgctgccttcctgcttaccgccgtgcaggactttttgctcaatgctgaacgcatggtctttcaccttcagctgatcgctgttgatctgccagtttcctttatccatcccctcttcagcgttcgtcagcacccatgtttttgccgcggccgagccggaaaccagcagggcgatcgtcgtcagaaccaatgtctttttcatttttattccctttttgctgaatcgattgtgtcattgacgtgtgaaatctaccggcatgggggtgattaaaatgtgaagcgcctcacctggtgagaaagtggccgtttttatgatgttaaatgagatgaaagtcgtattattttgctaagtaatacgtatttatcaccaggatatgtgatctatattgtttttagctttaacgattcagcttggcggtaaggcaataaacaaacgtatcgtcgtgtggatgaggggactcaggcgatgcgacgggaatccccctgctggcgcaagccttagagctggggtgaaggtaggccggataaggcgtagccgccatccggcacaacgacgggaacggggtctggtacagcttgcccggcggcgctgcgcttgcgcgggcctacggtgttgagtaactgtttgatatacagggctccgtaggccggataaggcgtagccgccatccggcacaatgacgggaacggggtccggtacagcttgcccggcggcgctgcgcttgcgcgggcctacggtgttgcgtaaccgtttgatatagggaaccgtagcccggataaggcgcagcgcgccgccatccgggagactattgcgggcaaaaacagggggacttagccttcgttttccgccagttcacgcagatactggaagatcaggcgcgccgatttcggcggcttgttgccttctttctctttcttcgcattgcggatcagcgaacgcagctgctgacggtcagcatctggccacaggttcagcacttcagcgacggcgtcatccccgtcgtcaatcagtcgatcgcggatctgctccagcttgtggaacagcgcaacctgctggttgtgacggtttttcagcttgtccagcgcctgacgaatcggatcgacatcgcggttgcgcagcatcttgccgataagctgtagctggcggcggcgaccctcttttttgattcgctgggcgagttcgatggcgtcgcgcaggtcggtatccagcggaattttatccagcgcgtttttccccaggtcaacgagttccgcgccaagacgcttcagttcttccgcgtcgcgcttaatttcactcttactgacccagatgatttcatcatcttcatcttcaacgtcatcaccgggcacgtcgtcgagccagtcttcgggctgctttgtcatctcaggctccttaaaaaaagaggctaatgttaccagttaaggcgcgcactgaaaaacggttctctgttagacttcagttaactccttcttacattatggcattagcaatgaaagtcatctctcaagttgcacagcagcgtaagacgctggaagaagccgttaccacggcactggaactggcggcaggtaaatctgacggtgcggaagtttccgtcagcaaaaccacgggcatcggcgtcagcacccgctatggcgaagtggagaatgtagaattcaacagcgatggggcattaggcatcacggtttaccatcagaaccgcaagggcagtgcctcctccaccgatcttagcccggacgctatcgcccgcaccgtgcaggcggcgctggatatcgctcgctatacctccccggacccgtttgccggcgtagccgataaagatctgctggcctttgacgccccggatctggacctgttccacccggcggaggtctccccggacgacgccatcgaactggccgcccgcgcggagcaagcggccctgaaagccgataaacgcatcaccaacaccgaaggcggcagctttaacagccactacggcatcaaagtgttcggcaacagccatggcatgctgcaaagttactgctcgactcgccactccctctccagctgcgtcattgcggaagatgacggcgatatggagcgcgactacgcctacaccattggccgggcgatcgaggatctgcagtccccggaatgggtcggggaagagtgcgcccgccgcaccctgtcacgcctggcgccgcgtaagctgtcgaccatgaaggcgccggttattttcgccaacgaagtggcgaccgggttgtttggccacctggtcggagcgattgccggcggcgcggtctaccgtaaatcgaccttcctgctcgattcgctgggcaaacaaattttgccggagtggctgaccattgaagagcatccgcacctgctgaaagggctggcctccacgccgttcgacagcgaaggcgtgcgcaccgaacgtcgcgatatcgtcaaagacggcgtgctgacccagtggctgctgaccaattactcagcgcgcaagctggggatgaaaagcaccggccacgccgggggcatccacaactggcgcattaacggccgcggcctgagttttgcaaagatgcttaaagagatgggcaccggtcttgtggttaccgaactgatggggcagggtgtcagtggcgtcaccggcgactactcacgcggcgcatccggcttctgggtagaaaacggcgaaattcaatatcctgtcagtgagatcaccattgcaggaaatctgaaagaaatgtggcgtaatatcgtgaccattggcgatgatattgaaacgcgcagcaacattcagtgcggttctgtgctgctgccggagatgaaaatcgccgggcaataacacctgtttgcttaaataataaaaaggaagtgagcaatgcgtaaaaaactgttagcgatgctggctgtctctgcttttgcgctcggttcagcgtcggccttcgccgacctgggcgaagacatggacactctggcagaaaacctgcaagtggtacagaagacctccgacgccggcgagctgaaagcggcgctgaataagatgcgtaccgccgcggtcgatgctcagaaagagaccccgccgaagctggaaggcaaagcggccgacagcgctgagatgaaagattaccgtcacggtctggatattctgatcggccagatcgacggtgcgctgaagctggcgaacgaaggcaaggtgaaagaggcgcaggccgccgcggaggagtttaaaaccacccgcaatacctatcataagaagtaccgctaaccgttcttttcgggaggcatcagccgatgcctcccacctgaaagcctaccgatatcacatttttcccttttctttttccggtctttctgcggtcgttttccgctaaacctcgatcattgttgtgatgcgcatcacgtcatatcgcctgtttttacatttatccggcgaatatgtggagtcgatcacctaagccttctccctttccacttcgaagtggaaaacaactcgctacaaactcctgacccccggcgctactttggattccagagacatcagcggggtaacacaagtgaataacggagcggtaataaacgacgtaggggagcaggcggcgcagaccgaacgcctggctgacaagatgttacagcaggtattcgccctgttaagccgtcacgacatcgtccctaacgacgttcaggagcaaatgctgacttcccacgtgcgggccatggcccaccggtcaatcagcggcgaaccgctaccggaagtggatgccagtctgttcgaagaaatttctgaagattcaatgatgctggcccgcgaagtggtcgcacagttcggcaacctgcctgatgaagaggcctggctgctctccgtccacttcgaagtcgcgaaagataacctgtaaggagcaaaacatggaacaaatcaccgtagtcattggcgaccgtctgggtaaaggccaaaaagtcgccgcaggcgctgaaaaagcgggcgcacgtgctgtggtcgtccctggcgttgcggccgacatgaagcttggcgacataatgaaagcggaaaacgccaccttcggcatctccttctgcggcagcggcggcgccggcgccatcaccgcccagaccaaatacggctacaaagcaaaatatggcatgcgctctattgatgagggcgtcaccgctatcaacgaaggctgcaacgtgctgggcttcggctttatggataaagaagagctgggcgagcggctggtcgaagcctggaaaaagaaatacggcgcataagtatgaaagagcaattcaccaccacggtgagggttgccggcaaaggcgaaagcaaatcacgggccttcgccgatgccctgaaccatgtgcaggctgcggtgatgaaatcatcctcgcgcatcctactgcgtattgagccacaggacgtgacggttgttcatgcgcgcgaagcggtacgaaaagaggcgtttctgttcttctttttgcgccgtgaacgacggacctacagcgtggagctggacgtcaccgtcaacgtgaccgccatcgatctcgataaagtggatttcgtcacgcaaacctgattgttagcaaaaggtctgactatgttcctgataattttaataaaatcgcttatcatcggcggcctggtcggcgtcggcgtgggcgccggagcggcacgcatgtttcatgcccccaccacgcaggggatgggggcgtttcgaaccctgggcgagctgaattcctgtgagggcgatccggcctcccacttctcctttggccttggcttcttctttaacgcctgggcctcttccgttgcagcaggctccttcacccaggatgttgaccaccgcattatccccaactggggcgcggcggcgctgatgctgaaaaatcgtaacgtcggcgaaacgctgcacgatccgaaaaaaatggccatctcctgcggcatcatcggcatgatcgtcgtcgccttcctcaacctgaccgcctcgtccgtaccggaagcgctgcaggtgaccgccgttaaggtactggtgccggcggcaaacctgctggtgaacaccgtgatgccggtgatcttctggctggcggcgatcgatgccggtaaaaaatcaggcttctgggcgacgattttcggcggcgccgcgcagctgattatgggtaacgccgtaccgggtctggtgctggggatcctgatcggtaaaggcgtcgaagagagcggctggaaccgggtgactaaagtgatgatggtggccatcgtcgcgctgtttgtcctcagcggcttcttccgtggcttcgacatgaagatgatcgaatccttccatctgaccgtgccgaactggctggacatgatccacaactcactcagcggcaagtaacgggagccggataatggaacagaataaaggtttttggtatgccgactggtcgttcccgatctttgttggcctgctctcctccggcgtcttcgccgggacccacatgtactacctgtacggcatcggcgcctttaacgaagtggccttcgtggcgatgctgaagtcggggattgataccggcgtttacggcgcggtggcggcgtttggcgctagcttccttttcgcccgcatcatcgaagggtcgctggtagggatcctcgatatcggcggcgcgatacagcccggtatcggtcttggcgtgccggcgctgctgctcggcgcgggctttgtcttcccggtggcgaacttcgccgcgtcgctggtcaccggtctggtcctcggcctggcggtgggctacatcatcattctggcgcgtaagttcaccatcaaccagagcgattccacctacggcgccgacgtgatgatgggggccggtaacgcctccggccgcttccttggtcccttgatcatcctcagcgcaatgaccgcctcgattcctatcgggattggctcgctggttggcgcactgctgttctacatctggcagaaaccgatcaccggcggcgccatcctcggggcgatgatcctcggttccatcttcccggtggcgattagctaagcgcccgatggcgctgcgcttatcgggcctacaagccagcgcggtttgtaggccggataaggcggtacgccgccatccgtacactcttttcatcaggagatagctatgtttgatttactcctgcgccgcgcgcgcctcgtcgacgataccctgactgatatcgccattcaggacgggaaaatcgcggcgctgggcgagattagcgcgccctcccgtaaaaccattgagctgaacggcaaggtttacgtcagcgctggctggattgactctcacgttcactgctacccgaattcaccgatttatcacgatgagccggatagcgtcggcatcgccaccggcgtcaccaccgtgatcgatgccggcagcaccggcgccgacgacgtcgatgacttctatcaactgacccgtaaagcggcgacggaagtttatgcgctgctcaacatctcccgcgtcgggctgattgcgcagaatgagctggccaatatggccaatatcgacgccgccgcggtgaagcaggcggtgcagcgtcatcccgactttatcgtcggccagaaggcgcggatgagcagcagcgtggtgggcgaaaacggcattacgccgctggcgcgcgccaaggccattcagcaggaaaacgacgatctgccgctgatggtgcacatcggcaataacccgccgaacctcgatgaaatcgccgatctgctgagcagcggcgacatcattacccactgctataacggcaagccgaaccgcattctgaatcctgccggcgagctgcgcagctctattactcgcgctctgcagcgcggcgtgcgtctcgatgtcggccatggcaccgccagcttcagctttgaggtggcgcggcgggcgattgcgctgggcattctgccgcacaccattagctccgatatttactgccgcaaccggatcgacggcccggtgcgctcgctggcgctggtgatgtcgaaattcctcgccatcggcatgacgctgccgcaggtgattgactgcgtgaccgtcagcgccgccgaagggctgcgcctgtcgcgtaaagggcggctggaagtgggcttcgacgccgatttaacgctatttcgcctggagcaccggcccacgctgctggtggatgccgaaaaagagagcctgcaggctgacaacattctggtgccgctggccgcgatccgcgcgggcaaaggctatctgaccgaacaagggagcgcggaacatgccttcgatttttgagaaataccatttaaaacaggtgattaatacttctggccgcatgacggcgctgggcgtttccacaccgcgcccggaagtggttgaagccgcgatggccggtatgaaccagtactttgaaatgaaagacctggtgaataaaaccggcgagtacatcgccaaactgttggatgtggaaggggcgaccgtggtctcctgcgcatcggcggggattgcccagtcggtagcggcggtgctggtgaaagacagcgactggctgctggagaacctgcacgttacgccgattgaaaataacgaaatcgtgttgccgaagggccacaacgtcaacttcggcgcgccggttggcaccatggtggcgttgggcggcggtaagctggtggaagcgggctacgccaacgaatgttctgcccaacagctggcggcggcgatcactccgcgcaccgcggcgattctgtacatcaaatcccaccactgcgtgcagaaaagcatgctcaacgtcgcgcaggccgcggaagtggcgcgccagcataacgtaccgctgatcgtcgatgcggcggcggaagaagatctgcagtgctactaccgcatgggcgccgacctggttatctacagcggcgcgaaagcgattgaagggccgaccagcgggctggtgatcggcaaaacgcagtacgtcgaatgggttaagcgccagtcgatggggattggccgggcgatgaaagtgggtaaagagggcattctcggcctgacctgcgccattgaacactacctgacggcgagcaaagagagcggcgagcagatggtggcgaagatgacgccgtttatcgaacagctcaacgcgcttaacggcgtgaccgcgcgggtggtgtgggacagtgcgggccgtgatatcgcccgcgccgaaattaaatttgatgaagtcacgaccggcgtgaataccggcgatctggttaacgcgctgaagcagggtgaatacgccatctacttccgcggctataaagcgaatgaaggcattatcgaagccgatgtccgcagcgtaaacgcccagcagctggaggtggtcgctcgccgcatcgcagaagttctgaataaggagaaacaagcatgaaactgaccccaaacttttaccgtgaccgcgtgtgcctgaacgtcctggcgggcagcaaagacaacgcccgtgaaacttacgacgcggcggaaggtcacgtcctggtcggcgtgctctccaaaaactatccggacgtcgccagcgcggtggccgatatgcgcgactacgcgaagctgattgataacgcgctctccgtcgggctgggggcaggcgatccaaaccagtcggcgatggtgagcgagatttctcgccaggtgcagccgcagcacgtcaaccaggtcttcaccggcgtggctaccagccgcgcgctgctcgggcagaacgagacggtggtcaacggcctggtctctcccaccggtacgccgggaatggttaagatctccaccggcccgctgagcagcggcgcggcggatggcattgtgccgctggaaaccgccatcgcgctgctgaaagacatgggcggcagctccatcaaatacttcccgatgggcggcctgaagcaccgcgccgagtttgaagccgtcgccaaagcctgcgccgcgcacgatttctggctcgagccgaccggcggtatcgatctggaaaactacagcgagatcctgaaaatcgccctcgatgccggggtaagcaaaatcatcccgcatatttacagctcgattatcgataaagccagcggcaacacccgcccggccgatgttcgccagctgctggagatgaccaaacagttagttaagtagtgcccttgtccctcaacctcaaagggtgaggagcagcttatcccactgaaccatcaaggagttgctatgcctgtcgctcgtcatctgcttgtcgcttcactgtccctgtttgccgccgccgcgggcgccgcgcaaacccactatgcctgggtaggcacctataaccccaatggcgaaggtctgtatcgctttaccgtcgatgccaaaaccggcgccctgcgcgataagacgctggtgagctcgttgccgaacgtcgcgcaattaaccgtgtcgcgcgatggcaaaacgctgtatgccgccagtgaggtcgaaaaaggcgtggtgcaggcgtggcgcattgaaaagaacggcgagctgaccgcgctcagccaggtcgcctccggcggcgccgggccggtgtatctctccctgacgccggacggtaagcatctgctggtggctaactatgtcagcggcagtatcgccgtgctaccggtgcaagaagatggtagcctggctgaggcggtggacaggcatcaggatgaaggcccggcaggcgccgaacgcccggcggcggccgtcgagggcagcttcgccatcagcgatcacaacggcccgcatgcccatatgatcgccgccgatcccagcgggaaatacgtttactctaccgatctggggctggatcggatctatcagtatcggctggatagcgccagcggcaagctaacgccgaacgatccgccgtttatcgccgcctcgtcgccgggggccggcccgcgccacttcgtctttacgccacagggcgacggcctgtggctgattaatgaggaagcgtcgacgctgaccttctatcatctggataagcaaagcggcctgctgcgtgaaggcaaaactgtctccgcgctgccggaagggtataaaggcaccagctttgccgccggacttgtgttgagcaacgatggcaaacagctatacgtcgccaaccgcctgcataacagcattgcccacttcacggtgctggccgacggcagcctgagtcaccaggaagatatctggacgcgtggcgattatccccgcaccctgacgctggataatcaggggcagtggctgtacgtcatgaaccagcgtagcgataatattacccgcttcagcgtggcgccgaaggatggcaaattaacctttgcctccgactatacgccggtcggtagcccatcgcagatggtgatatccgcccaaccctgagccgtaattacaaggaactgacatgcgatttcccaaccaacgcttagcgcaactcttcaccctgctgcgaaatgaaacgctgccgcaggatgagctggcgcaacgcctgtcggtttccacccgtaccgtgcgcgccgatattaccgccctgaatacgctgctggtgcaatatggcgcgcagtttatccttaaccgcggcagcggttatcagctgaagatagataatccgacgagtttccaggcgctggaggagaccgcgccgaaggcgcagcacgtgccgcgtaccgcccaggatcgcatcacgtttctgctggtgcgtttcctgacctcggcgttctctatcaagctggaagacctggcggatgagtggttcgtcagccgcgccacgttgcaaaatgacatggttgaggtgcgcgagcgcttccagcgctatcagctgactcttgaaacccgcccgcgccacggtatgaagctgttcggcagcgaggtgtcaattcgcgcctgcctgaccgacctgctgtgggagctgacccagcaaggcgatatcgcgccgccgatcggcgccgaggcctttgcggcggaggtgccagcgctgctggagccggtgctgcaggagacgctcacgcggcatcatattcgcctcaccgacgccggcgagcgctttgtctgcctgtatggcgcggtggtggtgcgccgcgtcagcgaaggctacccgctggccgatttcagcgctgaagatgtggcgcagaacgtccgcgacgccgcgcgcgagctgacgggtgagctgcagcggctggccgggaaacctttatcgcccgccgaagaagagtggctatgcgtgcatatcgcggcccgtcaggtgcaggatgtcgatccggaaactatcagcgccgacgatgatgaagcgctggtcaattacatcctgcgctacatcaacagccagtataactacaacctgctggacgacgcccagctgcatgccgatctgctgacccacattaaaaccatgatcacccgggtgcgctaccagatcatgatccccaatccgctgctggataacatcaaacagcactacccgatggcctgggatatgaccctggctgcggtctccagttgggggaaatatactccgtacaccatcagcgaaaacgaaatcggctttctggtgctgcatatcggcgttgggctggagcgccactacaacatcggctaccagcgtcagccgcaggtgctgctggtgtgcgataccagcaatgcgatggtacggatgatcgaggcgatcctgcagcgtaaatatccgcagctggagatcgccgctaccatctcccagcgcgagtacgaacagcgggacgcgatcgaggcggatttcgttatctcaacggtgcggatcggcgaaaaagacaagccggtggtgaccatcgcgccgttccccaccgactatcagctggatcaaatcggcaagctggtgctggtggaccgtacccgtccgtggatgctgaataagtacttcgatgccgcccacttccgggtggtcgataaaccgatggatcagcaaacgctgttcgccgagctgtgccagcagctgctggaggaaggctttgtcgatgcggagtttcatgcttcggtggtggaacgtgaagcgatcgtcagcaccatgttaggggatggcattgcgctgccgcactccctggggctgctggcgaaaaagacggtggtttataccgttatcgccccgcagggcatcgcctggggcgacgaaaccgcccatctcattttcctgctcgctatcagcaagcgcgagtatgaagaggcgatggcgatctacgatattttcgtgactttcctgcgcgagcgcgccatgagtcgcctcgccgcgacccgcagcttcgatgagtttaaaacggtggcgatggagtgcgtcagccggttttgagaggcgttttccagattcgagtgtaattcaattgtaatgctatactgcattacaaaattccactttccggaggcataatggccacgctcaatgttcgactggacgataaactcaaaaaagaggcttatgccgtgctggagaaactcgatatgacaccaacggaggcggtacgcctgctgtttcaatacattgcggaaaatggccgcatgccggtgaaaagtatgaccatcagtgatggcgaagcggcgttattacgcaccgttcgcgaacggctggaaaacccacggccgggggttaaggtgagtctggatgacctatgaactggagtttgatccacgagcctggcgcgaatggcagaagcctggcgagacggtcaaaaaacagttcaaaaataagctccagcagattgtgcagaatccgcgaattgagtcggccaggctgagcgatttaccggattgctacaaaatcaagcttaaggcgtcaggttatcggttggtgtatcaagtacgagatagtgtggtggtggtttacgttattgccattggcaaaagagagaaagcggccgtttatcatcaggcgaataaacggctctaaacgctatcgcaaatgatgtacgacctggttgctgctgccgcgccagataagcgccggatctttcaaatcctgcacaaacttaccgtcaaccagcacgttaatcaggttcaccacctgcatttgcgcctcattcagctcatcaagtttatagccggtccagacccagatatctttgccggggcattcggcgcgtacgcgctgaaccagctttaaaatatccgcgacgttctgcggatgcagcggatcgccgccggagagcgaaagcccctggcgtttgatgcgggtgtcgttgaggtcggcgatgatacggtcggccatctcagcggtaaacggcataccggagttcacccgccaggtgcttttgttgtagcagccggggcactcgtggacgcagccggagacaaacagggtgcagcgggtgccggggccgttgacgatgtcgacggggtagtactggtgataattcattttcacttctcaattaacgccagagcggcgttggctgcgctcactcaccccagtcacgtactgaatgtacgctcccggggattccttcgtttgccgccttgctctgacgttaattgctttgcgaaaacgaaggagtgcggccatttcctggcgtcgctgcgctcggccgagctacaacagtggtagtggtagcccggataaggcgctgcgcgccgcgatccgggaacggctccttagtggccaaacggctacggggccggtcccttctccccgttggggagagggggaggggctaaaccagctggaattaaccaatctgcccattgcccaggtgcttcacgcggcgcttcacctcttcctgcttgccggcgttgaacggccgcgcgtccgggctgccgagataaccgcacacccggcgggtaacggaaacgcgggcggcgtcgtggttaccgcatttcgggcaggtaaagcccttgctggtgcactcgaactcgccggtaaaaccgcactcgtagcactcatcgatcggcgtattggtcccgtagtacggcacgtgctgatagctgtaatcccacacgtcttccagcgccttgaggttatgctggatattcgggtactcgccgtagcaaatgaaccccccgttggccagcggcgggtacggcgcttcgaaatcgatcttgtcgtacgggttgaccttcttctccacgtcgaggtggaagctgttggtgtagtaacctttgtcggttaccccttccaccacgccaaactcggcggtgtcgagacggcagaagcgatcgcacaggttttcgctcggcgtgctgtacaggctaaagccgtagccggtttcttccttccacaaatcgacggcgtcgcgcaggcgctggacgatggccacgcctttctcacgcaacgcctcgctgtcgtacatatgctggttgccgtacagcgcattgatggtttcatggataccgatatagcccagagaaatggacgcgcggccgtttttgaagatctcggagacgtcgtcgtcggctttcagccgcacgccgcaggcgccttccatatacaggatcggcgccacgcgagccttcactccttccaggcgggcgatacgggtcatcagcgctttgcgcgccagctgcaggcgctcgtccagcagcgcccagaaggcggcttcatcgcctttcgcttccagggcgatgcgcggcaggttgagactgatcacgccgaggttattgcgtccatcatgcacctgctcgccgttctcgttttcccataccccgaggaagctgcggcagcccatcggcgttttaaacgacccggtgactttcaccacctgatcgtagttgaggatatccgggtacatgcgcttgctggcgcactccagcgccagctgtttgatgtcgtagttcgggtcaccgaacttatggttcaggccgtcgcggatcgcgaacaccagtttcgggaacaccgcggttttgcgatttttaccgaggccggcaatgcggttgcgcagaatcgactgctggatcagccgcgattcccagctggtgccaaggccgaatccgaaggtgacgaacggcgtctggccgttggcggtatgcagtgtgttaacctcatactccagcgactggaaggcgtcgtagcactctttttcggtacgggcgcgggcatagccttcggcatccgggatctgccactcttcggcgattttgcgatgctttttgaagctttcgctgacgaacggcgccagcacttcatcgatgcggttgatggtggtgccgccgtaaatatggctggcgacctgggcgatgatctgcgccgtcaccgcggtggcggtagagatagacttcggcggctcgatctccgcgttgcccatcttaaagccctgggtcagcatgcctttcaggtcgatcagcatgcagttgaacatcgggaagaagggcgagtaatcgaggtcatgatagtggatcatgccgcgttcgtgagccatcaccacatcgtggggcagcaggtgctgccgggcgtagtgcttggcgacgatcccggccagcaggtcgcgctgggtcgggatgactttactgtccttgttggcgttttcgttgagcagcgcggagttggtctgctcgacgaggccgcggatctcctgattgagacggccgcgcttctcacgctggctatcgcggtcatggcgatactcaatgtaggcgcgcgccagctgcttataggggccggacatcagctggttttccaccgcggtctggatctcgttgatgtcgacctgggcgcggccctgcatttgttggctaacgacttctgcgacggtggcgcaatagtctgcgtcatcgactcccgctgctttagctgcacgcagaattgcttcctgaatgcgctctgagttgaacggcactttacagccatcacgtttcatcacatgcggtgtcatgatcactccatatatagaacaggttatccacagaggcggaggttatcccgaaggcgctgcacgctacggctcgtgctgtttaccttcgggtccggcccgttttatccacatctcatcaccgccagacatcgacaagatatggtgacataatagacgattaatacaacatgttgggccgaggcgcattttaagttctatatgtagtgatttgcatcaaagatgtttgcgattttattgacccagaacaaggtaaaaaggtgagagtacggatgatgggcgctggcgataaatgtaaatttaggcgcttaaaatataagcaaaaatcgagcccgttcacgcatgaaacgggcaaatattcaggcaatcaacgtatcgttaagcagatcgaccagcagtagcagggcatagcgagcctgctgcgggtcagcgggcagcggcaggatggcgctggccatatcgccaagggcgtgctgttccggcgtcagagcaataatggtcactccctgcgtacgcgcctgcaaagtggcgctttgcaacacagggttggcctcggcagtggccagcaccagcagcagatgatcgtcattgagggtgctggcggtcagccgcatcagcgctgcatcctgacagagattaatcgcgatgccggagggcagtagctgatgctggagcagcgcggccagcgtcacgtcctgggcgccaagggcgaagcagtgtaccgcacgggcgctcagcaggcgcgatttacacttttccaccgccgcttccgcggtatggccgagctgacgagttagggtaacgccaaggctgctaagtttgtcgcgccaggcgacgggcagggcggcgctgtccggcgtaagccagctggcgcgccgttcgctggcctgcgccagctgtttacgcagatcacgaatatcatcgcagcccaccgagcgggcgaagcgggtaatggtggcagggctgacccccgcgctggctgccagctcgtcaatagaggcgctggcggtaaagcttagattttgtagaataaaggtggcgacgcgcgactcctgggcactaaagcggcgcattccttcctgcagctgacctacgatatccatcctcatgttccctttggcaaaacccgcatttgaaaatatttttcaattatcgactgtctctctttatagcactcacgccgcatatttcctatggtcagagcagtaaagggtgacgccctggcgataaaaatgcgcaaaaattgagcctcgatcacatcggtgaaaattattttcatatagccttcactatcacacaatattaacaatatagtcgtccaggccctgggggctgaagcgataacacgtaaaggggaagcgcaatgccacgaatcgtactctgttgtgccgcaggcatgtcgaccagcatgctggtgaacaaaatgaaagcagaagcccagcagcgtgcgctggcgctggaaatctatgcggtggcggtggcggaatttgaacgtgaattgccacacgccgacgtcatcctgcttgggccgcaggttaaatatgaagccgggcgcctggccgcgctggccgcgccgcagggcaaggcggtggcggtgatcgatatggctgactacggcatgatgcgcggcgccgcggtgttggataaagcgctagccctgctcgaacactaattttctcatcccgtttttcatcatcatcacgtgcggtcctggcgatcgcgcgcggcgctctgtatgccgaaaatccgaaaagaggacactatgcaagcactgaaaattgccgttatcggcggcggcagcagctacacgccggagcttattgaagggattatcgttcgttacgagcagcttccggttacagagctggcgctggtagatgtcgaatccggccgggaaaaggtggagatcatcgccgcgctgacccggcggatgctgaaacataaagggctggagcaggtggcggtcagcgtccactttacgctcgatgaggccatccgcggcgccagctttgtgctgacccagctgcgtgtcggacagctggcggcgcgcgccgccgatgagcggctgggtctcaagtaccacctgctgggccaggagaccaccggcgtcggcggttttgccaaggcgctgcggacgatcccggtgatccttgaggtggcgcgtaaagtggaacagctggcgccggaagcgttcattctcaactttactaatccggcggggatcgtcaccgaggcggtcagccgctacagcaaggcgaagatcatcggcctgtgcaacgtgccgatcaacatgcagcacatgatcgtcgggatgctgggcgcccaggagtccgaagtaaaactgcgctttgccgggctcaaccatatggtttgggtgcataaggtgctacaggggcgcgaggatgtcaccggcaaggtgatcgacatgctgtgcgacggtaaggcgctgtcgatgaacaacattaaagagctgccgtggccagcggaattcctgcgcgcgctgaaggcgattccgtgcccctatcatcgctatttttggctgacgccggcgatgctggcggaagagatcgccgcggcgaaaaccaagggcacccgcgccgaacaggtgatgaaagtcgagcaggagctgtttgcgctgtacgccgacccgcagctggaagaaaaaccggagcaactgagctttcgcggcggcgcctactactcggaggtggccgtcgagcttatcaacgcgatctacaacaacctgggcgcggagatggtggtgaatacccgcaacaacggcgcgattcatggtctggatgatgatgcggtggtggaaaccaacagcattattgatgcgcaaggggcgcggccgctggcgttcggcccgctgccgccggcgatgaacggcctgacccagcaggtgaaagccttcgagcggttgacgattgaagccgcggtacacggctgtcgcgaaagcgcactgctggcgctggtgaccaacccgctggtcggtaacgtcaccgatgcccaggcgctgctggatgaagtattaaccatcaaccgtcaatggctgacgcaatttaactgaccgctatttcccctcgggagcacaccatgtcgaatacaagctggattgaacgttacgtcatgccggcggcgctgagaatcgccgggcaaaagcacgtcctgtcggtgcgcgacggcatcattctcaatatgccgtttatgttgattggctcattcttcctgattttcgcctacctgccgatccccggctatgccgatatgatgagcagcctgtttggcgaggtctggcgcgataaaatgttgtacccggtgaaagcgacctacgacatcatggcgctgatttccagcttcggcatcgcctaccggctggcggagaagtatcgcactctcgatccgctgagcgctggggcgatgtcgctggtggccttcatgatgacgatcccgcagaacacgctgtttacgccggtacacggcgcggcggaggtgattaaaggggtgatcccggtgagcatggtcggcagccaggggctgtttgtcgccattgtcatttcgctgctgtcgacggagatttatcgtttggtcgccagccgcaatctcgttatccgcatgccggacggcgtgccgccggcagtggcgaaatctttcctcgccctgatccccggcttctgtgtgcgggcggtggtgctggcgctgcgcctggcggttgaggcctcgccgttcggcgacatcaacagcatgatcgccactttgatcggtattccgatgcatcacgtcggcggtacgctgccgggcatgattatttcagtcattttgattggtattttgtggaccctgggcctgcacggcgacgcgattgtgctggtatttattcagccggtgtggctgtcgaatatgtcagagaacctgacggcctttcagaacggccagccgatcccgcatatcattacccagcaattttacgacctgtggattgcgcccggcggcaccggcgcgctgctggggctggtgatatttatgttgctgcgcagccgtagtcagcagatgaaacagctggggaaaattgccgcgcccggggcattgtttaacatcagcgagccgatggtgtttggcatcccgctggtgatgaacccgtactttttcctgccgtttattttaacgccggtgctgctggtgatcgtgtcctataccgcgatggcgaccgggctggtggcgccgcccgccggaatcgcgctgccgttcaccacgccgatcttcatcagcggctatctggcgaccggagggcatatctccggcacggtgctgcaggtggtgaatttagcgatttcgctggtggtctactatccgttcttccgcgcctgggatcggctaaaggcaaaagaagagcacgcctcggcgcaaccccaagcgagcgctgcgattgctgatgccgaccgcgcataacctccagcctgacaaatcgtagccccggtgagcgttgcgccaccggggaaaagcgttatccctgcagccaccatatcgcttcgaacggccgcagcgtcagcccggtcgggcgcggggtggtctcggcatagttgctgatgatcatcttccactcgcccggggcctcagcgggctgccaggcctgcagctcgcggctcaggttagcggcgactaccagcgtttgcccctgccactgacgacgatagcaccacagcgacggatgctccggcagcagatcctcgtaatcaccccaggtcagtagcggcagggttttacgcagcgtaatcagctgctgataggtataaaacaccgaatcggggtccgccagcgccgcctcgacgttgatctcctggtaattatcgccaaggccgatccacggctcaccgtcgctgaagccaccgttctcgccggcgtgccacggcatcggcgtgcggctgttgtcgcgcgacttgctggcgaggatcgccagcagttcgtccgggctttgcccctgcgccgcacgttcgataaacatattgtggctttcgacgtcacggtaatcgctgatgctgctgaagtgcggattggtcatgccgatctcttcgccctggtagatatagggcgtgccctgcatgccgtgcagcaccatcgccagcatcttcgccgccgtcacccggtactcgccttcgtcaccaaagcgcgacacgatgcgcggctgatcgtggttacaccagaacagcgcgttccacgcccgattgtgcattccctgctgccagtggcggaacagcgccttcagcgccacatagtccgggcgggcgagggtccatttctctccgccgggataatcgacttttaaatggtggaagttaaaggtcatcgacagctcgcggccgtccagcgcggcgtactgctggcagtgctccagcgaggtggaggacatctcgccgacggtcatcaggttacgcggggtgaacacatcgcggctcatctcctgcaggaactcatgcacccgcgggccgtcggtatagaagcggcggccatccccgtccagatcgcagggaaaggtctggtcttttgagatcaggttgaccacgtcgaggcgcagaccgtcgacgccgcggtcagcccagaattcgcagacctttttcagctcggcgcgcaccgccggattctcccagttgagatcggcctgctcaatggcgaacaggtgcagataatactgcccgctgtcggcgtgccactgccaggcgttaccgccaaatttggagcgccagttgttcggcagggcgtccggttcgccatcgcgccagatatagaactggcggtagggactctccttattcagcgactgacggaaccattcatgttcggtcgacgtgtggttcagcaccatatccagcacgatacggatgccgcgggccttcgcctccgccaccagggcgtcaaagtcggccatcgtgccgtaggagggatcgatggcgatgtagttcgccacgtcgtagccgttatctacctgcggtgagacgtagaacggcgtcagccagatggcgtcgaccccaagcttttgcagatagtcgaggcgggaggtgacgccgcgcaggtcgccggtaccgctgccagtggtatcctgaaaactcttcggatagatttgataaataacgccgttttgccaccagtgggggagatgattcatagtactttcctgctgcaacgaggggcgccaaaggcgccccgaaagaagaagttagacaatctgcaaggtgccctgacggtacttgcgctgatacaccacgctggtgaggataatcggcaccaccaccgcgatagccatcgccatggcgtacacctgccagtaggtaggctggatggagaggatccccggcaggccgccgacgccgatgccgttcgccagcacgccgttcaggccgcacagcaggccggcggggccagagccaatcattgcgcacagcatcgggaagcggtatttcaggttgataccgtacatcgctggctcggtgaccccgagataggcggagatcgccgccggtaccgagatttcacgttcattctgcttgcggctggcgatgatgatgccaaccaccgccgacgcctgggcaatattcgacagcgcaatcagcggccacaccggggtgccgcccatgctctggatcatctgcatatcgatagcgagggtggtctggtggacaccggtaatcaccagcggcgcgtagaggaagccgaacagcgcggcgccgatcggcgcgaagctgccggttaacagatggcgtaccgcgaaggccacgccgtcgccgatcaggcggccgaacggaccgattatggagtgcgcgaggaacaccgcgaggatcagcgagcagaccgggacaatcaccaggtagaggtagtcaggcacaatgcgcttgaggcgcgtctcgataaagcctaaggccaggccagccagcagggccgggatcacctgcgcctggtagccgactttggcaatggtaaacaggccgaagttccacacccccggcacctgctggccgaggagataggcgttcatcagctgcggggagacgagggtgacgccaaggacgatcccgaggatcggcgtgccgcccatcttcttcaccgctgaccagcagatccccaccggcagatagaagaagatcgcctcgccaatcagccacaggaagtcatagatggttttcagcgatggatacatctgggccagcgtctggccattgctcatgggcaggtcgccgataacgttgcggaaaccgaggatcagaccgccgctgatcagggccggcagcaggggaaagaagatctcggcgaagtgtgagattaattgttcatgccacttcatattttgccgcgcggcctgcttgacctgctctttgtcggcggaggtctggccggtggtcgccagcagggccttgtagtaatcgcccacctcggtgccgatgaccacctggaactggccggcgttagtgaagcatcccttcaccatgcgcagctgctcaatctcttttggtctggcgatggccgggtcgttcagcacaaagcgcaaacgggtaatacagtggctgacggtggcgatgttaccgcgcccgcccaccagttcgatcagtttatcgatgtcctgctggtttactttgctcatgatgaagcctcaaaaacagaggggagagatgccgtttttaccttgagggcatcctaaccgttccgcttaatttgcaaaatgggaacgttcccgaaacccggcgacgatcacataaatcgtccgagcgagattaattgagggcggcgggaatcacgatctggcggggatcgacgctgccggcgatctgctcgatcaactgccgggcggcccggcgtccggactcggcatagcccggatcgacggtcaagatttccgggtggagaaacttcatcagcggcgtgctgccgacgctggcgagctgcagcgcatcgcgaccctgctgctggaggtacttgctggcgccgagagcgagggtatccgtcgcgcagaccagggcgctggtttcagccatcagcacgctggcgacggtgtcatatccctgcttcatgcccagccccggcagggcggcggtgggcgtcagacgatgcttttcacagaaggcgaggtaggccagatggcggcgttcgccggtggtgacgtcgctgtgcggtacgccaagaaaactgatgtggcggtgtccgcgatcgtagagccgctgcatcagcagcgtgatggccccctcgtcgtcatagcacaccgaggcgaagccgggagcgtcgcgggccatcagcaccagggtgtcgcgccagggggcgagcatcgcttcgtcgatgccggtaaaaccgaacagcaccacgccgtcaatattgcgccgggcgagcatgccgagatgctcctccaccaacgccggggagaactggctctccatcataatcggatcgtaaccctgctcataaaaggcgggcagcatggtctgcacggcaaggttttccgacagcgaatcgagacgggtgacgataatcgccaccactttatcgctctggccgcgcatggcgcgggcggaacgggagggcgagaaaccgtgctgctgcatcaccgcttcgacgcgctcgcgggtccgttcgctgaccccgctctcgttgttaaggacgcgggataccgtcgatttccctacgccgcttaagcgcgcgatatctttgatggtcagccggttctgcatgcggaattctcgtcagggatggtagaagtgagcctaatgctactcaaccaaaccgcaatgagcaaagtctggtttacgttcggtttagttgcgcgggtttatcatcgccattattgccacacaatcctcagcgagggcgctataattcgcgccgtttatattcacttaccggagatagttatggaccccgatcccactcctcatcctcgatggagcaacctttctttccggtaagcctgtttaacactgctttaccggaaagcgtaaagcagtgacgtccttgatgtccctgccataaaaataacatgcctgacaggtaggttttgctacgcccgtcggcaacgctgcgttcgctttggcgagcgcggagggactgtttatgctgaaaaattatacccggcagctgttcgcgcagcttagccgccatctgccacgtcgtttagtccagcgcgatccgctgccggacgcccgccatctggcgagtggtcccattcctgaatcgcttggtcagcattgcctgaacgtggcggcgatggacgaccaggagatctggcgcgcctttgacagccaccctgaagggctcaatgaaggcgaagtggcggcgaaaattctcaaacatggtgacaaccagatcccggcgcagaagccctccccatggtgggtgcatctgtggacctgctatcgcaacccgttcaacctgctgctgaccgtgctcggcatcgtctcctattccaccgaggatctgttcgccgccggggttatcgccctgatggtggggatctcgacattgctcaatttcatccaggaggcgcgctcgaccaaagcggcggatgcgctgaaggcgatggtgagcaacaccgccaccgtgctgcgggtggtgaacgagcagggggagagccgctggctggagctgcctatcgaccagctggtgccgggcgacattatccggttgtcggcgggggatatgatcccggcggacctgcgtatcctgcaggcgcgggatctgttcgtcgcccaggcctcgctgaccggcgaatcgctgccggtggagaaagtggcccgcagccgcgatccgctgcagcaaaacccgctggagtgcgacaccctgtgctttatgggcaccaacgtggtgagcggctcggcgcaggccatcgtcttcgccaccggcggccgcacctggtttggccagctggccggccgcgtcagtgaacaggagagcgagccgaacgcctttcagaagggcatcagccgggtcagcatgctgctgatccgctttatgctggtgatggccccggtggtgctgctgatcaatggctacaccaaaggcgactggtgggaggcggcgctattcgcgctgtcggtggcggtcggcttgacgccggagatgctgccgatgatcgtcacttcgacgctggcgcgcggggcggtgaagctgtcgaagcaaaaggtcatcgtgaagcacctcgacgccattcagaatttcggcgcgatggacatcctctgcactgataaaaccggcaccctgacccaggataagattgtgctggagaaccataccgacgtctccggcaaggtctgcgagcgggtactgcatgccgcctggctcaacagccactaccagaccggcctgaaaaacctgctcgacaccgcggtgctggacggggttgagctggatgccgcccgcgggctggcggaacgctggcagaaggtagatgagatccccttcgacttcgaacgccgccgcatgtcggtggtggtgaaggaggatgacgccgcgcatcagctgatctgcaaaggggcgctgcaggagatcctcaacgtctcgacccaggtgcgctacaacggcgatatcgtaccgctggacgacaccatgctgcgccgcattcgccgggtgaccgataccctcaaccggcaggggctgcgggtggtggcggtggcgaccaaatacctgccggcccgcgaaggcgactaccagcgcgccgatgagtcggacctgatccttgaaggttacatcgccttcctcgatccgccgaaagagaccaccgccccggcgctgaaggcgctgaaggccagcggcatcacggtgaagatcctcaccggcgacagcgagctggtggcggcgaaggtgtgccatgaagtgggactggatgctggcgaagtggtgattggcagccagattgaagccatgagcgacgacgagctggcggcgctggcgaagcgcaccactttgtttgcacgtctggcgccgctgcataaagagcgtatcgtgacgctgctcaagcgtgaaggtcacgtggtgggctttatgggcgacggcatcaacgacgccccggcgctgcgcgcggcggatatcggcatctcggtcgacggcgcggttgatatcgcccgcgaggcggcggatatcattctgctggagaagagcctgatggtactggaggagggggtaatcgaaggccgccgcaccttcgccaacatgctcaagtacatcaaaatgaccgccagctccaacttcggcaacgtcttcagcgtgctggtggccagcgccttcctgccgtttctgccgatgctgccgctgcacctgttgattcagaacctgctgtacgatgtttcccaggtggcgatcccgtttgataacgtcgatgatgagcagatccgcaaaccgcagcgctggaacccggccgatctcgggcgctttatggtcttctttggaccgatcagctcgattttcgatatcctcaccttcggcctgatgtggtgggtgttccacgccaataccgtggagatgcagaccctgttccagtccggctggtttatcgaagggctgctgtcgcaaacgctgattgtgcacatgatccgcacccggcgcattccgttcgttcagagccgggccgcctggccgctgttcgccatgaccctggtggtgatggcggtgggtatcgcgctgccgttctcgccgctggcgagctacctgcagctgcaggccctgccgctgagctacttcccatggctggtggcgatcctggcgggctatatggtgctgacccaggccgtgaagggcttctacagccgccgctacggttggcagtgagggacgcgttttcggatgaaccacgtaaaaaaggcagcctgcgggctgccttttttcatgccgaggttagcgatcagcgacgcacggcgatagcttcgatctcgatcttcacgtctttcggcagacgtgcgacttcaacgcaggagcgcgccgggaaggtggcgttatgctcggtgaagaacgcttcgtaagtggcgttaacggtagcgaaatcgttgagatctttgacgaatacggtggtcttgacgatatcgccgacggtgaggccagcggcttcaacgatcgctttcacgttgttcagcgactggcgcgcctgcgcggacacgtcttccgggacgctgccggttttcgggtcgaccgggatctggccagaggtgatgatcatgctgccgaggtcaacgccctgaacgtaggggccaatcgccgctggtgcattttccgtcgcaatagttttgctcatgttatctccagatgaactgagtaatgttacgcaaaatcattcaggttgccgccaggcggtaagcgctgtatcgccggcgcagacgccgcctgaaggacgaagcgtagggtggtagccattatagggaggcctaccaccaataccaaccgcatttagttggccagcaccacataatgagaaaactctttttcgcagtatttgcatttgagtgcgatgtcatcagcgcgttttttcactgcaaaactggaagaaaccggttcggcgtggctgatacagttgctgttcgggcagaccagcacgctgtcgatacgatccggcaggctcgggcgggatttgcccaccacttcgtaatcatcaatgcggtttaccgtcgcctgcggggcgtacagcgacagctggttaacctgctcgtcggtcaggaaggtgttctcgattttaatcaaatccttgcggcccatctcgccggagggcaggttcaggccgatggtgatgcgctggtcggtttcggtcagtttgaacagggtgagcagcttaaagccgacctgcgccgggatatggtcaatcacggtgccgcgtttgatcgcttctacctgcagtttattgtcgtgtgtcatctctcattcccccttacagtgccagctcgctattcagtaccagtgccagtaacgcctggcgggcgaagatgccgttaccggcctgctggaagtaccaggcgtgcggtgttttatcgacatcggtggtgatttcgtcaatgcgcggcagcgggtgcagcactttcatgttggcgcgcgccccttcgaggtcggcggcgcgcaggacgaactgcgctttgacgttggcgtattccgacggatccagacgctctttctgcacgcgggtcatgtacagaatatccacttccgccatcacgtcgtcgatggcgctatgcaggctccaggcgatgcctttttcatcgagcatatcgaggatgtactgcggcatggccagcgcgtccggggcgatgaagtagaagcggttgccgttgaatttggccagcgcctgggtcagggagtggacggtacggccatacttcagatcgccgaccatcgccacgttgaggttttcgaggcggccctgggtctcctgaatggtgaacaggtcgagcagggtttgggtcgggtgctggttagcgccgtcgccggcgttcagtaccggcacgccgccggagaattcggtcgccaggcgcgcggcgccctcctgcggatgacgcatcacgatggcgtcgacgtaggtgctgatgacggagatggtatccgccagcgtttccccttttttgcccagtgaggtgttggcgctgtcggaaaagccgaccacgctggcgcccaggcggtgcatcgaggtttcaaaagagaggcgggtgcgggtcgaggcttcaaagaaacagctggcgataaccttatgcttcagcagctcgggttgtggattggctttcagctttgccgccgtcgccagcaccagttcgaggtcttcgcggctgagatcgtttatggaaatgatatgtttttgatatagcgggttagccatgcttatctcctgacgcctgggcaaaaaaaagccccttaaataaggggcttcgggaatccaatgagcaacggaaagaaaaacggcaggccagcgtctgcattgagacgcgctaagacagaatgtcgtacgcaattggccatgcttcctcccggcaaaacgactggcattatacgcagaccgttatgacgatcaagcgattcattcacaaacaggtaatcgtttgcctgtcgaaaagtgcgccagcgcaaagaagcgtgaaactgtactggtatggcagccgcgatgggggtataacacgataaaatgaaatgctgttttatatttgaggtaagcaatgattattggcaatatccaccatctgcagccatggctgcctgccgcgctgcgcgaggctatcgaacaggttatcgctcaggtcagcgaggcgacgccgctgggtaaacacgatatcgacggcgacaacctgttttatctgatttctgaagacaccaccgagccgcaggccgcgcgccgcgcggagtaccatgctcgctatctcgatatccagattgtgctccgcggcagcgaggggatgaccttcagcaccttgccgccaggagagccgcagaccgactggctggcggagaaagacatcgcttttcttgccgaaggccagcaggagaaaacggtgatcctcaacgaaggggactttgtggtgttttatcccggcgaagtgcataaaccgctgtgcgccgtaggcgccccggcgaaggtgcgcaaagcggtggtgaagatgctgatggcgtaaaatggcgaaccgaatcccggatgaacgccgtgccatccgggacacagccgcgagcgaggggctatttgctcagcgtcgccaccatcaccgctttgatggtgtgcatccggttttccgcctggtcgaagaccacgctcgccgccgactcaaacacctcgtcagtcacctccatgccgccgtgcaggccgtaatcggcagccatctgtttgcccagcgtggtctggtcgtcgtggaacgccggcaggcagtggaggaacttgacctgcgggttgccggtcagcgccagcatcgcgctgttaacctgatagtcgcgcagcagggcgatacgttcggcccatttttccttcgcctcgcccattgagacccagacgtcggtatagataaaatcggcgcctttcacccccgcggcgatatcttccgtcagggtgatgttgccgccctgctgtttggccagcgcggtgcaggtctccaccagcgcggcctccggccagcaggccgatggcgccaccaggcgcagatccagaccggtcaacgcggcggcttccagcatcgaattgcccatgttgttgcgcgcgtcgccggcgtagaccagcgtcatctggttaaaggctttgcccggcagatgctctttcatggtcagcaggtccgccagcagctgggtggggtggaactcgttggtgaggccgttccacaccggcacgccggcgtattgcgccagggtctctaccacttcctggccgtggccgcggtactgaatgccgtcgtacatccgtccgagcacgcgggcggtgtccttgatcgactctttatggccaatctggctgccgcttggccccagataggtcacgcgggcgccctgatcgtatgcggcaacttcgaaagagcatcgtgtacgggttgagtctttttcgaagatgagcgcgatgtttttccctgccagtttctggacttcgataccgtttttcttatcggctttcagctttgccgccagctcgagcagggcggtgatttctgcaggcgtaaaatcgagtaactttaaaaaatgcttctggtaaaacgcagacatggttccctcacctggcataggccactaattgaattaaaattcaatttatatgtatgaatattcatttgcaagtctgtgatcgaaatctttcactgagaagtggaggcaatgacggcggtatgtgacaatagggataactgccgcacattatgaggaacgagccatggcaaacccggaacacctggaagaacagcgtgaagagacgcgtctgattatcgaagagctgctggaagatggcagcgatccggacgcactgtacacgattgagcatcacctctctgcagacgatttcgaaaccctggagaaagtggcggttgaagcgttcaagctgggctacgaagtgaccgagcccgaagagctggaagtggaagagggtgacatggtcatctgctgcgatattctgagcgaatgcgcgctgaacgcagacctgatcgatgcccaggtggaacagctgatgacgctggcagaaaaatatgacgtcgagtatgacggttggggcacctattatgaggacccgaacggtgaagacggcgacgacgatgacgaagagtatgtcgatgaagacgacgatggtgttcgccactaagtcgcaaatgtcgtagatggatacggcggcgcctgccgccgtatagcaaggaactttcatggattacccgcagattctttccccgattatcaacttcctgcactgcccgacgccgcaggcgtggattgacgaagcccgcaagccggaaaacctggcgctgctgctgaccgaccacatggtgtgcgagctgaaagcggcgcagaacgccatgctgctggtgcgtcgctacgtcgcggataaagctgacgccgacgaactgttggcctgcctgaagccgtacgaagacttcacctaccgccgggggccggagccggattttgtcaccctgcataaacggatcaacaaaagcgccatgccgcagaccgacgacccgtggggtcgccagctgctggacagcatgattttattgattaaagaggaactgcatcacttctggcaggtgcgggagatgatgctggcgcgcgatatcccctatgtcaaaatcaccgccagcaactatgcccgcggcctgcggcgcgaagtgcgctcgcatgagccggtgatgctgatcgataagctgatctgcggcgcctatatcgaggcccgctcctgcgaacgctttgccgccctggcgccgcggctggacgacgatctgcaaaagttctacctgtcgctgctgcgctccgaggcgcgtcactatcaggactatctggatctggcgcagaagattgccggagaagatatcagcgagcgggtgcgccagctcggcgaggcggaagcggcgctgatcctccgtcccgaggccgagttccgctttcacagcggtgtgccggtagcggcgtaacccacgatattcgggccctgtagccccggtagccactaacaccggcagtttcagtagccatggggagagatagcgttgagagcttcagctcgcaatggtacgggccgtaggtcgggtaaggttagccgccacccgacaaaaaaacggcaccgcgagcacgggtaaggtgccattcgggacatacccggctcgcgctacgcttagccgggctaccgaactgtagccccggtaagcgtagcgctaccggggacgcctgcgatatcgaggcgctacagcgttttcagcatccgtacttcgcagtccacgtggccggtgcagcccagcggcccgtcaatgtgctcgaagccaagatgttcatataagccgatcgcctccgtcaggaaggcggtggtttccagatagcagcgcttaaacccttgttcgcgggcgtagtccagcgccagcagcgccagcttcttcgccagcccctggccgcgggcgctggtcataaaatacattttctgcagttcgcagatatccggctcgctgcaggcgagcggcgcgacgccgccgccgccaaccacttccccctcttgctccaccacccagtaggcggagcccggctggctgtacagctcatacagctcatcgagattcgggtcggcgaccgtatagcctttatcggcggtcaggccatattcagccgagacctggcggatgaccctggcgatggcggcattgtctgccgccgtaatgcgacgcagcaacgtcgccgcggggacgctcgtattcatacaatgactcattacccaaaaaagacgaatgatgatgttaataacatcgcgacaggggaaagcgcaagcgaggatgtttcataaaaaacgccccttgccgggtggcaaggggcgggaggatcacagcgcggcgatcaccgcctgctgttcaatcagcttcgctttcgcttccgcgtagccttccagcttctcgcgctctttagcgatcaccgcttccggcgcgcgggcgacaaagccttcgttggccagcttgctctcgatgcggccaatttcaccttcgattttggccacttctttcgccagacgcgccagctcatcttctttattgatgaggcccgccatcgggatcagcagctcggcgccgtcgacaatcttggtcaccgagaccggacctttatcatcggcaggcagcacggtaatgctttccagacgcgccaggttcagcaggaagctgcggttgtcgttcacacgacgctcggcctctttgctgcagccgcgcagcagcagttccagcggtttgcccggagcgatgttcatttccgcacggatgttacgcacggcgacgatcgcctgcttcagccattcggtgtcggccagcgccgcgtcatccacctgagaagcatcgtactgcgggaacggttgcagcatgatggtgtcggcggtgatcccgcagatcgctttcacgcgctgccagatggtttcggtaatgaacggaatgatcggatgcgccaggcgcagcagaccttccagcacggtgaccagagtatggcgagtcccgcgcagctccgcttcgttgccaccgttcataaccggcttggtcagctccaggtaccagtcgcagaactggttccaggtgaactcatacaggatgccggcggcgatatcgaagcggaagttatccagcgcttcgcgatacgctttcacggtgtggttgaattccgcgatgatccagcggtcggcgagggagagcaccatttcgccgccgttgaaaccgcaatcctgatcttcggtgttcatcagcacgaagcggctggcgttccacagcttattacagaagttacggtaaccttccagacgcttcatatcccagttgatgtcgcggccggtagaggccagcgccgccagggtgaagcgcagggcgtcggtgccgtgcggctcgatgccgttcgggaactgtttctcggtacgcttgcggattttatccgccagctgcggctgcatcatgttgccggtacgtttttccagcagttccggcagggtgataccgtcaaccatatccagcgggtcaatgacgttacccttggacttggacatcttctggccttcgtcatcgcggatcagaccggtcatgtagacggtcttaaacggtacctgcggcttgccgttttcatctttgatgaagtgcatggtcatcatgatcatgcgggcgatccagaagaagatgatgtcgaagccggacaccatcacgctggtcgggtggaactgacgcagggcatcggtgttttccggccagccgagggtggagaaggtccacagcgcggaggagaaccaggtatcgagaacgtcttcatcctgacgcagggcaacgtcggcgctcaggttgttttcctgacgcacttcgtcttcgctacggcctacgtagacgttgccgtcgttgtcataccatgccgggatgcggtgaccccaccacagctgacgggagatacaccagtcctgaatatcgcgcatccaggagaagtacatgttttcgtactgcttcggtacgaactggatgtcgccgttttcaacggcttcgactgctggcttggccagcacgtccgcgcgcacgtaccactggtcggtcagcatcggctcgatcaccacgccgccgcgatcgccgtaagggacggtcaggtcgtgcggtttgatctcttccagcaggccgagggcgtcaaccgccgcaacaacggctttacgcgccgcgaagcgttccagtttctggaactccgccgggatctcgctggagtagacgtcggattcattgcctttggtgtcgtagacttccgcgctttcgcggatgtcgccgtcaaaggtgaggatgttgatcatcggcagctggtgacgacgacccacttcgtagtcgttaaagtcgtgcgccggggtgatcttcacgcagccggtgcctttttccatgtcggcgtgttcgtcgcccacgatcgggatgcggcggttaaccagcggcagcaccacgaatttgccaatcagatctttgtagcgcggatcttccgggttaacggccacgccggtatcgcccaagagggtttccggacgggtggtggcgaccaccaggtaatctttaccgtcagcggttttcgcgccatcggccagcgggtagcggatgtgccacatggaacctttcgattcgcggttttccacttcgaggtcggaaatggcggtgcgcagtttcgggtcccagttaaccaggcgtttgccgcggtagatcaggtcttctttgtacaggcgaacaaagacttctttcacggcattggaaagcccctcgtccatggtgaagcgctcgcgctcccagtccacggagttgccgagacggcgcatctgacgggtaatggtgccgccggattccgctttccactgccagattttgtcgataaaggcgtcgcggccgtagtcgtggcgggttttcccttcttcagcggcaatcttacgctcaaccaccatctgggtagcgatacctgcgtggtcggtaccggcctgccacagggtgtttttgccctgcatgcgctggtagcgaatcatggtatccatgatggtttgctggaaggcatgacccatatgcaaactgccggtgacgttcggcggcgggatcatgatgcagaagctctcctggctttcatcaccattcggtttgaaatagccctgcttttcccagtgctcgtaaagcggctgttcgatatcttgtgggttgtatgtcttttccattatttccaggttgccgtgttcaggttgaaaccagccatgcggtacgccttatagcgttcgcgcgccagttgtttcagattgtcttcgtaagggacaaagtctatcacttctgtgaaagcggtggcaaaatctgcaaagtttagccgcaggctgataagaatatcccgcgggctgctgttgcgcttttgcggccaggcaatctctaccggcgcgccgcctctcgggccttcgcccgccaggttatgcggcacaaagctttccggcggccgcgaccacagcgcctcgtcgaggcgaatcgcctgctgttcatcttcgcaggcgatcaggacgcgcttgccgttgcgccaacgttctgcggcaatgtcacacaccagctgctcgacggcgctcaggccgtcgacggtggcgtcattgtccagaagatagaacgttgcgtttttcatatatggggcttcttgttgtggatttaaatgcaaagccgggcggcgctacgcttacccggcctacagtgtgctgccgtttgtaggccgggtaaggcatcgccgccacccggcatgtcacatcactcttcgccgttaaaacccgcacgattgagcaggaactgcgacagcagcgccaccggacgaccggtcgcgcctttggccttaccggaacgccaggcagtaccggcgatgtcgaggtgcgcccagttgtacttgcgggtgaagcgcgacaggaaacagccggcggtgatcgcgccgccaggacggccgccaatgttcgccatatcggcaaaattggactccagctgatcctggaactcgtcggccagcggcaaacgccatgcgcggtcgcccgccagttcggaggcgccgatcagctcatgggccagcgggttatggttcgacatcaggccggtaatgtgatggccgagggcaatcacgcaggccccggtcagcgtcgccacgtcgataaccgcttccggctcgaagcgctcaacgtaggtcagaacgtcgcacagcaccaggcggccttcggcgtcggtgttcagcacttccaccgtctggccggacatagtggtcaggacgtcacccggacgataggcgcggccgccaggcatgttttcacagcccgccagcacgccgatgacgttcagcggcagctgcagttcggcaaccatccgcatcacgccgtacaccgccgccgcgccgcacatgtcgtacttcatttcgtccatgccttcggcaggcttgatggagataccgccggagtcgaaggtcaggcctttaccgaccagcacgatagggcgcgcgtcctcagccgggttgcctttatattcgatgaccgacatcagcgactcgttctgcgacccattgccgacggcgaggtaggcgttcatccccagctcgcgcatctgctgttcgccgatcacccgggtgatgacgtttttgctgtaggtatcggccagctgacgcgcctgggaagccagataggcggcgttacagatgttcggcggcatattgccaagatctttcgccgctttgatgccggcggcaatcgccaggccatgctgaatggcgcgttcgccgctggtcagctcgcgacgggtcggcacgttaaagaccattttacgcagcgggcgacgcggctcgcttttgttggtcttcagctggtcgaagctgtacagcgtctctttggcggtttcaaccgcctggcgaactttccagtagttgttacggcctttgacgtgcagctcggtcaggaagcagacggcttccattgagccggtatcattcagggtattgatggttttctggatgacctgcttatactgacgctcatccagctcgcgctctttgccgcagccaatcagcagaatgcgctcagacagaatgtttggcacatggtgcagcaataacgtctggccaggtttgccttccagctcgccgcgacgcagcagggcgctgatgtagccgtcgctgattttatcgagttgttcggcgatgggggagaggcgacgtggttcaaagacgccgaccacgatacaggcgctccgctgcttctccgggctaccgctttttacactgaactccatgcactatgctcctgaatcttaaagacaacagtggtggctacggctatactcgtcgcctttcaagttgcagatgcgccggctgcgcctgcttaccctgacgtggcacattgtgcgcgccaggggccacagccctgctgccttcttacaactcgaaatccattgagtatataattgcaagctttcgtaactcatatccgctgttgcggtgacttcgtgttaatcttaacgttattaaggcctgggttcgtcagaaaagatcctgacatgcagaaccgatgagtcatttaatcttagcgacgttttcgacgaccaaagagaataaatgacgtttaagccatgaaacaagcaattttcctgcactaaaacgggtttttacgggcgtatttatagtgataatcataagatatctggttcgtgagacgctgaaaagccagttggcgatcctattcatcctgttactgattttcttttgtcagaaattagtcaggatcctcggcgccgcggtggatggcgatatcccaaccaatctggtgctctcgctgttggggctcggcatcccggagatggcgcagcttatcctgccgttaagtctgttccttggcctgctgatgaccctcggcaagttgtacaccgaaagtgaaattacggtgatgcacgcctgcggcctgagcaaagccgtgctgatcaaggcggcgatgatcctcgcgctgttcaccggcgcggtggcggcggtgaacgttatgtgggcggggccgtggtcgtcgcgccatcaggacgaagtgctggccgaagctaaagctaaccccggtatggcggcgctggcccagggccagttccagcaggccagcgatggtaacgcggtgatgtttatcgaaagcgtcaacggcaaccgtttccatgacgtcttccttgcccagctgcgtccgaaaggcaatgcgcgcccctcggtggtggtggcggattccggcgagctgtcgcagcagaaagacggctcgcaggtggtgaccctcaacaagggcacccgctttgaaggcaccgcgatgctgcgcgacttccgcattaccgacttcaataactatcaggctattatcggccaccaggcggtgagcgccgatccggacgacaccgaacagatggatatgcgcaccttgtggaaaacccacaccgaccgcgcgcgcgccgaactgcactggcgcttcacgctggtggcgaccgtcttcattatggcgctgatggtggtgccgctcagcgtggtgaacccgcgtcagggccgcgtgctgtcgatgctgccggcgatgctgctttacctggtgttcttcctgctgcaaacgtcgattaagtcgaacggcggcaaaggcaaaatggacccggctatctggatgtgggcgattaacctgctctattttgcgctggcggtgctgttaaacctgtgggacacggtgccgatgcgccgcttccgcgcccgttttaataaaggagcggcctgatgcaggcgtttggcgtacttgaccgttatatcggtaagacgattttcaacaccatcatgatgaccctgttcatgctggtgtcgctctccggcattatcaagtttgtcgatcagctgaaaaagtccgggcagggcagctacgatgcgctgggcgctggtctctacaccatcctcagcgtgccgaaggacatccagatcttcttcccaatggcggcgctgcttggcgcgctgctggggctggggatgctggcccagcgcagcgaactggtggtgatgcaggcatccggtttcacccggctgcaggtagcgctggcggtaatgaaaaccgcgatcccgctggtgctgctgaccatggccatcggcgagtgggtggccccgcagggcgaacagatggcgcgcaactaccgtgcccagcagatgtacggcggctcgctgctctcaacccagcaggggctgtgggcgaaagatggccacaattttgtctatatcgaacgcgtaaaaggcaacgatgagctgggaggcgtcagcatctatgccttcaacccggagcgtcgtttacagtcggtgcgctatgccgcttcggcaaaattcgatagcgaaaataaagtgtggcgtctgtcgcaggtggatgaatccgacctgaccgatccaaagcaggtgaccgggtcgcagatggtgagcggcacctggaaaaccaacctgacgccggacaaactgggcgtggttgccctggatccggatgcgctgtcgatcagcgggctgcacaactatgtgaaatacctgaagtccagcggccaggatccgggacgctaccagctcaatatgtggagcaaaatcttccagccgctgtcggtggcggtgatgatgctgatggcgctgtcgtttatctttggcccgctgcgtagcgtgccgatgggcgtccgggtggtgacggggattagcttcggctttatcttctatgtcctcgaccagattttcggcccgctgaccctggtctacggcataccgccgatcatcggcgcgctgttgccgagcgccagcttcttcctgataagcctctggctgatgatgcgcaaggcctagcgggtaagcctgaaacgtaagccccctcagcgatgagggggcttttttttagcgcttgcgtccgcccagcaggctgcccagcatgccgcggacgatctgattggtgacctggcgaaccgcgcttttcgctgcggtctgcacgataccgtcgcgtttaccgccccgcgggccggtgctgccgaacaggatatctttcaggccgccaagcagcccgtcgtcatcgccgttctgctggcccttcgccggcggagccgactgctgcccggtggcgacctgcaccccttgctgcagcatttcgaaagccgactcgcggtccacctcctcctcatacttaccgtacagcggcgagtggttcagcagaccattgcgctcgtcatcgctgaccggccccattcgcgaacagggggcgataaccatcgcccgctcgaccaccgacgggctgcctttctcatcgaggaaggagatcagcgcctcgccggtgcccagctcctggatcgcctgctcggtactgaaggccgggttggcgcgcatggtctgggcggcggttttcaccgccttctggtccttcggcgtaaaggcgcgcagggcatgctgcacgcggttgcccagctggccgagcacggcgtcgggaatatccgccgggttctgcgagacaaagtagacgccgacgcccttggagcggataaggcggatcacctgttcaattttatccagcagcacctgcggcgcgtcgttgaacagcagatgcgcctcatcgaagaagaacaccagcttcggtttatcgaggtcgccggcttccggcaggcgctcgtagagctcggagagcatccacagcaggctggcggcgtacagcttcggcatctggtagagcttttcggcgctaaggatattgatcacccctttaccgctggcatcgacgcgcatccagtcggcaatatccagcatcggctcgccgaagaagtgctcggcgccctgttgctccagggtcaacagcccgcgctggatggcgccgatcgaggcgctgttaatattgccgtactggttctggaaagacttggcgttatcgccgataaactgggtgatggcgcggaggtctttgaagtcgagcagcagcaggccgcggtcgtccgcgatgcggaaaataatgttcagtacgccgctctgcacctcgttgagattgagcaggcgcgccagcagcagggggccgagatcggagaccgtcgcccgcaccgggtggcccttctcgccaaagatatcccagagcaccaccgggttggcgtgcggctcccagtcgctgacgccgatcttctccagccgcgcctgcagtttctctgagctctgccccgcggcggcaatgccggtcaggtcgcccttgacgtcggccataaataccggcacgccaatctccgagaacgactcagccagcttctgcagggtgacggttttaccggtgccggtcgcaccggtgataagcccatggcggttggccatcgcgggcagtaaatagagcgcgttatccagcgtgcgcgcaatcaacaggggtgagctcatggtcgattcctccatttatcctgcgacgattataggcaacctcgtcgtccggcgttgggaaaatcgtcacgcgccgcgcacgctgtaccgtgagggtctcaggcgcagtggcgctggatgagcgcgatgctctgctcaatttcgcgctcgatatccgcttcgctccattgcgccagctcgggggcgaagggctcaaaagcgtacaccccctgatagccgcgggcttccagcgctttaacctgctcgcaggtgccgagacgatcctgcggggttagcatgatgcgctcggcatcggtgagctgctcgcgcggacggctatcgtccactcctgaaaggtgcaccagcccgatatccgccacctctacctggctgaactcgtccgccgcctgcgggtaaagatggtgatggaaggtgtcgatcagcagcttaaacggcacgcgggcgtcgtggatcagcgtctgcgcctggtgcgcagaacgcagcgagctttgcgggaagcccagcggctccaccaggccgtggatgccatagaaggcgaacagcggcgccaggtcgcgcagggcgcccagggtttcgctggccggcacctcgctgccgtcgttgagcggacagagcaccagcgatttggcgccgatggcctgggcctctttcagcagcgattcggtcaactgccgcacctcttcgctacgacggttaaaggggtagaccgcgttaatcgtcaggatctcgatgtggtagcgcgccgccagctcgcgcacctgctgatggctcagatcgtcggtcacttttccgctgggtaaatcgttgcgcagctcgaccttattcaggcccagacggttcaccagacggaaaaacgcttcaatgctgagcgctggcgcgattttgcggttaatacaaaaacgttgcattgcgatggccataggacactcctgacggaagagggggtaggttcgttcaattggctaacagtcaaaacgtttattccaaaattagcaagaatggaaatgatgaatgtttgagctgtctcgcaaaatatcaccggcaccgactaccggcgcgacagcggcgggaagcctggcgtcgagggcaacgaggcgcgatgcgggaagcgcacaggcgaccggttagcgcaaaatgcgactgttatcaccaaaatgaaatttcatttcacaacaatgttgaaatataaatttcattttactacggttatagcacagcagaatcagcgacgggccggtgtgcgctggcccccttcactatgaggcgagaacatgacgatcacaggaaactttattggcgggaaaaccgttattagcagcagcaacgaaacgatgccggtgtacgacccggcgacgggcaaagcggtgcgcgaagtcacggtgtcaaccgcgcaggaagtctccgaggcgattcaggttgctcgcgatgcgtttgacagctggtcccgtaccacgccgctgcgccgcgcccgcgtgctgttcaacttcaaaatgttgctggagcagcacgtggaagagctggcggggatcatcgtcagcgagcacggtaaggtgtggtcggatgcgctgggcgagctgacccgcggtatggaagtggtcgaattcgcctgcgggatcccgcacctgattaaaggcgaatactcctctgacgtcggcaccggcgtcgacagctactcgttgatgcagcccctgggcgtggtggcagggatcaccccgtttaacttcccggcgatggtgccgatgtggatgttcccgctggcgctggcctgcggcaacagtttcgtcctcaagccgcccgcgctggcgccgacggccgccgtgcgtctggcagagctgctgaaagaggccggtctgccggacggcgtgtttaacgtcgtgcactgcagcaatgaagatgctgagcagctgtacactgatccgcgtattgcggcggtgagcttcgtcggctcctccggcgtggcggagtatatctataagaccgccagcgcccacggcaagcgcgtgcaggccttcggcgccgccaaaaaccacgcgattgtgatgccggatgccgatctcgacgctaccgttaacgccattatgggcggcgcttttggctccgcaggcgagcgctgcatggcgctgccggtggtggtggcggtgggagatgaaaccgccgacaaactgatcgcccgcctgaagccgctggtggaagcgctgaaagtaggtccgggctgcatgcgtggccaggaagagaacgagatgggaccggtggtgtctgatacccatcagaaaaaagtgctcggctatattgataaaggcgaaagcgaaggggcaaaactggtggtcgatggccgcaaactgcgcgtgccgggttacgacgcgggctactatgtcggcggcaccctgttcgatcacgtcaccccggagatgaccatctggcgcgaagagatctttggcccggtgctggggattgtgcgcgcggcggactatgacagcgcccttgagctggtcaacagccacgagtttggcaacggcagcgccgttttcaccagcaacggccacaccgcgcgtgaattcgtccacgacgtgcaggcggggatggtcggggtgaacgtgccggtcccggtgccgatggcgttccacagcttcggcggctggaagcgctcggtgtttggcgcgttgaacgtccacgggccggacggcgtgcgcttctacacgcgtatgaagaccgccaccgtacgctggccggcagggcagcagaccgtatctgaattcagcatgccgacgttaggttaatcggcgaaggagagcgccatgtcgttactggctaaatcgcgaaaagagggacagatccagcatattacgccgcaaagcgccggttggcgctatatcggctttgatgtctggatgttgaaaaaagggcagaccgtgacgctggagagcggcgatcgcgagctgtgcctggtgctggtcgccgggctggcgtcggtgaaaacgcagcatgccgatttcccgaatctcggtaaacggatgtcgccgtttgaacgcaccccgccgtggtcggtctacgtcccgccgcaggataaagtcgaggtgactgccgattccgatctggagctggcagtatgcagcgcgccgggcaaaggcagcttcccggcacgcctcattcggccggaagacgtcggcgtagagcaccgtgggaaagggcgcaatcagcgccgggtgcataatattctgccggacagcgccgaggcggactgcctgctggtggtggaagtctacaccgacgagggggccaccagctcgtggccgtcgcataagcatgataccgcccagccgggcaaagagacgcagctggaagaaacctactatcaccgcttcgatccgccgcagggctttgccttccagcgggtctacaccgacgaccgcagcctggacgcctgtatggcgccctacaaccacgatgtggtgatggtgccgcgcggttaccatccggtggcagcgattgccggttacgatagctactatctgaacgtgatggccgggccggaccggaaatggctcttcacctgggaagatgaccacgcctggatcaacacgccggagtacccgcgccacgactgacgcgaggtgcagaagcggataaagaaggccggttagcgatgctaaccggccttcctgtttgagggcggcgggtgttttttcgcgaaacgctccgcggaatcccactcccgacccggcaagcgcagcgccgcaggggaggatacctccggcgccatacccgcctttgtgccggatggcgctacgcttatccggcctacggcctcctcccgtaagctcctataccccaggcccggtgctgcttttatgccgggcggcggctcacgccttgcccggcatacggttcgtgcgacctgccgttaatttattcaccattgttgctgaaactgccggtgctgacggcctcaaaatcgctgagacgttcccggaaggccggggcagcccgcatggatgcgggctgagggccgtgttttgcacggacgctgcctcggcccgacccgaagcctgcagggataagtcgaaggga

SEQ ID NO: 130 - DNA, 289697 bp, Unknown
  source: /note="Description of Unknown: MKP2_2161_1 Mutant Bacteria sequence"
ggcataaacgtcgacgcccagggcgacagccagccgctggcggcgcgggagcagccatgaagcgtgaagccggaatgacgcttatcgaagtgatggtcgcgctggtgattttcgccctcgctggcctggcggtgatgcagtccaccctgcagcagacgcgccagctcgggcgtatggaagagaaaatcctcgccagctggctggcggataaccagctggtgcagctgcggctggagaaacgctggcctgccctcagctggtctgaaaccaccgtggaggccgccgggacgcgctggtttgtccgctggcagggagtggaaaccgcgctgccgcagctgcgggcgctggacgtggaggtccggcggcaaaaaagcgatcccgcgccgctggccaccctgcgcacctgggtgacgccgccatgataacgaaaatgcgcggtttcactctgatcgaaacgctgctggcgctggctattctcgccgtcctcagcgccgccgccgtgatggtgctgcagaacgtcatccgcgccgatggcctgacccgcgagaaaagccagcagatcgcggccctccagcgcgcctttcgccagatcgccgacgatgtcacccacatcattccccgtcgcgccagaaacagcgacacgtttttcttcgccggacgtttccagttgcagagcgacgactggggactggccttcagccgcagcggctggccaaacccgctggggatcctcccgcgctcggagatccagaacgtcagctaccgtctgcgccagcagcggcttgagcgtctgagcttcgatcagcaggatccgctgaccggcagccagccgacggtccgggtgctgctgcgcgaggtaaccgcgtttcgcctgcggttttacgccgacgggcgctggcaggaaacctgggaccgcccgcagacgctgccccaggggctggagatcaccctgacgctggcgaacagcggggagataacccgcctgtttttactcaccccgggaggcggccagtgataaatcggcaacgcggcgtcgcgctcctgatggtgctgttcatcctcgccctaatgatgatcctcgccagcgccatgaccgagcgcaccgcggtcatgtatcaacataccgccgtgaccctcgataatttgcaggccagatggtacgccctggcggcggaaaatatggccgccgcgctgctgcaacgcgatgcgctggactcgcccagtcaaacgaatctggcgcaaacctgggcgcaggaggggcgccgctttaccctcgacgatggcgaaatccgcgccacgatccgcgacgggcacgcctgcttcaacctcaatgctattgaccatcgcgcggatgaggctggcgacggaacgccctacccgaccgacgtcttcgttcggctgctggcgctgctcggcgagccgccgctgcgcgccagccagatcgccgccgcccttggcgactggacggacagcgacggccagccgcggctgaacggggcggaggacgaggtctatatggcgcaaaccccgggctatctcgccgccaaccagccgatgcaggatgtcagcgagttgcgcctgctggccgggatggacgccgcgctctatcagcgcctgctccccttcgtctgcgtccagccggatgacgcgctgcaggtcaatgtcaacaccctgcgcccctcccaggccgccctgctggtggccctctttcccggcgatctgacgctgcaggaggcgcaacagctgctgcacaaccgcccgcgaaccgggtggagcagcgtcgccgcctttctcgcgcagccgacgctgcagaaaaccgataccacgcttgcccgtccctggctgacggtgcacagcgcacgctttatcgccgcttttaccgtggtgactggcaatctccgctttcagctgcacagcgtcctgcaacaatcggggcgcacgtttaccgtcgtccagcggcgatatggactctctatggtggtcgatgaacaagattaatgcttctccccaggccatgctgatcgtgcgcctcgccgccgcgcaggcgccgctgcactggcaactcttcgcccccggcgagccgcaccacgaggccagcggccggtggccgactgacgacgccagccctttcccggcgctggctgagcagtacccggcctgggtgctgatcccggccagcgactgcgcgtttcactcgctcaccctaccggcgggcctgcgtaagccgccgctgcaggtggccccgtttctgctggaagagcagctggcagacgatgtggaagccacccattttgctctgctccaccgccagcaggcccagtgcgagatcgtcgccgtacagcggcaaaaaatgcgcgactggctggcgcgctgcgaatcgctctccttacagcccctggcgttgacgcccgacgtgctggccctgccctggcaaccgccggcgtggagcgcggtgcaggtggacgagcagtggctgatccgccaccagccgtggggcggcatggcggcggaaaacgtctggctgacggagctgctgcagagcgaggcggaagagcacgtcatcgacagctattcgccgccgcccgcggcgccgggcgtttggcgggagcagcctgcgcagacattgctgacacttgccgcacgccatccggcagcgcagaaactcagtctgctgcagggggagttcgccgaccggcggcggtctgcgcaggcgagctggcgtccggcgcggtatgccgcgctggccctggcgttactggcaggggcaaacagcgtgctggaccatcgcgatctggcgcgtcaggccgaggcggcgcaacaggccagccgggccttctatcaccgctggtttccgacggagaaaaaggtgattaacccacgactgcagatgcagcagcacctgcaaaccctcacccgtcaggcgcagcatgcccccctcgtcgaccgcctcagcgccttgcaaaacatcctcagcgaaacgccggggatccgtctgcgagcgctgagctgggatgccgcgggcaatcgtctgcagctggatatcgccgcggtctcttcccgggcgctggagcagtttacccagcgggcgcagccgcggtttcgcgtccggccgggcgacatgatcacgaaaccggatggcattgagggacaactgacgctggaggaaaacgatggctaatctgcttatctggtggcggcagcgcacgccgtcggagcagcgcctgttgcttggtctgacagggctgctggcggcatgcgccttctggtatgggctgtggcagccctggcgagcccgcgaggcgcagtggcggcaaaccctggtgaaagagcaggccagcctgcgctggatgacggagcaggctccgcgcctgcagcagctcagccagcagcccgcgccggcggcaaaagaggcgctcaccgcgctggtgatgcgcgaggcggcgagccacggactgacggtcatccgcctgcagccgcagggaaaacgtctgcagatcacccttcagccctgcgctttccaggcgctgatcgactggctggacgctccggcgatgcgcggcgtcaacgcgatctcgctgtccgtgaccgggcagccgtcgcgacccggctgggtcacggtcaaccatctgctgctggagcgcgacgatgaaggctaactggatcgcgggcggactgctgctggtcctctatctgttgtggctcaccgccacggctccggcgcgcctgctggcccccatgctgccgcccggcgtacaggtggggcagtttagcggcagcgtctggcgcggcgcggcgcaaccggtctactggcatggggaacggcttgaacgactggcgtggtcgctgaccctggcgggctggcaggtctctctcagcgatccccgcggcgtgatgggtcaggcccggctgtggggccttcgcgatctgcgcctacaggaggggcggctcaccgcccccgccagcctgctcagccgctggttgatgtcgactatgcccgtcaaggccgcgggggaggtcaccttcagcctgaccgaagggcggttcagcgacggacgctgccggcatatcatcgccggaggcgcgcagtggcggcaggcccgactgcactccccggtcggcagcctggagctggcccaggttaatggcaccttccgctgtacggtggacggcgccgtggcgctgactctccgtcaggactctcgtcagctgagcctcagcggccaggggactctgtcgcccgatggccgctatctgtttcgcggcacgctacagccccggcaggggatgccgccgctgctggcgctgctggtcacgcgcccgacagcgaataacgccccgggcccgacgccgtggcagctgcagggaaaatggttaccccaggagcaaaaatgacgacactagccgcgttatcgctgcactttccctttgtctggtatggctttctactgctgttcggcctggcgctgggcagcttttacaatgtggtgatctatcgtctgccgcgcatgttgacccagaccgcggacgacgagcggataaccctcagcaccccgggctcttcctgcccgcagtgccgccagccgatcgcctggcgggacaatatcccgctgctcagtttcctctggctgggccgtcgcgcccgctgctgtcaggcgcccatcgcgtggagctatccgctgaccgagctggccaccggcctgctgtttatcctcgccggagcgttgctggcgccgggcctgccgctggcgggcggcctggtgctgctctcgttcccgctgatactggcgcggattgacgcccggacccagctgctgcccgatcgcctgcctctgcccctgctgtgggccgggctgctgttcaatcttaacgaggtgtacattgccctgccggatgcggtcgccggggcgatggccggttatctggcgctgtggtcggtctactggctgttccgcctgctgaccgggaaagaggcgctgggctatggcgattttaagctgctggcggcgctgggcgcctggtgcggctggcaggttctgccgcaggtgctgttgctcgcttcggccagcgggctggtgtggaccctactgcaacgcctgtggacccggcagtcgctgcagcagccgctggccttcggcccctggctggcgctggccggcgggggtatttttctctggcagcagatgatctagcgtttgcgaaccgactggccgggcaggatgccgcccggcagcggcggctacgagtattttttgctgcggcgggtcggggcggcgttggccggatcgtccggccagacgtgcttcggatagcgtcccttcatctctttctgcacctcgcggtagctcccttgccagaaggcgctcagatcgcgggtgatctgcagcggacgctgggcaggcgacagaagctccagcaccagcggcacccgtccctcggcgatcaccggcgtcgtggcctcgccgaacatctcctgcatacgcaccgccagcgctggcgggttctccgcatggtatcggatcgccaggcggctgccggtcggcacggtatagtgcgtcggcagctcgcgatccagcttctggcgcagcggccatggcagccagtcctgtagcgcctgacgcagatccagcgccttcagcgcccgcagggaatgaacgccgttcatctgcggcagcagccatgcctccagcgaggccagcagcgaagcgtcatccactgcgggccatgcctcttccggcagccactgcgccgcacagtacagccgcaggcgcagctgctcagcctctggcgtccagttgagcaccccgaggcctttctcacgaataccgttgagcatcgcctgatgcagctctgcctcagagggcttcgccagcggctgggtcttgatcaccaactggccgatcaccgtccgccgccaggctttcagcgtaccctgcgcttcatcccactccaccgtgtcggaacttttcgccagttcagggcgggcggcgatcagctcgccgatttccactggcagagccaacagcatgcgggcatccggcgaagcgctgccctgcagcagcagcggagcgataagccattcatgacggcccagcgcgtcgtcggcgtccagcatcgcgcccatgccgttcgccagctggtagcgcccctcctgaccgcggcggcgggcgatgcgatcggcgaaggccgacgccagcagccccgccattagcccggcatcgggctggccgccgcggcgggccaggcgcttcatcagctgctgcgatcgctgctgccagttggcctgctgacgggaaaagacggcccccaaatccaccagtccgccgcgcggcggctcctcgaggatcgccgccagctttgccgctgtcgccgcctcgtcatcggtctgcgcggtggccagcatcgccgccagccgcggctcgttgccaagcgctgccattttgcggccaaacgccgacagccgctcgccgtccagcgccgacagcgcctccagcaggcggcgcgcggcggccagattgaccgcgggcggctgatccagccaggccagcgcggccggatcgtggcagccccactgcagcagctccagcaacagcgccgacagatcgctgtgcaggatctccggctcgctctgcgccgccgcccgttccgcctgttctttgccgagcaaatgcaggcagatccccggggagagacgaccggcgcgtccggcacgctgcgtcattgatgcctggctgatgcgctgcgtcaccagccgggtcaggccggtgcgcgggtcaaagcgggcgacccgctcctgggcgctgtcgaccaccaggcggatcccctcgatggtcaaactggtctcggcaatattggtggccagcaccactttgcgcttcccggccggcgccgggaggatcgctttgcgctgttcgcttaagggcaacgcgccatacagcgggcagagaatgacatcctccgccacgcgctccgtcagctgttccagaacgcgctggatctcgccgacgccgggcagaaacagcagcatcgatccctgttcatgccgcaggagctccgccgccgctaccgccacagcctcatcaaaacgctggtgcgcggagagcgggctgaagcgacgctccaccggataagcgcgcccctccgagaccaccaccggcgcctccggcagcagacgctgcaggcgatcgttatcgagggtcgccgacatgatcagcagcttgagatcgtcacgtaacccctgctggacgtcgagcagcagggccagggccagatccgcctgcaggctgcgctcgtgaaactcatcgaggatcaccagccccacgcccgtcagctccggatcgcgctggatcatgcgcgtcaggatcccctccgtaaccacctccaggcgggtctgcggtccgacgcaggtttcggcgcgcatgcggaaacccacggtctcccccggcttttcgccaagcagttcagccagccgctgcgcgacattacgcgccgccaggcgcctcggctcgagcaggataatgcgtcccgcgatgttgccctcggcgaggatctgcagcggcagccaggtcgacttcccggcgccggtcggcgcgttgagcaaaacctgcggcgcatgctgcagggcggataacagttctggaaggacagcggcaaccggcaatgaggacacaaaaggctccgggggttaacattcaggggttcgcattgtagcatccccctaattcattaccgagtctctatcatgtctgagccgaaaaggctgttttttgcgcttgaactgccgtctgccgtccagaagcagattgtccagtggcgggcaacgcacttccccgaagatgccggcaggcccgtcgcggcggataatcttcatctgacgctggcgtttctcggcgaggtgagcgcggaaaaacagcgggcgctggccgctctcgctggtcgcctgcgccagccgggctttaccctgacgctggacgatgccggacagtggctacgttcgcgagtggtgtggctcggaacccgccagccgccgcgcggcctgctgcagctcgccagcatgttgcgcgctcaggcggcgcgcagcggctgctatcagagcccgcagccgtttcacccgcatattaccctgtggcgcgatgctcgccaggcggtgccgatcccggcccccggctttcgctggacatttccggtgaacgagttcgtgctctatgagtccagctttagccgggggcgcacgcgctacacggcgctggaacgttatccgtttgataaggaaagttgatgcagtttgatccgccgttgcagcccgccattttgcttaaacgttacaaacgatttcttgctgacgtggtcacccccgatggccgcgagctgacgctccactgcccgaataccggggcgatgaccggctgcgccgccccgggcgacaccgtctggtattccacctcagacaatgcgaagcgcaaatatgcccacacctgggaattaactgaaacccagcagggcgcagttatttgcgtcaatacgctgcgcgcgaattctttggcgaaagaggcgatttccgccggaataattcctgaactttcaggctataaccagctgaaaagcgaagtgaaatatggcgaagagaatagccgtatcgatattatgttacaggcagatgaccgacaaaactgctatattgaagtgaaatcggttacgttggcggagaaagaatacggttattttcccgatgcggtgaccacgcgcggtcagaagcacctgcgggaactgatggccgtcgcggcaaatggcgaccgcgcggtgattttatttgccgtcctgcattcggcaattgaccgtttttctcccgcgcatcatattgatgccagatacgcacagctgttaacagaagcccaggacaagggggtggaaattctcgcctggaaagcggaactttctacgacgaggatgactctgaataagccgatcgccgtggtgttaaaccccggtaaataagtggctaaatagtgttcgggtcgcaagcgcgaatacgcttttcttcacagggttgtcaagtgtaacgtttagataattgctatccggaaaagcatctgctatttatagcggcctgattttcccccacatggggatcgatagtgcgtgttaaggagaagcaacatgcaagaagggcaaaaccgtaaaacatcgtccctgagtattctcgccatcgctggggtggagccgtaccaagagaaaccgggcgaagagtatatgaacgaagcccagctggcgcacttcaagcgtattcttgaagcatggcgtaatcaactcagggatgaagtggatcgcaccgtatcgcacatgcaggatgaagcagctaacttcccggacccggtagaccgtgccgcccaggaagaagagttcagcctggaactgcgtaaccgcgaccgcgaacgtaaactgatcaaaaagatcgagaaaacgctgaaaaaagttgaagacgaagacttcggctactgcgaatcctgcggcgtggagatcggcattcgccgtctggaagcgcgtccgacagcggatctgtgcattgactgcaaaaccctggcggaaattcgcgaaaaacagatggcgggctaatcccctgctgcctcactctctggcgggagtctctcccgcctggttctgttgtccgtaccatgactgactcacgctatatagggcgcttcgccccctccccctccggcgaactccacttcggctctctgatcgccgcgctcggcagctacctgcaagcccgcgcgaaccagggcatctggcgtgttcgtattgaagatatcgacccgccgcgcgaagtccccggtgccgccgataccatcctgcgccagcttgaccactacggtctgcactgggatggcgacgtgctgtggcagtcgcaacggcacgaagcctaccgcgaggcgctgacgtggctgggcgagcaagggctgagctattactgcacttgcacccgcgcgcggatccacgccgtgggcgggatctacgacggccactgccgcgacctcgggctgggggcggaaaacgccgcgctgcgcctgcgccaaacccgtccggtactgcagtttagcgaccgtctgcgcggcacgctcatcgccaatgagccgctggcgcgagaggattttattatccaccgtcgcgacgggctgttcgcctacaacctggcggtggtggtcgacgaccactttcaggggatcaccgagattgtccgcggcgcagacctgattgagccgacggtgcggcagatttcgctgtatcagcattttggctggcaggcgccggattacctccatctgccgctggctctcaatggcgacggcaataaactctctaaacaaaaccacgcgccggcgctgccggaaggcgatccgcgccccgaaatcgtccgggcgctccgctttctgaatcaggcgatccccgaggagtggcaggccctgagcatcgatgatttactcgcccaggccgtcgccaactggcagccggcgaaaatcgagcattctcaaatggctcccgctgagctatgattagccgctatttttacactgtacagttgatctgaagtccgtctgacactacgaggtgcaccatttttacccgagtcgctaatttttgccgtaaggtgctaagccgtgaggagcgcgaggcagaagccgccgtcgaaccaacgcctatgacggtgatcccgcgtgagcagcatgctatttcccgcaaagatatcagtgaaaacgccctcaaggtcatgtaccgcctcaacaaggcgggctacgaatcctggctggtcggcggcggcgtccgcgacctgctgcttggcaaaaagccaaaagattttgacgttaccaccaacgccacgccggatcaggtacgcaagctgttccgcaactgccgtctggttgggcgacgtttccgcctggcacatgtgatgttcgggccggaaatcattgaggtcgccaccttccgtggccatcacgaagggcataccaccgatcgcgtcacctcccagcggggccagaacggcatgctgctgcgcgacaacatcttcggctcgatcgaggaggatgcccagcgtcgcgacttcactatcaacagcctctattacagcgtggcggactttaccgttcgcgactacgtcggcggcatgaaggatctccaggacggcgtgatccgtctgatcggcaacccggaaacccgctatcgcgaggatccagtgcgcatgctgcgcgcggtgcgctttgccgccaagctcaatatgaccatcagcccggaaacggctgaaccgctgccgcgcctggccgccctgctccacgatgtgccgccagcgcgtctgttcgaagaagtgctcaagctgctgcaggccgggtatggctaccagacctacatgctgctgcgggaatacagcctgttccagccgctgttcccgaccatcacccgctactttaccgagcgcggcgacagcccgatggagcggatcatcagccaggtgctgaagaataccgatacccgcattcataacgatatgcgcgtcaatccggccttcctcttcgcggtgatgttttggtatccgctgctggagacggcgcaaaaaatcgctcaggagagcggcctggcgtactacgacgccttcgccctggcgatgaacgatgtgctggacgaagcctgccgtacgctggcgatccctaagcgcatcaccacccttattcgtgatatctggcagctgcagctgcgcatgtcccgtcgtcagggcaaacgcgcctggaagctgatggagcatccgaaattccgcgccgcctaggacctgctggagctacgcgccggcgccgagaacaaccacgaactgcagcgcctgaccaaatggtggggcgaattccaggtcgccgcgccgccggcgcaaaaagatatgctcaacgacctcggggacgatccggcgccgcgccgtcgtcaccgtcgtccgcgcaagcgcgcgccgcgccagggtagcgcatgactctggtctatatcgcacttggcagcaaccttgcttctccactggagcaggtacaggcggctatccgcgccctgggcgaaattccgcacagccgcgtggtcgccgtctcttcgttctaccgcacgccgccgctgggcccgcaggatcagccggactatctcaacgccgccgttgcgctggaaaccgccctgccccccgagacgctgctcgatcatactcagcgcatcgaactgcagcaggggcgggtgcgcaaagccgaacgctgggggccgcgcacgctggacctcgatatcatgctgtttggcgatgctgtcattaacagcgagcgcctgaccgttccgcactacgatatgaaaaaccgcggctttatgctctggccgctgttcgagatcgccccggaccttcactttcctgacggcctggcgctgcgcgccgtgctggataatctcggcgcggcaaagcccgccagctggtaatcccctctcccttttttagcatttgcggcgatcgtcgtaatcggttgcccaaaatcattgcccctctgaatgctgctgttagaatgccggttaatatgactttcatcatcaggaaatgttatgaaaccgaccaccattgccctgctgcagaaatgcaaacaggaaaagaagcgctttgccaccattaccgcctacgatcacagcttcgcgaagctgttcgccgatgaaggcataaatgtgctgctggtaggcgactcgctgggaatgacggtgcagggtcacgactccaccctgccggttaccgtggaagatatcgcctatcacacccgcgccgtccgccgcggcgcgccaaacagcctgctgcttgccgacctgccgttcatggcctatgccacccccgagcagacctttgcaaatgccgccatcgtgatgcgcgctggcgccaatatggtcaaactcgagggcggcgcctggctggccgacaccgtgaggatgctggcggagcgcgcggtgccggtttgcggccatcttggcctgacgccgcagtcggtgaacgtattcggtgggtataaagtgcagggtcgcggcgatgcggcgcagaccctgtttgaagacgcgttagcgctggaggcggcgggtgcgcagctgttggtcctggagtgcgtgccggttgaactggcgaagcgcatcaccgacgctctgaccattccagtgatcggcatcggcgcgggcaacgtcaccgacgggcaaatcctcgtgatgcatgacgctttcggcattaccggcggccacattcctaaatttgccaagaatttccttgccgaagcgggcgacatccgcgccgcggtgcggcagtatattgccgaagtcgaatccggagtctatccgggcgaagaacacagtttccattaaggagtcttgttgtgctgattattgaatccgtactgctgctgcggcagcatatccgccgtctgcgtcaggagggtaaacgtatcgcgttggtcccgacgatgggcaacctgcatgatggtcatatgaagctggttgatgaagccaaagccagtgcggacgtggtggtggtcagtattttcgtcaatccgatgcagtttgaccgcgtcgacgacctggcgcgctacccgcgcaccttacaggatgattgcgaaaagctgaacaaacgtcatgtcgactttgtcttcgcgccgacgccggcggaagtgtacccccagggtactgaaggccagacctacgtcgacgttccgggattatccaccatgctcgaaggcgccagccgcccgggccatttccgcggcgtgtcgaccatcgtcagtaagctgttcaaccttgttcaaccagacgtcgcctgcttcggcgagaaagacttccagcagttggcgctgatccgcaagatggtcgccgacatgggctacgacattgagatcatcggcgtgccgatcgtccgcgcgaaagatggcctggcgctgagttcgcgtaacggctacctgaccgccgaccagcgcaaaatcgcgcctggtctgtataaagtgctgagcgcggtggcggaaaagctggccgccggcgatcggcagctcgatgagatcatcgctatcgctgaacaggagctgaatgagaaaggcttccgcgccgacgacattcagatccgcgatgccgacaccctgcttgagctgaccgatgccagccagcgcgcggtgatcctgatggccgcctggctggggcaggctcgcctgatcgacaaccggatcgtcacgctcgctcagtagacagcgggtaaaaatcgggcaatactgcccgggcttttctcagggcgggcgccgtgtccgctctgctacattaaggttgaagggtagaagttatgatgcgtaatatgctgcagggcaagctccaccgcgtaaaagtcacgcaggcggacctgcactatgaaggttcttgcgccattgaccaggacttcctggatgcggccggtattctggagaatgaaactattcacctctggaacgtcaccaacggcaaccgtttctccacctacgccattgccgccgagcggggctcccggatcatctccgttaacggcgccgccgcgcactgcgccagcgtcggcgatattttgatcatcgccagcttcgttaccatgtcggacgaagaggcgcgcagctggcagcctaacatcgcctacttcgaaggcgacaacgaaatgaagcgccaggcgaaagctattccggtacaggtcgcctgatggccgcgacgctgcgctcaggcgcagcgtcggtattacccctgcggctggttactgatcagccgcgacatcgtctccagcgaatccgtgcgtaagatatataaccgctttaacagaaacggattgtcccccggcttcaccttcccacgcaccgtcgttaccgccatatgaaacccggcgtcattcgccgcctgcaccgccgtagcgttatagccgccgaagggataggaaaggtagagaacgtgcggattaaactggctcagcgcccggcgcgagcgggcgaaatcaaacagaatattatggtaattgcgactgaataaaatcggccgccggccggcgtcaacccgatgcaggaagtgagtatgcgactgaatatcaaagacgtcctggatctggcgtagctcggaaatgctcataaactgcagggatttcggatcccacttctgtggatggcgcttaatacgcgaggagataataaacgcggtggcatggaaaccgtactgtttcagcaccggataggcgtagcggttcaccgatttcaagccatcatcgaaagtgatcgccaccgcccgcgccgggagattgattttattacgcacatagccttccagctgatacagggtcagcgtggtatagccctgatcgcgcagccaggtcatctgattcgtgaaggcgcgaaccgaggtggtggtcgacgtatgacgaaaacgggtgttctcttcatcgcgcagaatatggtgataggtcagcacgggaataccgtgatcctcctgcgcgtccagactactgacccacgccagccggtcgccaatgcggatctgaaaccaggtctgattgagccggtccttcagcttgctgaggatcggatagcgcagattgttggccagcgtgccgaacggcgcgctgcttaccgagggagcgtcatagagcggtgtatctttccaggtgagtaaattttggttactcagcggtttattaagatcccccaaacggtcctccacccgctgcttgccctgcaccggctcgagatgccctttatcaataaacccggtgccaaagccgaaacgaaactcatagtagtcagccgccgtcgggacgactgcgaggatctgcccggcacgaacattgccgacgctgaccacatggtttcccacctgcgcccagatgaccgcgtcttcggtggtttgcatatagcgcacagccttgccctgctggctaagcaggctggcggaggcgctgagtgaggtcaggaaaagaagcagggtcaaaaatcgggcaagcatacgcatcaaaccgttataccatcaacggcggttattgtaacaaaagcggtatctgtcccgctgcttaatttccccaggcatcatggcgcaaccggaacggggggttcttctgctgctgatgccacaggctgctcaccatcggcccgcccgcgctgacgatcgcctggcgaaacgccacgctgcttaacgtgcctcgcaggagatacattcgctcaaggagtggatagctgacgccggagatcacttcgcagtgggtatgtttgtggctcatcagcgccgcggcccgataaggcgccgcaccggttttgtcagtgagaaaaatgaccccgtccccggagtcggtggcatgcagcgcatcgcacatcatccggctcaacatattgctgctgagattgcgccagtaattgaccgcccggcactgggccagcggaccaaacttttgttcaagacgatccagcatctcctgcgccagctcatcgtgacaggtaatgacccatccgagcatgcttccctccttagccagcgaataatgtagcaaggtgaagatgacgtatcggtgatgggagtcaaagataagcggttagcgcttcgcatatttacttcaggaagcgctaaccatgatgagtatcagctacgcaggccgcgaccgcgctgaattaacgaccagcacagcagatagaaggcgacaatgaacaccaccagcacggcgaaggtggtcgccagcgggacgtcgttgataccgaggaagccgaagcgaaaaccgctgatcatgtagacgatggggttcagatgcgacagcccctgccagaacggcggcagcagggtcagcgagtagaacaccccgccgagataggtcagcggcgtcagcacaaaggtcgggatcaggctaatgtcatcgaaggtcttggcaaacaccgcgttcagcagcccggccagcgagaacagcaccgcggtgaggagcagcgtcagggcgacaaacagccaggagtgaacctggaacggcacaaagaatagcgacaccgcagtcaccaggatacctacgcacagtcctcgcgctaccccgccgcccacgtagccggcgataatcacatgcgtcggcactggcgccaccagcagctcttcaatattgcgctgaaacttggcgctgaagaaggatgaggcgacgttggcgtaagcattagtgatcaccgccatcatgatcaggcctgggacgataaactgcatataggtaaaaccatgcatctcaccaatgcgcgagccgatcaggttgccaaagatcacgaaatacagggtcatggtgatcaccggcggcaccagcgtctgtacccagatgcgcataaaacggtggatctctttggtccagatgcttttcagcgcgacccaataaagctgcatcatgctgattctccttttcgctcatgcaccagcgtgacaaacagctcttccagacggttggctttgttacgcatactcagtacctgcaccccctgggcgctcagctgcgcgaagacgctgttaattccctgctcacgcagaacctccacttccagcgtcgaggtatcgaccagctggtactggtagccttcgagcttcggcaccgggctttttggcgcgaggtcaagaataaaggtctctgacttcagcttcgacagcagcgctttcatcgaggtgttttccaccagctcgccgtgctggatgatgccgatgttgcgacatagcatttcggcctcttcgagatagtgggtggtcaggataatggtggttccgcgatcgttgagatccttgagaaagccccacatcgagcgacgcagttcaatatcgacgccggcggtcggttcgtcgaggatcagcagcttcggctcatgcatcaacgcgcgggcgatcatcagacggcgcttcatcccgccggagagcatccgcgcgcgttcgttgcgtttttcccacaggtcgagctgttttaaatacttttcactgcgggaaagggcttctttacgctcaacgccgtagtagcccgcctggttaacgacgatctgctgcacggtttcgaacgggttgaagttaaactcctgcggcaccaggccaagctggcgcttggcattgacgacgtctttctccagatcgtagccaaagacattgacctgaccagaggttttgttcaccagcgagctgatgatgccgatggtcgtggattttccggccccgttcgggcccagcagggcataaaaatcccccgcttcgacctgcaggtcgatcccccgcagcgcctgaaccccgccgggataggtttttttgagctgttttaattccagagcaatggtcattaaatatctcttctcgtgtcgtgacacgtcattaacccgcctgactcacgtttgcgctggaccggcgctgacgccgccaacgcatctgcagcctgaagtatcacgggttaagatggttttaaaaaaggtgagcttaccctatattagcgcaacgcacttacttggttacaggccgataacgtccatgaatgatatagatacactcatcagcaacaatgcactatggtcaaaaatgctggtggaagaggaccccggcttttttgagaaactgtcgcagacgcagaaaccgcgcttcctgtggattggctgttcggacagccgcgttcccgctgagcgactcaccggcctggagcctggcgaactgttcgtgcatcgtaacgtagcgaacctggtgatccacaccgatctcaattgtctgtcggtggtgcagtatgccgtcgatgtcctggaagtcgagcatattattatctgcggccactacggctgcggcggcgtgcaggcggcggtggagaacccggagctggggcttatcgacaactggctgctgcatatccgcgatatctggtttaagcacagctcgctgctcggtgaaatgccagaggagcgccgtctggataccctttgtgaactgaacgtgatggaacaggtgtacaatctgggacattcgacgattatgcaatccgcgtggaagcgcggacagaaggtgaccatccacggctgggcttacgggattcacgacggactgctgcgcgatctggatgtcaccgctgtgagcagggaaaccctcgaacagcgctatcgccacgggatctccaacctcaagatcaagcacatcaaccacagatagccttcagacttcgccaccctggagagcgcggcgcgcgctgtccagagtgggatatccccttactcgtccagcagggtgactttgccgatatacggcagatggcggtagcgctgagcatagtcgataccgtagcccaccacgaactcatccggaatcgcgaaaccgacgtattcaaccgggacgttcacttcgcggcggctgggtttatcaagtagcgtacaaatggccagcgatttcggctcgcgcaggctgaggatttcgcgaactttagacagggtattgccggagtcgatgatgtcttccacgatcagaacgtctttaccacggatgtcttcatccagatctttaaggattttcacatcacgagtggtggacatgccgctgccgtagctggaggcggtcataaaatcgacttcatgcggcacctgcacttcacggcacaggtcggccatgaacataaacgagccgcgcagcagccccaccagcaccatttcgctgccgctgttctgataatgttcgttgatttgacgacccagttccgcgatacgcgctttgatctcggattccgggatcatcacttctacagtatgtttcataatactaaccatttgattctaaatataaatcatcaaagccgctgctttcgccccgacgatgaccggcaagccatccagtataccagcaaaaagaaatcttcggtgcagggattaataaagccatatttgtgattccgatcacacttgttaaatcctataattaattgcagttaaaaaatttaacaaacacatgagtaactttttatggctgaaacaaagtctcaacaatcaaggctcctggtgacgctgactgcgctatttgcagcgttctgcggcctctatctattaatcggcggggcatggctggtcgtgcttggcggctcctggtactaccctatcgccgggctggtgatgctgggcgtgaccgtaatgctgttccgcggcaagcgcgctgcgctgtggctgtacgccgcgctgctgctggcgaccatgatctggggcgtctgggaagttggtttcgacttctgggcgttgacgccgcgtagcgatatcctcgtcttctttggcatctggctgatcctgccctttgtctggcgtcgtctgccggtgccttccgctggcgccgttggcgcgctggtcgtcgccctgctgatcagcggcggcatgctgacctgggctggttttaacgacccgcaggaagtcaacggcaccctgagcgccgacgctacgccggccgcaccgatttccaccgtcgccgacggcgactggccggcctatggccgtaaccaggaaggccagcgcttctccccgctgaagcagattaacgccgataacgtgaagaacctgaaggaagcctgggtgttccgcaccggcgacctgaaacagccgaacgatccgggtgaaatcactaacgaagtgacgccgattaaagtcggcgatacgctcttcctgtgtaccgctcaccagcgcctgtttgcgctggacgccgccaccggtaaagagaagtggcattttgacccgcagctgaacgccgatccgtcgttccagcacgtcacctgccgcggtgtttcttatcacgaagcgaaagcggataacgcccctgccgacgttgtcgccgactgtccgcgccgcattatcctgccggtgaacgatggtcgcctgttcgcggtaaacgccgacaacggtaagctgtgcgaaacctttgctaataaaggtattctcaatctgcagaccaacatgccggtcaccacgccgggcatgtatgaacccacttcaccgccgatcatcaccgataaaaccatcgtgattgccggcgcggtcaccgataacttctctacccgcgagccgtcaggcgtgatccgcggctttgatgtgaataccggtaaactgctgtgggccttcgatccgggtgcgaaagatccgaacgccatcccgagcgatgaacatcacttcacgctcaactcgccgaactcatgggcgcctgccgcctacgacgctaagctggatctggtctatctgccgatgggcgtgaccactccggacatctggggcggcaaccgtacgccggagcaagagcgttatgccagctcgattgtggcactgaacgccaccaccggtaagctggcctggagctatcagaccgtccatcacgatctgtgggatatggacatgccttcccagccgacgctggctgatattgaggtcaacggcaaaaccgtaccggtcatctatgccccagcgaaaaccggcaacatcttcgtgctggatcgtcgtaacggcgagctggtggtcccggcgcctgaaaaaccggttccgcagggcgctgccaaaggtgattacgttaccaaaacccagcccttctccgatctgagcttccgtccgaagaaagatctgaccggcgcggacatgtggggcgccactatgttcgaccagctggtgtgccgcgtgatcttccaccagctgcgctatgaaggtatcttcaccccgccgtctgagcagggcacgctggtgttcccgggtaacctggggatgtttgaatggggcggtatctccgtcgatccgacccgtcaggtggctatcgccaacccgatggcgctgcctttcgtctcaaaactgatcccgcgcgggccaggcaatccgatggagccgccgaaagatgcgaaaggctctggtacggagtccggcgtgcagccgcagtacggcgtcccgtacggcgtaacgctgaacccgttcctgtcgccgttcggcctgccgtgcaaacagccggcctgggggtatatctccgccctggatctgaaaaccaacgaagtggtatggaaaaaacgtatcggtactccgcaggacagcctgccgttcccgatgccggttaaactgccgtttaccatggggatgccgatgctgggcggtccgatttccacggccggtaacgtcctgttcatcggcgcgactgcagataactacctgcgcgcgtacaatatgagcaacggcgagaagctgtgggaagcccgtctgccagccggcggtcaggcgactccgatgacctacgaagtgaatggcaaacagtatgttgtcatctctgccggcggtcacggctcgttcggtaccaaaatgggcgattatattgtcgcctatgcgctcccggatgacgccaaataaaacgcaaaacggcaacgaaagttgccgttttttttggtgttccgtccttcttcccgtaggggatggcagcaggtcgcagagacttaaaccgtgaaccccaacatcatcccggtgtcttcatgttccagcaggtggcagtgggccatataggcaaactccttcggcgccggatgatcaaacttcactaatacttcactcacgttcccttccacacgaacggtgtctttccagccgcgacgatgcgccgctggcggcttgccgttttcgctgaggatacggaactgggtgccgtggatatggaacggatgcaacatcatgtcgcccttaccagaaatcacccagcgctcatactggcctctggcggcggcaaacatcggctcattcatgtcgaaggctttgccgttgatgcggttggcgttatggaaatcaaagcccttgcctgacgacatgccatgctccatgccggatccgtggttcatgttactcattttgctcatgtcgccgtgatgcatattccccatgtcgctcatgtcgccatgccccatcatgccgtgatccattccggccatcgcctggtcgccatacttctccatcagcgcctgcatgcccatccggtcgagcatcggatccatagacagctggagctgacgctgcgtcagccccgtcagggacggtaacgccgggagagcggccagagtatccagcagcttgccggaggcgggaatgaccagcggctggacgcgcagtaccggctgtggtttatcaaaaggcgcaatcgccatgcccatctggctcaccggcagggtcaccagatcgaaaggtttaccgtcgctggtgtccaccagcacctcaaagcgttcacccatcaagaccggcaattcatcgaccttgaccggctcggccaacagaccgccatcgctggccaccacgtacagcgggcgcttatcgctggtggcaaaattgagggaacgggcattacagccgttcagcaagcgcaggcgcagccagccgcgcggcgcggcatgttcgggatagagggccccattggtcagtagcgtatcgccaaaccagccgacggcggcgctcatcacatccagctgatagtcgatctcgccggcggcggtgaacttcttatcctggacgatcaccggcacatcatcgattccccactgcttaggcagcagcaggcgcccgctctcttcatcctcgatcagcaccaggccggccagccccatcgccacctgccggccggtgctcccatgctgatgcggatgaaaccagcaggtcgccgcccgctgcgttggcgtgaagcttaccgtgcgggtggcacccggcgcgataaccccctgtggccccccgtcgacctcgcccggtacctccagaccatgccagtgcagcgtggtctcttccgccagctggttagtaatatccaccgtgacggtcttcccctgcgtcaactgcagcgcagggcccagcagcgacccgttgtagccccaggtagtggcattcagggcgccaaaccgcgttttgcccgcctggatcctgagcgcgatgcggttgcgcgcatcggcggctaacagcgacggtatcggcagagccgggcgactggcggcaaagaccgcccggctccataacggcaatgcgctggccatgccgaccgcggcggtcagtttgaggaagtctcgacgttgcatattcacatccttttattctgcgggcgaatatttgagcttaaaccctaccgtaacgggaaggtcaagcagaagagtaagaataaagatcggcgctgtgtaaagaagtatgctaatttgaagcgtcggtgatctaatggtagaaaaaatgaagacgcttttcagaacaatggtactcggcagcctgcttgctctctccgccaacagctacgcgctcagcgaatccgaagcggaagatatggctgatttaaccgcggtttttgtgtttctgaaaaacgactgtggctaccagaacctgcccaacacgcagatccgtcgcgcgctggtgttctttgcccaacagacccagtgggacctgagcaactatgacagctacaacatgaaagcgctaggcgaagacagctatcgcgatcttagcggcattaacattccgacggcgaaaaaatgtaaagcgctggcccgcgattcgctcagcctgctggcttacgttaaataattccctgcgcgggcggcaacgctccgcgcctttagcatttcaatttccccctttaaatatttatatttattattgtatataaacaaaccttatttaattgcgaacctatcaatttgccaaataaagtaaacccataataatgaagaatgactaaaaaactaataaaatatcattattcatatattgcaaaataaaaagcacccttctagaatccggtaaaaatatacctacttcatggactgaaattgtgaatatctcgctgactcttcgtgttatcccactcgccgcgctgttagtagccggctgtagcaatacctcttcccgccagccggttaaaccgatcgccacgccgctgacgtcacagcagcaggcagagcaggagcgggcggccagcgaacaagcgcgcattgaatcctgtcgccaggcgttggattcgctaaaagaggttaacccacagcaagccactaaactcagcaatgactttaacgctttagtgcgcgcggcgtcacaatacaatagcgtgcgcgagaaagtggcggatcctacccggcttggcattgactccatgtatcagtttaaatccatcaaactgtgcgccgatatccagaaaacgctgatcgatagcctggtacagcgtggtgaaagcaaacaaccatgaacagagccgccacgctgaccctcaacgcgcccctgctgatgctcgtcgctgcgctggcgctttcaacccccttcaccgccggcgccgcgccggcctttcttgattacgcccaacagcaaacccagcaatctcaggcgcaagaaaaaaacgatgccgcaagcgcaaaacaaacacaagaaagccgccagagcgcagataataaaaaaaccggtaccaacacctcacaattacaaaaaagaatcaccagccagcaggcggcgattgcacaaaaagataagcttatacagcaattaaaaaaacagcttgccgctacgccgcaaacggatactgccggagcgaatgagcaagcggcgttgaataagagaattaatgaattacaggtcgccttaagcgccgctactgcagaaaaagaggcattaataaaaaaagcaggcgttgtgcagaataataatctacagcaaagcaaggccgcggcgcgtcagcagatccagcaattaacgacgcagattcagcaagccgaagctgaaaataaacgcctcagcgccagctttaccacgcttaataaagataaacacgcgctaatgacccaactggccgcaacggaaaaagagaaacaggccgtcctcgagcaggttaaggcccttaacgccgataagcagtcgctgactattcgcctcgccgctgcggagaaggcgcagcaggccgctcttgaccaggctaaagcgcttaacactgacaaacagccgctggctacccgactggccgccgcggaaaaagagaaacaggccgtcctcgagcaggttaaggcccttagcgccgataagcagtcgctgactattcgcctcgccgctgcggagaaggcgcagcaggccgctcttgaccaggctaaagcgcttaacgctgacaaacagccgctggcgacccggctggccgccgcggaaaaagagaaacaggccgtcctcgagcaggttaaggcccttaacgccgataagcagtcgctgactattcgcctcgccgctgcggagaaggcacagcaggccgctcttgaccaggctaaagcgcttaacgctgacaaacagccgctggcgacccggctggccgccgcggaaaaagagaaacaggccgtcctcgagcaggttaaggcccttaacgccgataaacagtcgctgactattcgcctcgccgctgcggaaaagacgcagcaggctgccctcgatcaggtcaaagcccttaacgccgataaacaatcgctgtccccccggctggccgccgcggataaagcgccgcatggccccgctaacgacgccgctgcgccaaaaaatgagccaccagagatggcggccatagtggcagcctatcgcctgcaggcggataaagacaacgcccagctacggatgaaagaagatgaaatcgaactgctgagaacgcagctttctgtacagtccaaaacgcgcagcggcgagagcgccgctgccaaactcagcgcatcgggagaacagcaggcttatgcgatcggcgcctcgatgggaagcgaggcgctcaacgtccttaccacccgtcgcactcagggagttaccgtcgacgcaggcctggtgctgcagggcatcgaagatgcctttcgcggccagcttcgtctcggagagcaggaacgtaacaaggcgctgtttgatgtgtcgcagcaggtttttcagaacctgaataaaatagagcagaaaaacatcagtgccggcaagaaatatcagcaggcatttgcgcgcaaaaaagatgtggtctttaaagagggcgtctacagccgcatcgattacccgggtaaaggaaaaataagcggtaacgacctggttaccgtggtgatcaaagagatgctgacggacgggacggtgatcaacgatatggaagcgaaagatcaggcgcttacgcaaaagctggatgcctatcccccggtgtttcgcgaaccgctgaagcgtctacagaaccacggctccgtgacgctcgtcgtcccgcctgaaaaggcctatggcagtaaaggattaccgccaaaaatcccgccaggcgccaccatggtttattccgtgcggatagtagatagccaacccgagccggcaaaatagcctcatcctctccaccgcccttccggggcggtggctgttattcctgcctcattgctgcaataaccgccgtgcatcctcatctatagttgtctatgatgttgcactcgttttacgggtgtaacagatgttaacgaaggaggagccttatcgtggccgataatccactgtggcatgaaacgctgcatgaccattttggtcagtattttagcgttgataacgtgctgtaccacgaaaaaaccgatcatcaggatctgatcatctttgataaccgcgcctttggccgggtgatggcgctggatggcgtcgtacaaaccaccgaacgcgacgagttcatctatcacgaaatgatgacccatgtgccgctgctggctcacggcaacgcgaagcatgtgttaatcattggcggcggcgatggcgcgatgctgcgcgaagtctctcgtcaccgtagcatcgaaaccatcaccatggtggaaatcgacgccggggtagtttcattctgccgccagtacctgccgaaccataacgccggcgcctatgacgatccgcgctttacgctggtgattgatgatggcgtcaattttgttaatcagacgacgcaaacgtttgacgtgatcatttcggactgtaccgaccctatcggcccgggagaaagcctgttcacctcggctttttatgaaggctgcaaacgctgcctgaacccgggtgggatctttgttgcccagaatggcgtcagcttcctgcaacaggatgaagcggtaggcagccatcgcaagctaagccactattttcgcgacgtcagcttctaccaggcggcaattccaacctattacggcgggatcatgacctttgcctgggcgagcgacaatgaggcgctgcgccatctctccagcgaaatcattcaggcgcgctttcacaaagccaacctgacctgccgttactacaatccggcaatccatacggcggccttcgccttaccacaatatctgcatgatgctctgtccgcaccgtgacgcgaaataagggggtgaactaaattgaaaaaattgaagctgcacggctttaacaacctgaccaaaagcctgagtttttgtatctacgatatctgttacgccaaaacggcagaagagcgcgacggctacatcgcctatatcgacgaactctataatgccaatcgcctgacggagatcctgacagaaacctgttctattattggcgccaatatcctgaatatcgcccgtcaggattatgaaccccagggcgccagcgtgaccattctggtcagcgaagagcctgtcgatcccaagctgattgaccagaccgaacatcctggcccgctaccggaaaccgtggtcgcccatctcgataagagccatatctgcgtgcatacctacccggagagccatccggagggcggcctgtgcaccttccgcgccgatatcgaagtttcaacgtgcggcgtcatttccccgcttaaagcgctgaactatctgattcaccagctggaatcggacattgtgaccattgactaccgcgtgcgcggctttacccgcgatatcaatgggatgaagcattttatcgatcatgaaatcaattcgattcagaactttatgtccgacgatatgaagtcgttgtatgacatggtcgacgtcaacgtttatcaggaaaatatcttccataccaaaatgttgctcaaggagtttgaccttaagcactacatgttccatacccgaccggaagagttgactgccgaagagcgcaaggtcattaccgacctgctatggaaagagatgcgcgagatttactacggccgcaatattcctgccgtgtaatctatgaaatgcccggcggcgcttttgcttgccgggcctgtagttctgcgccacccgacataaaaggcgtcattaacgctgctgcataaactcacgataggcggcgaccacctgcaggaaatcctcaacaccgcacagagagagactttcttcgtcgtagtagctcatcccctcctcgatttcgtcgccggaaaactccagctgattggcgcggatcatcacctcttcgccatccagccacagcgtatattcatgcccggcacgctgccaggaacgctcgctgcccttcacggtgcgcgcagcctgctccacttcgtccagcagagcaagattgcctttcacctcctcgttgaaccagtggccgatcgcctcgtgatccatcgacattcgcacctttaccactccggtaatatcgcgcagaaattcgtaatccatagtcttttcctctgcaagggcaatgcgtcaccgctgcactgtacccatgcagtaattatcgcagcagacagaaagaaaaaaagcgtagcgggcgggaggtttggaaataaaaatgcccggtgatgcaatgttcaccgggcattggagagtttatcgccaaacggtcagccgggctgaccgaatggtttacaccgcggtctggaagatcacgccgtcagctttttcagtgtactgatccagctggttgaagttcagataacggtaggtatcttccgccgtcttatccacctgcgccacgaaggtctggtactcttccggcgtcggcagtttgccgagcagcgaagccaccgctgccagttcggcagaggccagatagacgttagcgccggtacctaaacggttcgggaagttacgggtagaggtggaaaccaccgtcgcgccgtcggccacgcgcgcctggttacccatacacagagaacagccagggatttcgatacgcgccccgctcttaccaaacacgctatagtagccttcttcggtcagctgcgcggcatccatacgggttggcggcgccacccacaggcgagtcggcagttggcctttgtggctgtccagcagcttaccggcggcacggaagtggccgatgttggtcatgcaggagccgatgaacacttcgtcgatcttctcgccctgcacatcagacagcaggcgggcatcgtccggatcgttcggcgcgcacagaatcggctctttaatatccgccagatcgatgtcgatcactgccgcgtattccgcgtcagcatcggcttccagcagctgcggatccgccagccatttttccatgccctggatacgacgctccagggtacggcggtcgccgtagccttcggcgatcatccacttcagcagaacgatgttggagttcagatactcaacgatcggctctttattcagtttgatggtgcagccggcggcagaacgctcagccgaggcatcggtcaactcgaacgcctgctcgactttcagatccggcagaccttcgatctcgaggatgcgaccagagaagatgtttttcttacctttcttctccacggtcagcaggccctgcttgatggcgtacagcgggatggcgtggaccaggtcacgcagggtgatccccggctgcattttacctttgaaacgcaccagcaccgattccggcatatccagcggcatcacgccggtcgcggcggcgaaggccaccagaccagagcccgccgggaaggagatgccgattgggaaacgggtgtgggagtcaccgccggtacccacggtatccggcagcagcatgcggttcagccaggagtgaatcacgccatcgcccggacgcagagaaacaccgccgcggttcatgatgaagtccggcagagtgtggtgcgtggtaacgtcaaccggcttcgggtaggccgcggtgtggcagaaggactgcatcaccaggtctgcagagaagcccaggcacgccaggtctttcagctcatcacgggtcattggaccggtggtgtcctgagaaccgacggaggtcattttcggttcgcaataagcgcccggacggataccggcaacgccgcaggcgcggccaaccattttctgcgccagcgagaagccgcgggtgctttccgccacgtctttcgcctgacggaagacatcgctgtgcggcaggcccagcgcttcacgcgctttggtggtcagaccgcgaccgatgatcagcggaatacggccgccggcgcgcacttcgtcgatcagcacatcggttttcagctcgaagctggccagcagttcgttggtctcgtggttacgcacttcgcctttgaacgggtaaacgtcgattacgtcgcccatgttcaggttagatacatcaacttcgataggcagcgcgcccgcatcttccatggtgttgaagaaaattggcgcgattttaccgcccagacacaggccgccaccgcgcttgttcggcacgttcgggatatcgtcgcccataaaccacagcaccgagttggtggcggatttacgtgaagaaccggtcccgaccacgtcgccgacgtaggctagcgggtagcctttctgctgcagggcttcgatctgtttgattgggccaaccacgcccggctgatccggctcaatgccttcgcgggggtttttgagcattgccagcgcatgcagtgggatatccgggcgcgaccacgcatccggcgccggagagagatcatcggtgttcgtttcgccggtgaccttgaagacggtaacagtgattttctctgccagctgcggacggttcaggaaccattcggcgtcagcccaggattgcataacctgtttagcatgctcgttacccgctttggctttctcttccacgtcgtagaagttatcgaacattagcagggtatgggagagcgctttcgcggcaatcggcgccagtttcgcgtcgtccagcgcatcgatcagcggatggatattgtaaccgccctgcatggtgcccagcagttcaacggctttttcaggggtaaccaggggggaggtcgcttcgcctttggcgatcgcggcaaggaatccagctttaacataggcggcttcatcgacgcccggcggtacacggttaatcagcaggtctaacaggaattcttcttcgcccgcaggcgggtttttcagcagttctaccagcgcggccatttgggttgcatctaagggtttggcaacaatccccatggcggcacgctcagctacgtgcttacggtattcttctagcacgacggttctcctcgctctcattgtcataatgcggcctacacgtcttcaatcaatctgcctctgtcctggcttagcttgccgcgtgacgcatcttgaaggatttagtggctgggcgattttcttcacgctcctgtgagacagcagtttgtagggtaaatgcccgataccgcgtcggcagcatagcaggatttttgaaaggtgttaatctgtttacaaaaaagcaacattaaaatttagctgaatcgttaagggcaggatattgcaggctttctgttcaaatcccacgacaaaaattcctttccgcgtacaacgccacgggccgatcccaacaataatcaataaaaagccataccgcttacttatactcagcaaacgcgccgttttcgcagatactttagcgagatgggttactttttgggtcaggagtttccatgtcactgccgttcaaaccccatattatcgccctgctctgtagcgctggcttactcgcggcggcaggaacactctatgtgcaaagccgaaccccagcgacgatcgctgaaccgcctgcgcagcaagcgccagcgcccgcagcgtcgacgacacagccggtggccgccacttacacccaggcgcaaattgatcagtgggtcgcccctatcgcgctctacccggacagtctgctgtcgcaggtgttgatggcctccacttatcccgacaacgtcctgcaggcggtccagtggtcccaggataaccccgcgatgaaaggggatgcggccgtgcaggcggttgccagccagccgtgggaccctagcgtcaaatctcttgtcgctttccctgccctgctggcgatgatgggcgagaatccgccctgggtggaaaatcttggcaatgcgtttttggcccagccgcatgatgtgatggattcagtgcagcgtctgcgcgccattgcccaacagaccgggacgctgaaatccacaccgcagcagaaagtgattgtcacccctgccgcaccggtttcggccagcagcagcacgacagcaaccgcaaccgcccacacagcggcgcctgcgcccacgcaggtcattaaaatagagccgaccaatccacaggtggtctatgttcccagctataacccctccaccgtctatggtacctggccgaacagcgcctatccgccggtctatctgccaccccctcccggggagcagtttaccgatagcttcgtcaaaggcttcgggtacagcctcggcgtggccaccacctgggcgctgttcagcagtatcgactgggatgatgatgaccatcaccatcacgatgacgactaccaccacggcgattactcgcataatggcgataacatcaatattaatgtaaataatttcaatcatataacaggagaaaacctgccgggaaaccacgttaactggcagcacaatcctgcctatcgcggacacacaccgtatcccgataatacggtagctcagcgcttccatcagaccaacgtttccggcggactgagcgcgacccaacatgcgccagtcgatcgcgaagcgcagcgccaggcagcgatgacccagctgcagcataacgtaccgacggccacagcgggcaatctggcggcaaacaacgcctcacgcgacgcccagcgtcaggcggcctcggcgcagctgaagcaagccacccaacgcagtaattaccgcggttacgacagtacgccgacccaacagcagcgtcgagaagccgccaggagccacgagcagaaccgcacacctcagcagcagcagcgccggcagcagttccagtccgccacgccagcccagcgtcagcagacgctcagccatctgcgcgccaacgcccttagcggcaacgaaagccgcgccccctcctggcaagcgcagcaggaacgaggactgcagagccgccagttatccggcgtaaaccgcgagttacgcgagggcgccagagaacgtctttccgaacaccatgaactgcgtcgccgctaaggatgagcagaatgagatacccattatccgttgccctgtttacgttaatgctgtcgccgcttgccgccttcgcccaacagcagtttgccacgccggaacaggccgcaactgcgctggccgaagcgatcagccagcctaatgaagccgcgctgagcgaagtactcggcgataactggcagcagtttttacccacggacgggatcgaccctgccgccgtcgatcgctttcaacgcgactggcaggtgaaacatgtcatcatccagcagggtgacaaagcctggctcgatgtcggtagcgaggcatggcgtctgcccgtgcctagcgtaaaagcgtctgagggatggcgctttgatatggccgctggcgaagaggagatcctcacccgcgccatcggccgcaatgagctttcggcgatcgccgccatgcatgcctatgttgatgcccagcaggactattatcatctgaaccaccgctgggcgcagaaaatcatcagtagcgaaggcaaaaaagatggcttgtactggccaacttcgccgggcgaagcgccaagcccgctcggtccggcctttagcccgacggtgcccggtagcggctaccatggctatcgctttcgaattatcgccggtcgcgatgaccagagcgtcgccttgctggcctggccgatagcctggggtgaaaccggtgtgatgagctttatgatcgatcaacaggatagggtctatcaggccaatctcggtgaagagagcgccgcaaaggcacaggagataacgcgctttacccccgacgctgacgccggctggcaggtggcagaaccttaaaaaaaacgcccggttgcactcacgcaaccgggcgttttcattcacttagccctggtgaggcatcagagaaggatcgccggcaaaggctggttttgtgctggataatgccgcttcgtcagcgctgatgctaccggaattcgccgcccataccccttcattggtcttcgtcacctgctgatgctgggcattcagatcctggcccatcgccgcaatgtgggtcgtttccgtaccgccgctgttgtccgcccagggaatgttggcgtcagcggcgtaagccacaccggtaaaaaacgttgcagcgaccagcgctgtggttaaaaagcgtttcatctcacacctcatcgatatcattaactacctataagtttactgagttactattttcaaagtatgtatgaggtgtagcggtttatgaacagtgacatagttctaaacatcaggcataaaaaaagcggctcccggagccgcttttgcttttttcctgaaagaaaaagttactttttcttcgctttggcgtttggcaggtcggtgatgctgccttcgaacacttccgccgccaggccaacggactcgtgcagagtcgggtgagcgtggatggtcagggcgatgtcttcagcgtcacagcccatctcgatagccaggccgatctcacccagcagctcgccgccgttggtgccgacaatcgcgccgccgataacacggtgggtctctttgtcgaagatcagtttggtcataccatctgcgcagtcagaagcgatagcacggccggaagcagcccacgggaaggtggcggtttcgtagctgatgcctttctctttcgcttctttctcggtcagaccgacccatgccacttctggttcagtgtaggcgatggatgggatcactttcggatcgaagtagtgtttcagaccggagataacttctgcggcaacgtggccttcatggacacctttgtgcgccagcatcggctgaccgacgatatcgccgatagcaaagatgtgcggcacgttggtgcgcatttgtttgtcaacgcggatgaagccgcgatcgtcaacttccacgccagctttacctgcatcgaggtttttaccgttcggtacgcggccgatagcgaccagcactgcgtcgtaacgctgcgcttccgccggtgcttttttaccttccatggaaacgtaaataccgtcttctttcgcttcaacggcagtcactttggtttccagcatcaggttaaatttcttgctgatgcgtttggtgaagactttcaccacgtctttgtcggcagccgggataacctggtcgaacatttccaccacgtcaatctctgaacccagcgcatggtatacggtacccatttccagaccgatgataccgccgcccatcaccagcatgcgtttcggtacagatttcagttccagagcgtcggtggagtcccatacgcgcggatcttcatgcgggataaacggcagctgaatcggacgggaacccgccgcgatgatagcgttgtcgaagttgatcacggttttgccgttttcgccttccacttccagggtgttagcgccggtaaatttacccagaccgttaaccaccttcactttacgacctttggccatgccagccagaccaccggtcagctgagtgatgactttttctttccaggtgcggatcttgtcaatgtcagttttcggttcgccgaaaacgatgccgtgttcggccagcgctttcgcttcttcgataacttttgccacgtgcagcagcgctttagaagggatacaacccacgttcagacaaacaccaccgagggtgctgtaacgttctacgatgacggtttccagacctaaatcagcgcaacggaaggctgcagagtaacctgcggggcctgccccaagtaccacgacctgagttttgatttcagtactcatcatgacctctgtaatttatatccggcgggtctgacgctattattcttacgcccaagtccaccgggacgttctatccgcgtgtattttacaaaattgttaacaatttttaaacaacaaacggcaaacgattttgtcctttgttgctgataatccccaacagcctgaggttatcagaaaaaagccggccgtcaggccggctttttcgattacatcaccaggcggcgaatgtcgctcagggtgttgttaatgatggtaatgaagcgggcaccatcagcaccgtcgatgacgcggtggtcgaaggacagagagattggcagcatcaggcgcggcacaaactctttaccattccataccggctccatcgcggacttagacacgccgaggatggccacttccggcgcgttaacaatcggcgcgaagtgggtggtacccaggccgccgatgctggagatggtgaagcaaccgccctgcatttcgccagccgtcagtttgccatcgcgcgctttcttcgagatggtggtcaattcacgagacagctcggtgatgctcttcttgttcacgtctttgaagaccggaaccaccagaccgttcggggtatccaccgccacaccgatgttgatgtatttcttcagcgtcaggcgctgaccatcttcggagagcgagctgttgaagcgcggcatctgctcaagcgcagcggcaaccgctttcatgatgaagaccactggagtgaatttcacgtccagtttacgcttctcagcttcggcattctgctgcttgcggaacgcttccagatcggtgatatcggttttgtcgaagtgggtaacgtgcgggatcatcacccagttacggctcaggttggcgccagagattttctggatacgacccagctccacttcttcgacttcgccaaacttgctgaagtcaaccttcggccacggcagcatgcccgggataccgccgccagcggcagccgcaggtgcggattcagcgcgtttaaccgcgtctttcacgtaagcctgaacgtcttcgcgcaggatacgacctttacggccggtgcctttcactttcgccaggttaacaccgaactcgcgcgccaggcggcgaatcagcggggtcgcgtgaacgtaggcatcgttttcagcgaattcgcttttaccttctgctttcgcagccggcgcagcggcaggcttagcggcctgagccggggcagcagctggtgccggggcagcagcctgagccggagcggcggcaggcgcagcgccttccacttcgaagaccatgatcagggaaccggttttgactttatcgccggtgctgattttgatctctttaacggtacccgcgaacggcgccggaacttccatagaggctttgtcgccctctacggtgatcagggactgttccgccgcgactttatcgccgactttaaccatcacttcggtgacttcaacttcgtcgccgccgatgtccgggacgttaacatctttcacgcctgctgcggcagccggagccgcagcagccggcgcggcagcctgtgcctgagcggctgctggcgcagcgcccgccacttcgaagatcataatcagggagccggtggaaactttatcgccggtattgattttgatctctttgacggtaccggcgaacggcgccggaacttccatagaggctttatcgccttctacggtgatcagggattgctcagcggcgatggtgtcgcccactttaaccatgatctcagtgacttcgacttcatcgccgccgatatccgggacgtgaacttctttcgctgccgcggcagccgctggagcagcggcggccggagcggcttctttcttctcttcctgcgcaggtgcagcggcggctgcaccttcggcggaatcgaaaatcataatcagtttgccagtctcggttttgtcgccgacggagactttaatctctttcacgacgccagcctgcggagacgggacttccatagaggctttgtcgccttctacggtgatcagcgactgttcagcttctactttgtcgccaactttgaccaggatctcggtgatttcaacttcatcagccccgatgtccggtactttgatttcgatagccattattcttttacctcttacgccagacgcgggttaactttttctgcatcgatgtcgaatttcgcgatagcgtcagccaccactttcttatcgatttcaccacgtttagccagttcgcccagcgctgctacgaccacataggaagcatcgacttcgaagtggtgacgcaggttttcacggctgtcggaacgaccgaagccatcggtacccagtacgcggtaatcatcagccggtacgtaagtacgaacctgctcagcgaacagtttcatatagtcagtggatgccactgccggagcgtcgttcattacctgagcgatatacggcacgcgcggggtttccagcgggtgcagcatgttccagcgttcgcaatcctggccatcacgcgccagttcggtgaaggaggtaacgctatacacgtcggaacccacgccgtagtctttcgccaggatctgcgctgcttcacgcacgtgacgcaggatagaaccggagcccagcagctgaactttacctttgctaccttcgatggtttcgagtttgtagatacctttacgaataccttcctcggcgccttccggcatggccggcatgtggtagttttcgttcagcgtagtgatgtagtagtaaacgttctcttgcgcttcgccgtacatacggaccagaccatcatgcatgatgacagccacttcataggcgtacgccgggtcgtaagagatacagttcgggatagtcagcgactgaatgtggctgtgaccatcttcgtgctgcagaccttcgccgttcagggtagtacgaccggaagtcccgccaatcaggaagccgcgagcctgctgatcgccagccgcccagcacagatcgccgatacgctggaagccgaacatcgagtagtagatgtagaacgggatcatcggcaggttgttggtgctgtaagaggtcgcagcagccagccaggatgcgcctgcgcccagctcgttgatcccttcctgcagaatctggcctttctcgtcttctttgtagtaagcaacctgctcacggtcctgcggggtatactgctggccgttcgggctgtaaataccgatctgacggaacagaccttccataccgaaggtacgcgcttcgtcggcgatgatcggcaccagacgatctttgatcgacttgttcttcagcatcacgttcagggcgcgaacgaaagcgatagtggtagagatttctttgttttgctcttccagcagcgcgctgaagtcggccagggtcggcagctcgagtttctcagtgaacttcggctgacgagtcggcagatagccgttcagcttctgacgctgagcgtgcaggtaagtgtgctcttcggaaccttccgggaaggttacgtacggcagtttttcgagatcggcatccgccaccggcacattgaaacgatcgcggacgtagcgaacaccgtccatgttcattttcttaacctggtgcgcgatgttcttaccttcagcggtatcgcccataccataacctttaatggtatgcgccaggatcacggtcggctgacctttggtctcctgcgctttcttcaatgcagcgtagactttcttcggatcgtgaccaccgcggttcagagcccagatctgctcgtcagtccagtcagcgaccagggcagcggtttccggatatttgccgaagaagtgctcacgaacgtaagcgccgtctttggatttgaaggtctggtagtcgccgtcaacggtttcgttcatcagctgaatcagcttaccgctggtgtctttacgcagcagctcatcccaacggccgccccagataaccttgataacgttccagccagcaccaccgaagatgccttccagttcgttaatgattttgccgttaccggtgaccgggccgtccagacgctgcaggttgcagttgatgacgaagaccaggttgtccagtttttcacgggtggcgatggtgatagcgccttttgattccggctcatccatctcgccgtcgcccaggaaggcgtaaacggtttgttcggaggtgtctttcagaccgcggtgttccagatatttcaggaatttggcctgatagatagcgcccaacggccccagacccatggatacggtcgggaactgccagaattccggcatcagtttcgggtgcggataagaggacagacccttgccgtgaacttcctggcggaagttgtccatctgctcttcggtcagacggccttccaggaacgcacgtgcatatacgcccggagagatgtgaccctggaagtacaccagatcgccgccatctttctcagtgcgcgcacggaagaagtggttgaagcagacttcgtagaaggtcgcggaagactgataggacgccatgtggccgcccagttcgagatcttttttcgacgcgcgcagaacggtcatgatggcgttccagcgaatcgcagaacgaatgcgacgttccagatccagattgcccgggtattccggctcatcttcaacggcaatagtgttgacgtagttgccggcggaagcgcctgcagcaaccttcactccgcctttacgggcttcagaaaggagttggtcaatcagatactgagcgcgctcaacaccttcttcacggatgaccgattcgatcgcctgtagccagtcgcgagtttcgatcggatccacgtcattgtgtaaacgttctgacatgggggtattccttatctatctaatcgttgattaatctggaacctgtcccattgaactcttcgttcttcacgctggaacaaccaaaaattcaataagacaggttctgcgtttagttgccgcgctctaaaaatggcgcttaagaaccggagttctcgtcctttcgttgctgtaaacgacgcagtgagcgctctcgacggctctgctcacgactacgatccagcaaaatttcctcaatgaacgccaggtgacggtgcgacgcttcacgcgcctgctccggctccccggccattatcgcctcgaaaatgcgagtgcgatggttgctgaccaacgggagcatttcccgccgggcatacagcaattcaaagttctgacgcacgttttgcgccaacatcggctccatacaccttagcagatgaagcaacaccacattgtgtgccgcctcggtgacggcgatttgatactggacgacggcgccggactcagcgtccaaatcgcccgactgctgagcgcgttcaatagcctgatgcagctcacggatacggtcgcgatcctcatcattgctgcgcagcgccgcgtaataggccgcgatgccttccagcgcgtgacgggtctcaagcagatcgaattgggattcagggtgatcggacagcagctcaaccagcggatcgctgaagctctgccacaggcggctctgaacaaacgttccacctccctgacgacgaagcaacaagcccttggcttcgaggcgttgaatcgcctcacgcagcgaggggcgggaaacgtcgaactgtttagccagttctcgttctggcgggagtttttcaccggggcgcaaggtcccctcaagaatcagaaactccagctgctgctctatcacatcggataattttggttggcggattttgctgtaggccatattccctgtctctgccattagcccggagtcaattggtcttaccaatttaaagttcgtagcgctaaagtaacaaagtattcaccttctgtccatacaggttttgattgaaatcagtaaacccgggacattttaacaaccttacagaaataacatttcagaaatgtaaccttgcacaaatgttacgtttactcacaaagaggtagccttaactttatagaaacgaaaaattacgctttctgaaccgattcaacgctgcaataaatgaatacagagtcatttacagtgaataaataatgacaaagcagcatgcatcaaaatacgacagattgtgactattgatgtctttttagacacatcgtcatcatcccttcataaagcaggtgcattcaaacgcgcttaccactattctgccggagacgaaaggcctttttcggaattaccacacagccttccgtaaacaaaacaatacagaaacggaagttcctgaatacacaaacacaacaatatgtgcgcgccatcactcaggtaaaaagtgggccacttcgcccaaattttcgctggctatgctttcaggcagggacagcagtgaagcagcaacctgacggatgacgtacacaaaaaataaccacacacgaggtttcatatggaaggtcaacagcacggcgatcggctgaagcgcggcctgaaaaaccgtcacattcagctcatcgcgctgggcggggctatcggcaccggcctgtttctggggagcgcgtccgtcattcagtccgccggcccgggtatcattcttggttacgctatcgccggttttatcgctttcctgatcatgcgtcagctgggcgaaatggtggtggaagagccggtggccggctcatttagccactttgcttacaaatactggggcggttttgccggcttcgcctccggctggaactactgggtactgtatgtcctggtggccatggcggaactgaccgccgttggcaaatatatccagttctggtggccggaaatccctacctgggcctcggcggcggtcttcttcatcgccatcaacgccattaacctgaccaatgtcaaagtgttcggtgaaatggaattctggttcgcgattatcaaagtggtcgccgtagtggcgatgattttgttcggcggctggctgctgttcagcggcaacggcggcccgcaggcgacggtacgtaacctgtgggaccaggggggcttcctgccgcacggcttttacgggctggtgatgatgatggcgatcatcatgttctcctttggcggcctggagctggtggggatcaccgccgcggaagcggataatccggagcaaagcattcctaaagccaccaatcaggttatttaccgtattctgatcttctatgttggttcgctggcggtgctgctctccctgctgccgtggacccgcgtcaccgcggacaccagtccgttcgtcctgatcttccatgaacttggcgatacgctggtggcaaacgctctgaacgtggtggtgctgacggcagcgctgtcggtttataacagctgcgtctactgcaacagccgtatgctgttcggccttgctcagcagggcaacgcgccaaaagcgctgctcagcgtcgacaaacgcggcgtgccggtgaataccattctcgtctcggccctggtcactgcgctgtgcgtgctgatcaactacctggcgcctgaatctgctttcggtctgctgatggcgctggtggtctcggccctggtcatcaactgggcgatgatcagcctcgcgcatatgaaattccgtcgcgccaaaaagcagcagggcgtggtcacgcgtttcccggccctcttctatccgctgggcaactggctgtgcctgctgtttatggcggcggtgctggtgattatgctgatgaccccggggatggcgatttccgtctggctgatcccggtatggattgcggtgctgggcgtgggctacctgtttaaagagaaagccgccgccaccataaaagcacaataatacatctcatcaatacttcactttgctctgcgccctcccctgaataatgggcgcagagcattgttatctgcttcacactttcccctccatagcttatttatccatatcgtcaacgagttcctgcaacgtatttctgccaaccgcagccaataattctctccatactgcaacggagagaccgcacatggcagagaacacgctttcaataagagaaaagattggttacgggatgggtgatgccggatgcaatattatctttggcgccatcatgctgtttgtgaactatttttacactgatatattcggactggcgccggcgctggtcggcgtacttctgctctcggtgcgagtcatcgatgcggtaaccgaccctatcatgggcgctcttgccgaccgcacccgtagtaaatatggtcgctttcgtccatggctgctgtggatcgccttcccctacgccctgttcagcgtcctgatgttcaccactcctgagtggacctacaatagcaaagtcatctatgcgtttgtgacctactttctgctgtcgattacctataccgcgattaatattccctactgctcgctgggaacggtgatgaccgccgatccgaaagagcgtgttgcctgccagtcttatcgtttcgtcatggtgggtatcgccacgctcctgctgtcattgacgctgctgccaatggccgactggttcggcggcgccgataaagcgaagggctaccagatggcgatgaccgtgctggcctttatcggtatgtgtatgttcctgttctgcttcgccaccgtgcgcgaacgtatccgcccggcggtgcagacgaatgacgaactgaaaaaagatctgaaagacgtctggaaaaatgaccagtgggtgcgcatcctgctgctcacgctgtgcaacgtctgtccgggctttatccgcatggccgccaccatgtactacgtcacctgggtgatgggacaaagcacccattttgccaccctgtttatcagcctcggcgtagttgggatgatgattggcagcatgctggcgaaagtcctgaccgaccgctggtgcaaactgcaggttttcttctggaccaatatcgtgctggccgtgttctcctgcgccttctatttctttaatccacacgccaccacgctgattatggtgctctacttcctgctcaacattctgcatcaaatcccttccccgctacactggtcgctaatgtccgacgttgacgactacggcgaatggaaaaccggcaagcgcatcaccggtatcagcttctccggtaatctgttcttcctgaaggtcggcctggcggtcgccggggcaatggtcggtttcctgctgtcatggtacggctacgacgccggcgcgaaagcgcaaagcgcctccgcgctgaacggtatcgtgctgctattctcagtcattcccggcgtcggctatctgatcaccgccggcgtggtgcgtctgctgaaggttgaccgtaccctgatgcgccagattcagagcgatctggagaagcgccgcagcaactacagcgagctgaacgaataccaggaactgaaaaccagtgaacacgtaaggaaagcctgatgaacaactggccaaacccctttattgaacagcgtgcagacccctttatcctgcgccatcttagccactactactttattgcctcggtgccggaatacgaccggctggagatccggcgcgcggtaacccttgaaggattacgcgatgctgagccggtcgtggtttggcgcgcgccgcaaagcgggccgatgagccagctgatttgggcgccggagctgcatgaaatagacggtaaatggtatatctattttgccgccacccatactcacgatctggatgcgctggggatgttccagcatcgcatgttcgttctcgagtgcgctgacagcgatccgctgaccggccgctggcaggaaaaaggccaggtggtcacgcctttcgataccttcgccctcgatgccaccacttttacccatcaggggaaacgctggtatctgtgggcgcaaaaatccccgcatatcgaaggcaactcaaacttgtatctcgccgaaatggctaacccgtggacgttaaaaggcgagccggtcatgctgagcaagccggagttcgactgggagtgccggggatttaaggtcaacgaagggcctgcggtactgatgcatggcgataagctatttatcagctattccgccagcgccaccgatgaaaactactgcatggggttgttatggatcgaccggcaggccgatccgctgcagccggcaaactggcataaagctccgcagccggtgttccgcaccagctatgaaaaccgccagtatggcccaggtcataatagttttacccaaacgccggaaggggaagatgtgctggtgtatcacgcgcggaattacactgagatagaaggcgacccgctgtatgatcccaatcgccatacgcggttaaagctggtcagctggcgggaagacgggatgcccgacttcggtattccaccggcggatacgctgtagcggttcggaatgttacccgctggcgcgggttctccaggccgggtcaggcgaagccgccacccggcaacatgaccagcacggcgtctgatatatcgcccggcggcgctgttgcttgccgggcctacgtgacgtgagcctgcgggtgactcgccaggccggataagcgcagcgccatcaggcaacaaaagccccgcaggtacgtacatcgtggcaggcagcgcgcgggctcaggccgttaaaccagggtaccgtaaatcgtcagcagcgccataatcaccactaccaccagcgaagtcttcttagccatcgataccgcagccttcggcgtcgctactttatccacgtgcggctcacgggccagggaatactgcgccaggcgggtcaacacctgatactgcgacgaatggcggtcgcccagcgaagcaaaccacgccgggagcgctttttcaccatggcccaccagggcatagaccacccccaccagacgcaccggcagccagtccacaatatgcaggataccatcgatcccggactgcaaccggtggtgcggcgtctggtagcgcgccagccatgtctgccaggcgcgcagtacgctgtaggcgataagcgtcagcgggccccaggcgccccccacgacaaaccagaaaagcggcgccagatagtatcgatagttaatccacagcagcgcattttgcagttcgctaaggtactcacgctcatcacagcccggcggcacgccgtgaataagcgtcagctcgctggccatggcatcgcaggcgcgactgtcattgcgcgacgccgctttcagataggcatggtagtgcagccgaactttgccggcgccaatgcatagcaggcccagtaaaatccagaacaccagcagcggtatgttaaacagctgcccctgcagcagacgctgaatgatatacacgaccgcgacagccaccagcgtcatcagtagcgtgcccggtaacgagaaatgttttatccggcgaaacgccacctccagccgatgatcaagctgccagtgttcgcccagcttaaacagccgttcggcgataagcaccaacagcgtcgtaaacagcgtcatgaggtctccttttctgacggggcgctgagcagcgcacggtattttatccagtcaaaggccggtcctggatcggttttccgcacgggcgcgatatcgctgtggcccgcaatgttttcggcgatagccggataaagcgcgatcagcagatccgtcaccgccgccagctgccggtactgcgcgtcggtatacgccagagtatcggtgccttccagctctatgccgatggaaaagtcattgcagcgttcgcgtccctgataacaggagacgcccgcatgccacgcccgcttatcgaaaggcacatactgcacgatttcgccatcacggcgaatcagacaatgcgccgaaacgcgcagatgagcaatctcggcaaagaaaggatgcgcgtgcggatccagggtaccagtgaacagcgcatcaatccacggaccaccaaattcccccggtggcaggctaatgttatgcaccaccagtaaggaaggggtctcttcatccggacggcagtcatggtgcggcgagggaacccgacgcgcgccgaccaaccacccctcgttcaactgcatgcgggatctcctttcgcgaactcatgcttccgggccacacgccggcccaaaggatgaagtgtgtatggtactgaaacgtcgttcaggttagcatgtttcccacttctgaatcttatctatctggagctttatcatgtcgcctcgtcgttacaaccccgaccgccgccgtgacgtgctgctggaacgtattaatctcgatattaccgatgctgtcgcacactccctgcgggaagatctgggcggcgaagtcgacgccaacaacgatattagcgcgcaattattgccgcaggatgcacgctcccatgcggtggtcattactcgtgaagatggcgtcttctgtggcaaacgctgggtggaagaggtctttattcagctcgccggtgacgacgtgaatatcacctggcacgtggccgacggcgatgcggtcaaagccgaccagccgctgttcgaattggaaggcccgtcgcgtattctgctcaccggcgaacgcacggcgctgaactttgtgcaaaccctctccggcgtcgccagcgtcgtccgtcgctatgtcgacctgctcgccggcaccaaaacccaactgctggatacgcgcaaaacgctgccagggctgcgtaccgcgctgaaatacgcggtactctgcggcggcggcgccaaccatcgactgggcctgttcgacgcgttcctgattaaagaaaaccacattatcgcctccggatcgatccgtcaggcagtggaaaaggcgttctggctgcatcctgatgtgccggtggaagtggaagtggaaaccctggatgaactggagcaggcgttaaaagccggggctgatatcattatgctcgataacttcaccaccgatctgatgcgcgaggcggtgaaaattaccgcaggccaggcggcgctggaggtctccggcaacgttacctttgacaccatccgcgaattcgccgataccggcgtcgactatatttccgtcggcgccctgaccaaacatgtgcaggcgctcgacctgtcgatgcgcttccgctgagcaacaggccttcacgcttccgggcgtgaaggcctgaatttgcggcccgcctcgcagtcgcccgtgctcaccatgaaatccagataaaaaccctggaacccgctttcccggatcgttttcgccccctcgcctgcgcccctcaatcccttcacagtgctcctgtcacaacaaggagcgacttatggataaacaacgaggttttaccctgattgaactgatggtggttatcggaatcatcgccattcttagcgccatcggcatcccggcctaccagaactacctgcgtaaagccgccctcaccgacctgctgcagacctttgtcccttaccggacagccatcgaactttgcgcgctcgatcatggcggcctaacgccatgcgacggcggcagcaacggcattccctcgccgacaaccacgcgctacctctccgccatgagcgtggccaaaggggtcgtcaccctcaccggtcaggagagtctgaacggactgggggtcaccctgacgccgacctgggacaatgccgagggcgtcaccggctggcagcgcgtctgcaccatcaccggcaatagcgcgcttcagcaggcctgcgaagacgttttccgggtgaagtgagggctaatgcatgaaaacagaacagctgatccccctctgccgtcgctaccacgccatgctgctgcatagcgatgaacagacaatctctattgcggtggttaataccccgccggcggagttgatggaggcgctacgcttcgcgacgcaaaagcggatcgacattgaatgctggagccaggagcagatggataagcgtctgcaggcccaggaaaagcaggcgcaactggcgcagaacgacgggccggaaaatatcgccgaacgggtcaaccagatcctcgaacaggccctgcgtcagcgggcgtctgatattcatatcgagcccacggaaacgcacttacgcatccgcctgcgggtcgatggcgtccttcacgccctaccgttgctggctcccgaactggccgcaccggttatcgcgcgactcaaggtcctggccagtctcgatatcgccgagcaccgtttaccgcaggatggccagttcgcgctgaatcttgcgggacgaccgctctcttttcgcatcgccactctgccctgccgctatggcgaaaagattgtcctgcgccttctgcatcaggttgaccaggcgctggatctggaagcactcggactctcatcctcccagctggcggcctttcgccaggcgctgaaccagccgcagggtctgctgctggtcaccggcccaaccggaagcgggaaaacggtgaccctctacagcgccctgcaggccagaaaccgtgagcaagtgaatatctgtagcgtggaggatccactggagatccccatcgccgggatgaaccagacgcaaatcaatccccgcgccggactcacttttcacagtgtgctgcgcgccctgttacgcccggatccggatattgtcatggtgggcgagatccgcgatgccgagaccgctgaaatcgcgctcaaagccgcccagaccggtcatctggtgctctccaccctgcacaccaattccaccagcgaaaccctgacccgcctgcagcaaatgggcatcgcccgctggatgatttcctctgcgctctcgctggtcatcgcccagcgtctggtccgcaagctgtgtccccactgtcggcgtaatgccggcagcgccgccgacctgccgcacagcctgtggccccgcccgctgccacgctggcaggcagcgggctgcgaacattgttaccacggatattacggccggctggcgctgttcgaagtgctgcctgttacccccgggctacgccaggggatagtccagggacttaacgccattgagattgaatctctggcgcgagccgcagggatgatgacgctttttgaaagcggctgtcaggctatcgaacagggattgaccagcctcgaagaggtggtgcgggtgctggggatcccccatggcgactaagcgtctctggcgctggcgcggtatcgatgtgcagggcgccccttgtcaggggatgctatggcaaaccaagcgtctggaggtcctgcagcacctccaacagcagcgagttataccgctggctgtacgccgctgtgcggtgaagcagagcctctggcacccgcgctacagttgcgaaacgatccgccagctggcgaccctgctgcaggccggcctgccgctggcggaagggttatcgctgctggcgcagcagcagtcgcatgcccagtggcaggcgctgcttgaggcgctaggccgcgagctggcccagggcgtggcgttctctgccgcgctggcgcagtggccccaggcttttccgcccctatatctggcgatgattagcaccggcgaactgacgggcaagctcgatatctgctgcctgcagttggcgaatcagcagcaggagcagcagcggctcgccagcaaagtcaaaaaagcgctgcgctacccgctgatcgtgctctctctggcgctgttggtggtgctggggatgctctattttgtcctgcccgagttcaccgccatctaccagacgttcagtacgccgctaccgctattgacgcggatggtcgttgcggcaggcgacatgctaagtcgcggctggccgctgctgctggcctcgctgctgagcccgctgctgctcaaccagctgatccggcggcgcagcgactggttgctgcgccgccagcggttgcttaacgcgctccctctcattggctccctgatcggcggacaacagctgagcctgatcttcaccatcctggcgttaacccaaagcgccggtattagctttctgcaggggctgcaaagcgttgaagagtccctgtcgtgcccgctgtggcgccagcgtctggcgcaggcccgcgcgctgatcgttcagggggagccgatttggcaggcgttaagccgctgcggcggttttacaccgctgtgcctgcagctcatccgcacgggggaaagcgcgggagcgctggatcagatgctggaaaacctggcgcatcaccatcgccagcaaacctatcagcgagccgatagtctggctgcgcatcttgaacccatgatgctggtgataaccggctcgctggtcgggattctggtggtggcaatgtatttgcccgtttttcacctgggcgatgccattggcggggcgggaggatgagaaacactggcgccgcgcaggcgccagtgcagccgattacaggctattgaatacccggttctcttgttcctgaacgcggataaaggtcgtacgcttggtcagctctttcagacgcgaggcgccaacgtaggtgcaggcagaacgcaggccgccgagaatatcacgtgcggtattctccaccggtccacgcaaaggcagcttaacggttttgccttccgccgcgcggtatttcgcgacaccgcccacatggcgggtcatcgccgactcggagctcatgccgtagaacagcatgaatttctctccgttctcttcaacgatggttccgccgctctcttcatggcccgccagcatgccgccaagcatcacgaaatcagcgccgccgccgaaggctttcgccacatcgcccggcatggtgcaaccgccgtcgctgatgatctggccgccaaggccgtgcgccgcatcggcacactcaatcacggcggagagctgcggatagccgaccccggtcttaacgcgggtggtgcagacggatcccgggccgatgccaactttgacgatatcggcgccggagaggatcagctcttcgcacatttcaccggtgaccacgttcccggcgatgatagttttttgcggccaggcttcgcgcgccttcgccacgaactgtacaaagtgctcggagtagccgttggcgacgtcgatacacacaaaattcagctgtgggttctgagagaggatctgctgggttttttcgaaatccgcatcggacgtgccggtggaaaccatcacatgcttgagtacgtctgcggatgcgccctgggtaaacgccagccattcttcagcggtgtagtgcttatgtaccgcggtcagaataccaaaagtggccagcgctttagccatgctgaaggtgccgacggtatccatgttagccgcaataatcggcacgccggaccaggtcaggcctgaatgtttaaaggtgaattcacgttccagctcaacatcagaacggcttttgagggtagagcgtttcgggcggataagaacgtctttgaaaccaagcttcagatcttcttcaatacgcatgtgcgaattcctggggttaatggcatgaatgtgagagcacaactccagtgacgttatcatacgcgcgaatcaggcccgcgcaagactgcgattttcactttttttacgctacaatcgtataaatttacctggtgaatggagaaaaaggcgcctatgccttcccctgccggagtattgtttttaaccatttgatttgcttgattaaaacaaacagtatagcggacggcgatcccggttggcgcggggtcctcacgacatgctcactgtcgcctccccggcgcgctgccagtcatcgctgtctgcctgcaaaaaatacgagcaatccgtttcagggtcagaagatatggggtacacagtcgcgttaacaggcgggatcggcagcggtaaaagtacggtcgccgacgccttcgcgcagcttggggttaaggttatcgatgccgatgttatcgcccgtcaggtggtcgagcccggtaccccggcgctccaggccattgtcggccactttggaccacagatgattgcccccgacggcacgctgaaccgccgcctgctgcgggaaaaaatttttgctcacgtggaggaaaaagcctggctcaatgcgctgttgcacccgctgattcagcaggaaacgcgccgccagatgcaggccgccacctccccttatctcctctgggtcgtacctttgctggtcgaaaaccgcctgtccggccaggccgatcgcgtactggtcgtcgatgtgccgaaagagacgcaaatcgaacgcaccatgctgcgcgataaggtcagccgcgaacatgctgaacatattcttgccgcccaggccacgcgccagcagcgcctggccgtcgcggacgatgttattgaaaacactggcacgccggatgcagtggcatcggatgttgcccgcctgcacgaaaagtatttaacgctggcatcgcaggccgcctcacaggaaaactcgtaatgcatacccccgttctgtttgaacatcctcttaatgagaaaatgcgcacctggctgcgcatcgaatttctgatccagcagatggctttccatccgcagattgccagccatgccgatgcgctccattttttccgtaacgccggcgatctgctggatgtcctggagcgcggcgagttgcgcactgacctggttaaagagctggaacgccagcagcgtaagctccagtcatgggcagaagtgccgggcgtcgatcaggagcgcattaacgagctgcgccaccagttgaagcagtcctccagcaccctgatggccgcgccgcgcattggtcagtttctgcgtgaagatcgcctgattgcgctggtgcgtcagcgcctgagtattcctggcggctgctgcagcttcgatttaccgaccctgcatatctggctccatatgccacaggcgcatcgcgacgagcaggtggccagctggcttgccagcctcgatccgctggtccagtccctgagcctgatcctcgatcttatccgcaactccgcgctgttccgcaaacagaccagcctcaacggcttttatcaggataatggcgaagatgccgatctgctccgcctgcgtctcgatctggctcaccagctttatccgcaaatttccggccataagagccgtttcgccatccgtttcctggcgctggacagtgaatatggaatcgtgccggagcgctttgattttgaactggcctgctgttaaggagataacatgtcagaagagactatcgtcaactgcccgacctgcggcaaaactgtggtgtggggcgagcagagtccgtttcgtccgttctgtagcaagcgctgccaactgatcgatctgggagaatgggctgcggaagagaagcgcatccccagcgcgggggatctctccgatagcgatgactggagcgagcagcaaccctgatttgatggcaagctaacccggcgcctggcgggttagcctcgcgccccggggctcagccctgggcgataagtttgctgataaccggttcattcgccggaggaaacgccgccggatccaacgttggtcccgccatccaccgacccggctgcccttctttaccccacggctcgccttgccaactttccacgaggaaaaaccacagcgtaatatggcgatcggggaactgatactccagcttatcaaagagcgaagaggtggtgaccgtaatcccaacctcctcctgcagttcgcggattagcgcctgctcaggcgtctcatcagattcaatcttcccgcccgggaactccagcttattcgccatatgggcatcggcggcgcgctgggtaataaagatttcgccttgcggattgcgaattatcccgacggcgatttgcagttttttcattgaatgcgctccataaaaaaggcgcagaactctgcgcctttgtttgttttatcagaccttagctcagacggccgtggcactgtttgtactttttgccggagccgcacgggcacggatcgttacggcccactttacgttcgccggtttgcgccgccagatcctgggctgcggcttcatcatcgctctgatggctgagctgctgcatctgcgccaggcgctcggcctcttcacgacgctgctgttccatcgcctcgacttcttccggcatccgcacctggactttgctcagggtgctgatcacttcatacttcagtgactccagcatcgcggcaaacattgagaacgattcgcgcttgtactcctgcttcggatctttctgcgcatagccgcgcaggtggataccctggcgcaggtaatccatcgccgccaggtgctctttccacagcgaatccagagtctgcagcatcacgcctttctcgaagtggcgcatcatctcggcgccgaccacttcttctttacgctggtaggtttctaccgcgctctgcagaatacgttcgcgcagggtctcttcatgcagctccggctctttatccagccactctttgattggcaggtcgagatcgaagtcgtttttcagacgctcctgcagaccttcgatatcccacatctcctccagcgactgcggcggaatatgggcatcgatcgtcgccttaaagacgtcttcgcggatgctgttgatggtttcgctgacgtcagacacgtccagcagctcgttacgctgggtgtagatcgcccggcgctggtcgttggccacatcatcatattccagcagctgcttacggatatcgaagttacggctttccactttacgctgggcgttggcgatcgccttggtgacccacgggtgctcaatcgcctcacctggtttcattcccagtttacgcatcatgccagacacgcgatcggaggcgaagatacgcatcagggcatcttccattgacaggtagaagcgggaagaaccggcatccccctgacgaccagcacggccgcgcagctggttatcgatacggcgagattcatgacgctcggtaccgatgatgtgcagaccgcctgcggccagtaccgcatcgtggcgtacctgccagtcggctttgattttctcaatctgctctggcgttgggttttccagcgcagcgacttccgcctgccagctaccgccgagcataatatcggtaccacgacccgccatgttggtggcgatggtcaccgcggaagggtagcccgcctgggcgacgatatccgcctcgctggcgtggaatttggcgttcaggacgttgtgcttgatgccagctttagtcagttcgcgggaaaccacttcagatttttcgatcgagatagtccccaccagcaccggctgaccggcagcggtacgagttttgatatcttcgataattgcctgaattttttccgcttcggtcatatagaccagatccgccatgtctttacggatcatcggacggttggtcggtacaaccacggtatccagcttatagatagagctgaattcaaaggcttcggtatcggctgtaccggtcatccccgccagcttctcgtacagacggaagtagttctggaaggtgatagaggccagagtctggttctcgttttggatctccacgccctctttggcctcaacggcctggtgcagaccatcggaccagcggcggccctgcatcgtacggccagtgtgctcatcgacgatgataacttcgccatctttgacaatgtagtcaacgtcgcgggtgaacagcgcatgggcgcgcagcgcggcggtaacgtggtgcatcagcataatgttggttggagagtacagggactcaccttcatccataatgccttcctgtaccagcagctcttcaatcagcaccagaccacgttcggtcaggttaacctgacgcgctttttcatccaccgagaagtggccttcgccagtgaaagtgtccgaatcctctttttcctggcggatcagatgcgggatgattttgtttaccttgcggtacatttcagagctgtcttccgccgggccggaaatgatcagcggcgtacgcgcctcatcgatcaggatggagtccacctcatccaccagcgcatagtgcagtttacgctgaacgcgctcttccgggctgaaggccatgttgtcgcgcaggtagtcgaagccgtattcgttgttggtgccataggtgatatcggcagcgtaagcttcacgcttcgccggcgccggcaggccggacatgttgatgccaactgtcatgcccaggaattcaaacagcgggcggttattttcggcgtcacgctgggccagatagtcgttgacggtcactacgtgaacgcctttgccggttagcgcgttgaggtacgccggcagggtcgcggtcagggttttaccttcaccggtacgcatctcggcgatgcagcgatcgttaagcaccataccgcccagcagctggacgtcgaagtggcgcatgccgaatacgcgcttactggcttcgcgaacgacggcgaaagcttcagggatcaggctttccagcgtttcgcctttttccaggcgcgcgcggaattcagtggttttcgctttcagctcgtcatcagagagcttttccatcgccggttccatgccgttgatgatattgacgactttgcgcatacgacgcagcgtacggtcgttacggctgccgaaaaccttggttaacattttgataagcataataaaatctcaaacgccccgcggtgcggagtcacaaaaaataggatggtccgtggttattttcagctgagacgttgaggccctgcgcggatccccgccacctggcttatccaggcgctgacgcggaaggcagaatatgaagaagggatgtaacccgcctggcggatcaccaccggcggcgtgctgtcctgcgtcagcagcgcgctgagggtgtcgagcagcgccagatgctgagcctgcagcggggaagtttcttccgccaccggcagcgcctgcggcgccatggcgaaggagagatgacgaataacggtgcgaatggcgtgctgatgccagtagtcgacggtaaagctgggccggcgattcgtctccagaagcgccagctgagagaaattaaccttgctcggattgtgattgctggcggtcgccttcgctggcgccgcggtctcgtgaccgttgcttagcgcaggcaggccgaggctggccgcgaccatccccaacaggagatgcggccaaaaataccgtctgccaaactgtcgccagcgcgtcagcaatccactcacgttcattacctttctttgctagacccgtcgtcgttcaggctgtctctttattaatgtttttcgcaggacaacctgatgtccacggggtaaagcaaccctgagaaataattttgcgctcaaatactaacattaataccggcctgaggcagcatgaatgaaggcgattgcccggcgaaaacgcttaataaagcagcgaacgcacgctaattattatccagggatcgcagcgaaaataactggagggtgctataaaagaaaaacgactggctccctggtcggagagagtaccaggttaccagtcgaatttactgaatggtcaggcttacgccagaaccattgacggtgcgcggaacgccattggcagttttgcgtcgtcttcgaaggtcacatactcccaggcttcctgttttgccagaaccgcctgcagcagtttgttgttcaacgcgtgacccgatttgtacgccgtgaatgcgccgataatgttgtgaccacacataaacaggtcaccgatcgcatccagcattttgtggcgaacaaattcgtcttcaaagcgcagaccgtcttcgttcagtacgcgataatcgtcaacaacgatggcacaatcgaagctgccgcccaggcacaggccgcgggactgcagatattcgatatcgcgcataaaaccgaaggtacgcgcacggctaatctgacgcatgaacgcatcggccgagaagttcagcgtatagcgctgggtgctggcatcaatcgctggatggttaaaatcgatggtgaagtccagcgaaaaaccattgtacggtttgaattcagcccatttgtcgccatcttcgacgcgaaccgtctctttgatacgtacaaatttcttggcgcagttcagttcatcaatgccggcgtccagcaacagataaacgaacggagccgcactgccgtccataatcgggatttccggcgcatcgacttcaacaataatgttgtcgatacccaggccagccaatgcggcgttcaggtgttcaaccgtagaaatccgcacgtcatgctcattaaccaggcaagtacagagcatggtatcacgcacagatttggcatcagccggaaaatctaccggtggattcaagtcggtgcgacgatagatgaccccggtatttgccggcgcagggcgtaacgtcagtgtgactttcttgccggtatgcaaaccgacgccagtcgcctgaacgatacgtttaagagtcctttgtttgatcatcgtataatctcgccaatttacctatccaaccgaagtgtacaccactatcgggaggccagtttagcacaaagagcgcagatgcccaacttccagtcgattcttaatcggcttgcttacgcaggaaggctgggatatccagataatccggctctttcgcggtttgcggcgtattgtcgttcaccactttggctgccggcttctgctcttgcgtcagcggcgacataccatgctgctggtaacgatccatcaccggctgctgaacctgcttgttggttaccagggtgatttccggacgcttatccatgccaataccggtcgccactacggtcacgcgcagctcgtcgttcatatccgggtccagagaggtaccgataaccactgtcgcattatccgaggcaaaagcacggatggtgttacccacagtttcgaactcgtccagacgcaggtcgaagcccgcagtaatgttgaccagcacgccgcgcgcgcctgacaggtcgatatcttccagcagcggagaagagatagccatttcagccgcttcttccgcacggtcttcaccgctcgccaccccggagcccatcatcgcgtagcccatttcagacatcacggtacggacgtccgcgaagtcgacgttcatcagacccggacgggtgatcagttcggcgataccctgcaccgcgcctttcaggacgtcgtttgccgcgccgaatgcgtcgagcagggaaattccacgacccaggaccttcagcagcttgtcgttcgggatggtgatcagtgagtcaacgtgcttggacagctcggtgatcccctgctcagcgaacgccatgcgcttcttaccttcaaaattaaacggcttagtgaccaccgcaacggtgaggatccccagatctttcgccacttccgcgactacgggcgccgcgccggtaccggtaccgccgcccatgcctgccgcgatgaacaccatgtctgcgccatcaagggctgcgcgcagcgcttcacggtcttcatcagccgcgttacggccgacttccgggttcgcgcccgcgcccagacctttggtaataccgctaccgatctggatagtctggccaaccgccgtcttacgcagcgcctgcgcatcggtatttaccgcgaagaattcaacaccctcaatgcgctcgcgcaccatgtgttcaacggcgttaccgccgccgccaccgacgccgatgactttaatcaccgcgtcgttggtcagttccataggttcaaacatagtttctctccgtcttgtgcctgtcgcctgagaacgctaattgtctgcgttctcttaaaaaattaaaactcttttcgcagccagctgttgagtcgcttaatccacgagcccactgaggccgtcacgcgtttttctacttccgcttcaccactgagatgtgactcttttccgtagtgcagcagccccaccgccgttgaataatacggctcctgggcatagtcggttaaaccggtgatgttcagcggcgcgccaatgcgcacctgagtatggaacacgcgctgcgcacaggccgccagaccttcaatttgcgccgcgccgccggttaacacaatccccgccgccagatgatgtttaacaccctgctggcggagctgttcctgcagctgcaggatctcttcattgaccaggttaagcagctcggtatagcgcggttcaatcacctctgccaacgtctgacgctgcaggctacgcggcggacgtccaccaacgctcggtacttcgacgttttcgtctttaccgacgatggaacccaatgcgcatccgtgacgaaccttaatcgcttcggcatcgctcggcggcgtaccgaaggcataggcgatatcgctggtcaccacgttaccggcatacgggatcactttggtgtgacgcaatgcgccgccggtgtagacggcgatatccattgtaccaccgccgatatccacaacgcagacgcccagctcacgttcgtcttctgttaataccgaataactggccgctaacccggcgaaaataagttggtcaactttcagaccacaacgttccactgctttaacaatgttttttgccatatcgttatggcaggtgatcagatgcaccttcgcctgcatacgcacgccggacagccctaccgggtttttaatcccttcctggtagtcgatagcatattcctgcggaatcacgtgcaggacacgatgttcatcgcgaacgcgaaccgacttcgcggtgtggaccacgttctcgacgtcgtcctgcgtcacttcttcttccgaaatcggtaccatcccgatttcattctgacagcttatatgtttacccgaaagtgccaaataaactgatgaaatctggcaatccgccatcagttcggcctggtcgatggcgcgctgtacgcatttcaccaccgactcgaggtcgttcacaccgcctttatccataccacgcgatgggcaactgcccacgccgatgatattgatcatgccgtcgggcagaacttcccctactaaagcggccaccttggcggtgccaatctccagtccaactaccagttttctgtccgtcgccttgatcattgttgttctgcctgtgcctgattctgttgttgattagtttcctctgcgggagcaggtacccagcccactgccgcacccgagtcataacgcaaatcaacgtagctaatccgtttgccgtcggtctgcgcctgctgctgaagaaccgggtagagttccataaagcgctgaagccgtttcatggtatcgccacggccaaggttgagcttgatgtcattattaagcgtcaactgccaggagcgacgggcggtcatcgccgccactttcaacgtgaatttatcctttgccagcacctgccccatgtcacgatacccctgcagcacttcgttctcgctgccttcgggaccgtataacatcggtaaattctgtttgctggtgcgatccgccggcacgctgaaggcatttccttctgcatccaccatatgttgatcattccagcgcgcaatcggcacatattcaaccagatgaatcttcaattcatcgggccactgctttcggacgctcgcctgcttaatccacggcagacgttcaatctggctctggatgatgttcacatcctgagtcataaaggtacccggcgaacccagcgccaggatcgcctgacggatgtcatcattgcgcgtatagtgacgctcgccggtcaccaccatcttcgacagcggtaagcgctgcgcatcttccatccagccaagaaccatccacccgctgaccagcacggtaaacagcaccgccagcaggaaaacgatccctgccagccgcgttccattactccgacgcgaagaagaagcctcttcttcatggttccgcgtattcagcgcagcctgcgacatatcaccccgccaggtccagaattcgtacaacaagctgggagaagctcattcctgcctgacgcgccgccattggcacaaggctgtggctggtcatgcccggggaagtattcgcttccagcagataaaactggccatcgctgtccagcatcacgtcaatacggccccagcctttgcaacccagaacattccaggctttaagcaccaggttctgaatagcggactcacgcgcgggatcttcaaatcctgggcagaaatattgcgtctcatcagagagatacttcgcctcataatcatagaaggttcccgcggcctggatacgtattgacggtaaaatttcttcaccgactatggcgacggtaaattccggtccactgagccatttttcgaccaaaacttcatcatcatgctgaaaagccaacgccaatgcacttgctaaatcacaactttcgctgactttcgacatcccgacgctggagccttcacggctcggcttgatgatgaccggcagacccagcgccgcaatttgctgttcgacgtcagtagacagcccggcggcaaactgggcgcgggtcagcgccacccacggcgcgaccggtaatccggcgccctgccacagccacttgctgcgcagcttatccattgaaatcgccgaagccatcacgccgctgccggtataaggcagctggattaactccagcagcccctgcagagtgccatcttccccgccgcggccgtggagggcaataaacgctttcttaaagccctgcttttttagctgggtaatatcaacatcgcgcgggtcgaccggatgggcgtccaccccgccttcacgcagcccggccagcaccgccgcgcctgaattcagcgacacttcacgttcagcggaggttccaccgaaaagcaccgcgattttatcagccatggcgctcctcctccgttttttgcgggatcagtttgatttcagccaggtggcgggcgattttaccgatgttaccggcgccctgcaccagtactaaatcgttgccggtcaggactgacgccagcatctccgcggcctgggccgaatcgggcaccaggatcggatccactttcccgcgaccgcgaatggtgcggcacagcgagcggctgtcggcgcccgggatcggcgcttcgcccgccggatagacgtccagcatcagcagggcatccacctgggtcagcacgttggcaaaatcatcatacagatcgcgggtacgggtataacggtgcggctggaataccatcaccaggtttttatccggccagccggcgcgcgctgctttaatggtggcgtccacttccgtcgggtggtgaccgtaatcatcgatcagcatcgcgctgcccggtttgccgttgacttcggccagcggaaactcgccaagaaaatcaaagcggcgtccagttccctggaagctctccagtgcgcgcagaatagcccgatcgtcaatcccctcttccgtcgccacggcgacggccgccgccgcgttcagcgcgttatggcgtcccggggcattgagcgtcacctgcaggatcgctttatcctggcgtaccaggcggaaatgcccctgcgccccaacctgacgatagtcctcgacgcgcacgtcggcgtcgtcgctaaaaccgtaggtggtgatctgccggccaacgcgcggcagcagttcccggatcaccggatcgtccacgcacatcaccgcgcgtccgtagaacggcaggttgtgcaggaagttgataaatgtctgcttcagattctcaaagtcgccatggtaggtatccatgtgatcggcttcgatgttggtgacaatggccaccatcggctgcagatgcagaaacgacgcgtcgctctcatccgcttccgcgatcaggtaacggctatggccaagacgggcatgtacgcccgccgcttttaccagtccgccgttgacgaaggtcgggtccagcccggcctcggcgtaaatgctggataccatcgcggtggtggtggttttgccgtgggtcccggcaatggcgatcccgtggcgaaagcgcataagttccgccagcatttcggcacgacggatcaccgggatacgcgcctcatgcgcggcaacgatttccgggttatctgccgaaatcgcgctggaaacgacaaccacgctggcatcacgcacgttttccgggcgatggttgaaataaatggtggcgccaagctgcgacagctgctgggtcaccggattcggcgccaggtcggagccgctgatctggtaaccttcgttagccaacacttcggcaataccgcccataccggcaccgccgatgccgacaaagtgaatgtgccgaacgcgacgcatctcgggcactatggaacgcagttttgccaaatcttgtgtattcattctttacgccatcaacttctgtattcgggcggtgaaaatcaccgcaattagcgcgccaaagctacggcgctgacctcttctgctacccgctcggtagcgtccggaatcgaagcgccacgcgctcgttccgccatatccagcaaggtttcccgatcccagctcgccagggtagaggcaaccgcctctaccgtgaactcaggctgttcaagaattttcgccgcgccggctttctccagcggcagcgcattccagtactgctgacgatctttgtgctggaacgggacaaacagcgctggtaaacctgcggccgcgatttcgctaaccgtcagcgcgccggaacggcaaaccacaacatctgcccaggcatacgccgcggccatgtcatcaataaattccgtcactttatgctgcggctgtccggcggcggcataggcctgctgcacggtttgctggccgcctttgccgctttgatgccagatggtcaccgtagcgccgagcttcgccgccacctgcggcatcgtctggttcaggacgcgcgcgccctgagagccaccgaccaccagcacgcgaatcggtccctgacggccaaccagacgctgacctggcagcggtagcgccagtacatctgtgcgcaccgggttcccaacgacgtccgcatgcgggaacgcgccgggaaacgcctgcatcactttcttcgcaatcttcgccagccacttgttagtcaggccggcaatgccgttttgctcgtggaggaccaccgggatccccagcgaccacgccgccagaccgccaggcccggaaacatagccgcccatgcccagcaccacgtccggctggaaacgcttcatgatcgcccgcgcctgacgccaggcgttaaagatacgcaccggcgccagtagctgcgctttgatacctttgccacgcaggccggagatgcggataaaatcaatttcgatgccgtttttcggcactaaatccgcttccatacgatcggcggtacccagccagcgaacctgccagccctggtccattaaatggtgcgcgaccgccagtcccgggaacacatgcccgccggtaccgcccgccatcaccatcaaccgcttttcctgaccgctcatcgcacaccccgtgtaaacgcctgggctttttccagacgcgtttcataatcaattcgcaacaacaacataatggccgtcgacataatcaacagactggaaccaccataactgatcagcggcagcgtcagacctttcgtcggcagcatccccgccgccgcgccgacgttaactaacgcctggaagctaaaccagataccaatcgcacaggcgaggaagccggaaaagcgatgatcgatctccagcgctttacggccaatcgacatggcgcggaaagcgacgaagaataccattaaaagcgccagtaccacaccgatataaccgagttcttcgccgataatggcgaagataaagtcagtgtgcgcttccggtaaatactccagtttttgcaccgagttgccgaggccctgcccccacatctcgccgcggccgaaagccatcagcgactgggtcagctggtagccgctgccgaacgggtcttcccacgggttccagaaggaggtcacgcggcgaatacggtatggttcggcgaggatcagcaggaccaccgccgaaatacccatgccgataatggcgatgaactgccacagcttcgcgccggcgagaaacagcatcgccagcgtggtgacgaacaggaccaccacggtaccgaggtcacgctgcgccagcagcaggatggccagtacgaaaatcacgcccatcggttttaagaagccgcgcaggttgttacgcacttcgtcggctttacgcaccagatagttggcgatgtagcagaacagcgacagcttggtgaactccgccggctgaatacgcagcggaccaagggctatccagcgcgatgcgccgtttaccgagctgcctactaccagtacgatcagcagcatgacgatcgaggcgatcagcatcgcggtactgtggcgctgccagaaatccatcggcagacgtagcgtaatcatcgccagcgcgaaggccagcacaatgtacaggccgtcacgcttggcgaagaggaaaggatcgttcgccaggcgctgtccgaccggcatcgacgccgaggtcaccataataaagccgatcgccgccaggccgaaggtcagccatagcagcatccggtcatacatcaccagactgtcgttatctttcgggcgcgagcccatcacccagcctttcagcgcagcgaatagccaggcgaaaataaacatccccggcaatcgcggcagtctcagccgaggcaggctcagctgcggcattctcaggcgtgggagagagaaacgcatcaacctaactccttcgccagacgggcaaacatctcgccccgttgttcaaagttcttaaactgatccaggctagcgcaggccggcgacaggagcaccatgtcccccgctttcaccaggggagcaatctgacgcatcgcctgttccatagtctcagtttgtaccgccacctcaggacgcagctcagcgagctcggcgccatcgcgaccaaagcagtacaggcgaatacgatcgccgccgaggtagcgcttcagcggggtaaaatcagcggacttgccgtcgccgcccagcagcagatagagcgtgccgtccagctgcaggccgttcagcgccgcctcggtgctgccgacgttggtcgccttcgagtcgttaatccagcgtacgccgttgtgatccagcaccagctggaaacggtgcgccagaccggtaaaggtggtcagcgccttcaggctgctggcccgcggcagacccgcggcatcggccagcgccagcgccgccagggcgttgctgtagttatgctgaccggtgagaggcatctctttcacattgaggactttctcacctttaacgcgcagccaggtttcgccctgctggcggttaaggtggtagtcaccgacatcgacgccaaagctaatgcagcgttcgtccgccccgcgtaccggcatggtgagcgcatcgtccgcgttcaccacgcaggtcttcgcattctcgtaaatccgcagcttcgccgcgcgatactgctgcagtcccagcgggtagcggtccatatggtcctcagtcacgttgaggatggttgccgccaccgcctgcaggctggaggtggtttccagctggaagctggagagctccagcacatacagctctcgatcggtgtccagcaacatcagcgccggcaggccgatattgccgcccacgccgacgttaactccagcggctttcgccatctcgcccaccagggtagtaacagtgcttttgccgttagaaccggtaatggcgataatcggcgcctgcgcttcgcggcagaacagttcgatatcgccaacgatctctacgccagcgtcggccgctgcgctgagcgaaggatgggccagcgcaattcccggactggcgacaatcaggtccgccgccagcagccaggtatcattgagtccgccgacatggcattcgaccgattcgggtaatttatccagccccggaggcgcgacgcgggtgtccatcacgcgcggggttacgccgcgcgccatgaaaaagtccacgcatgacaggcctgtcatgcccagcccaattatgacgacttttttaccctgataatctgccatgattaacgtaccttcagcgtcgccaggccaatcagcaccagcatcagcgaaataatccagaagcgcacgataacgcgcggctccggccagcctttcagttcatagtggtggtggatcggcgccatgcggaagatgcgctgaccgcgcagcttaaaggagccgacctgcagaataaccgacagcgtttccaccacgaaaaccccgcccatgatcaccagcaggaactcctgacgcagcagcacggcgataatgcccaacgcgccgccgagcgccagtgaaccgacgtcgcccataaagacttgcgccgggtaggtgttgaaccacaggaagcccagccccgccccgacaatcgccgtacagacgatcaccagctcgccggcgtggcgcagatacgggatatgcaggtagttggcgaaattcatgttgccggtggcccatgccaccagcgcaaagcctgccgcgacgaaaacggtcggcataatcgccaggccgtcgaggccgtcggtcaggttgacggcgttgccggtaccgacgataacgaagtaggccagcaagatatagaacagcaccagctgcggcattacgtctttaaagaacggcaccaccagctcggttgccggggtatctttccccgccagatacagcgcgaaggccacgcccagggcgatcaccgacatccagaaatacttccagcgggcgatcaggcctttggtatctttgcgcacgactttacggtaatcatcaacgaaaccgatgatgccgtagccgattaataccgtcagtacgcaccagacgtacgggttagatggataggcccacagcagaacggaaacggtgatcgcggtgaggatcatgatcccgcccatggtcggagtaccgcgtttactgaaatgagactccgggccgtcgttacgtacgacctggccaaaggcgagtttttgcagacgggcgatcatgcgcgggcccatccacaacgagatgaacagcgcggtcagcaggctgacgatggcgcgaaacgtcagataagaaaagacgttaaagccggaataatatttgaccaagtgttcggccagccatactaacatgtcccagtctcctgtaatgcgcgtactacctcttccatggcggcactacgtgaacccttcactaaaatggtcattattttgtgctccgccagcagctcgcgcaggcgagccaccacggcggctttatcgttaaaatgttcgcccacgccgctggcgcggctgatatccgcgctcaaggcgccgacgctgaggacgcaatccagccccgccgctttcgccgcttcgccgacttcgcgatggcaggccgcgctctccgcgccaagctctgccatatcgccgaccaccatcgtgcgaaagccgggcatctctgacagcacctgcaccgccgcggtcatcgaaccaacgttagcgttataggaatcatccagcagcagctggctctcggtcagccggatcgggaacagacgtcccggaacggcctgcagctgcgccagtccggctttcaccgccgccaaatcggcgcctaccgccatcgccagcgaagtggcggccagcgcattagcgatgttgtggcgtcccggcagcggcagcagtacgtcaacgttgccggttggggtctgcagcgtaaattcggtgccgtggctggtgatctgcacgttggtcgccgtgaaatcgctgttcgccgcgttcggcgagaagcgccacactttgcgatcgccaatcaccgcctgccagttcagccagtcgttattgtcggcattgaggatggcgatgccattttccggcagaccggtatagatttcgcccttcgccttcgccacgcccgccagcgaaccgaaaccttccaggtgcgccgcagcaaggttgttgaccagcgccgcttccggacgcgtcaggctgacggtccaggcgatttcgccctggtggttggcgccgagttcgatcaccgcgtactgatgctctttggtcagccgcagcagcgtcatcgggacgccgatatcgttgttcaggttgccggcggtatacagcgtgttgccgcactggctgaggatcgccgcggtcatctctttaaccgaggttttaccggacgagccggtcagggcgacgacgcgagtcggcacctgctgacgcacccaggcggctaactcaccgaaagcctgccgggtatcgttcacaatcacctgcgggagatcgcaggccagcggacgactcaccagcagcgcgccggcgcccgccgctttcgcctgttcggcaaaatcatgggcgtcgaaacgctcccctttcagcgccacaaacaggcagcccgccgtcactttacgggtatcggtggtcacctcgtcgatagcgacatcgctaccctgccgttcgccatgggcgatcgcggcaagttgacttaacgtaaagcgaatcatgctaccgctcccagcagacgcgcgacggtcacgcggtcggaataatccagacggcggttgccgacgatctggtaatcttcatggcctttacccgccaccagcaccacgtcgttctctttcgcctgcatcacggcgttggtcaccgcttccgcgcggccttccatcaccttcgcctgacctgcatcgagcatgccggccagaatatcgttgataatcgcccgcggctcttcggtgcgcgggttatcgtcagtaacgaccacgatgtcggcaaattcttccgcgatagcgcccatcaacggacgtttacctttgtcgcggtcgccgccgcagccgaagacgcaccacagcttgccgctgcagtgcaggcgtgccgcctgcagcgctttttccagcgcgtcaggcgtatgggcataatctaccaccacggcaggtttacccggcgcgctgaacacttccatacggccgcacaccggctgtaaacgcgctgcgctcttcagcagatcggccagcggatagcccagcgccagcagcgtggccagcgccagcagcaggttgctgacgttaaatgcgcccatcaggcggctttcgatttcgcccttgccccagctggagtcaaactggatggtcgccccgctgtcgtgatagttcaccgcggtggcctttagccagcggccgtggcaattcgggttgatatgatcttccatcgataccgccaccgcgtccggcagttttgccagccagcgacgaccgacttcatcgtcagcattgacgatggcctgaccgcaatgatgggtggagtacagcatccatttcgccgcttcgtagtgctccatgtcgccatggtagtcgagatgatcgcggctgagattggtaaacaccgaggcggcaaactgcagggccgctacgcggtgctgtaccagaccgtgggaggagacttccatcgcgccgaaggtagccccctgcccgaccagactggagagcacatgttgaacgtccaccgcggaaccggtggtgttttcagttggaacgactttatccagcagaccgttaccgacggtccccatcaccgcgctggtttcgccgagcagctttgcccactgcgccagcagctgagtggtggtggttttcccgttggtgccggtgacgcccaccagacgcagctgctgcgacggctgatgataaaaacgcccggccagcgccgataagcgttcgttaagctggctcaggtagataaccggcacgccgtgtatttcacagatctcaccgtctttagcttcgccctgcgcttcagcaataatggcagccacaccttgcgctatcgcctgcgggatataacgacgcccgtccgcctgatgaccctgtaccgcgataaagagatcgccggaagcagccacccggctgtccagcgtcatctctcgcagaatgcgctccggtgcgtttggcacccatggagcgagtaggtcgcgcaaattacgatctgccacctgttccctcgccttgattaattacaaattcacttttttcgcccgttgccagcgcatccggctcgatgttcatggtgcgcaatacgccgcccatgatggcaccgaagaccggcgcggaaacggcgccaccgtagtatttacctgcctgcgggtcgttgatcaccaccaccagcgcgaagcgcggatggctggcgggcgcaacgcctgcggtgtaagcaatatatttgttgatatagcggccatccggccccacttttttcgccgtaccggttttaatcgcgatacgatagcctttgatcgccgctttcacaccgccgccgccgggcagcgccacgctttccatcatatgaacgacggtacgaacgagtgattccgggaagacgcgctcgcccggaaccggaggatcaaccttggtaatcgacaacgggcgatagatgccatagctgccaatcgttgcgtagactcgcgctaactgtaacggggttaccattagcccatagccgaaagaaaaggtggccctctctatgtcagaccaccgttgtttttgaggatataagccactgcgttctccgaccaaccccaaattggtcgcctttccaagcccaaaacgtgagtaagtatctactaacgctgaggacggcatcgctaacgccagcttagaaacaccgacgttactcgacttctgtagcaccccggtcagggtcaattcgctgtagcgcgccacgtctttgatttcgtggccgttaattcgataaggcacggtattgagcacggtattttcgttgacgataccgcgctgcagcgccgtcatgaccaccatcggtttcaccgtcgaacccggctcaaacacgtcggtaatcgcacggttacgcatggtgtcttttgccgtaccggcgaagttgttcgggttataggatgggctgttggccatcgccagcacttcaccggtgttaacatccactaacacggcgctgcccgactcggctttgttaaaggccacggcgttgtttagctcgcgatagaccagcgcctgcaggcgttcgtcgatactcagcgccaggttgtgcgctgcctggctatcggtagaagagatgtcttcaattacccggccatagcggtctttacgtacgatacgctcgcccggctgaccggtaagccatttatcaaagcttttctcaaccccttcaatcccctggctatcgacgttggtaaagccgatgaggtgagcggttacttccccggaagggtagtaacgacgggattcttcgcgcagatgaatgcccggcagcttcagcttcttgatgtaatcggccatgtcagggttaacctgacgcgccagatagataaaccgcatccgcggattggtattgatgcgcgtcgccagctgatccagcggcatattgagggcatccgccagcgctttccagcgcgtatccagggtaaccccgccggcgtcatggagctctttcgggtcggcccagatagccttcaccggcacgctgaccgccagcggacgtccggagcgatcggtaatcatcccgcgcgcggtggacacttcctgtacgcgcagagaacgcatatcgccctggcgcaccagcatatcggggctgatcacctgtagccaggcgacgcgacccagcagaaaagccagcgccagcagaatacagccgcacagcaacgcaaaacgccaactgataaagttggcctgttcttcctgacgttttgctttaggcgtttttggcgctgctttcatccgtcgcaataatccttatttctgtacaacgatattttcttgtgatggatcgacgtgttgcatctgtaacttctcggtcgcgatccgctcaacccgactgtgatcgccgagcgcgttctcttcgaggatcaggttgcgccactcaatatccagggcgtcgcgctccagaaccagctgttcacgctgcgcggtcaacaggcgcgtgtgatgcgcagtggtgaccacggtaatcgccgtaataatgatgcaaatgaacaggcagagtggcagtttcccaaaccgcagaaggtcgtccccgatcacgccaggcaaagcatggcgctcgttgcttccaatcgaccctttaaccttgcttaaggcctctgtcactctgccgatcatgcgttcgtcctctctgcgatacgcagcactgaactacgggcgcgtggattctctgccacctcttcttcgcccggcatcaacttgcctagtgctcgcaactcacggccgcccagttttttgagctgcgcttcggtcatcggtattcccgccggaacctgcggaccgcggctttgctcacgcataaagcgcttcacaatgcgatcttccagcgaatgaaaactaatgatcgacagccgcccgcccggggccagcacgctgagcgagctttttagcgcctgctctatctcctccagttcactgtttacccatatgcgcaccgcctggaaggtacgggtcgcgggatgtttgtgcttatcttttaccggcatcgccgcggcgatgacttccgccagctctttggtgcgggtcatcggctgaatgcgattacgttcgacgatcgcgcgggcgatacgtttgccgaaacgctcttcgccaaaggttttaatcacccaggcgatatcgtcttcttcagccgtctgcagccattcggccgcggactgaccgcgcgtcggatccatgcgcatatccagcggcccgtcacgcataaaggaaaagccgcgttccgcatcgtcaagctgcggggaagagacgccgagatcgagcagaatgccgtcgatcttaccggtaagattgcgctcgccgacgtactcagcgagttgtgaaaagggaccatgtacgatggaaaagcgggggtcatcgatggtttgcgcgacggcaatcgcctgcgggtcgcgatcgatagccagcaagcgtccttccgcacccagccgggagaggatcaggcgcgagtgaccgccgcggccaaaagtaccatcaatatagataccgtctggacgaatattgaggccgttgacggcttcatccagaagtaccgtagtatgtttataattttccatcatttttataaggacaaatcctgcaggcgctccgacagttcaccggtcgcggactgctcagcgtcgatatcttccttgacccgttgataccaggtcgtttcatcccacagttcaaatttattaaactgcccgaccagcatcacttcttttgtcagcccggcatgctgccgtaacaccggcgcaatcagcaagcggccggcattatccatctgacattcgctggcatgacccaaaagcaaacgctgtacgcgccgctcaacgggattcatgctcgataaacgcgacaatttctgctcgatgacttcccattcaggcaatggataaagcagcaggcacgggtgatgaatgtcaatggtgcataccaattgaccggcagcgtcctcgatcagcccttcgcgatagcgcgttggcacggccaggcggcctttgctgtcgagattgactaacgttgctccacggaacatgccagcctcaccccttttcgccactttaccccacaaattcccaccagaaggagtttacggagcggaggaaaagcttgtcaagccagcacggatgccaacggagctcaaaaacccattatttacagccgacattagccctgatgaaaaaatcatcaacaggcgaggcaaattaacgttatgaatacgtgtaagaaaataaccaacaaactcgtaacagttataaacaacagaatatcttcggcgggaaaatataaagtgtcagtttgcgacgcgagcggcattttaggccattatgccggccgttaacagtacctgttgctggcagagggactggccaggcgcgggatatgacggggaagaaagcgtggcgcgtacaaaatgagtgttaattcagcaattaacctgatgaatgtaacaaaataatacaattaaagtccgcgcagtcattttttgtaccccatttggagtcacaaaacgatggtcagtgaataaaataaaataacgagtaaagaagtttagggatttgtctgaaatatattcagttttgcattttgcacgtcaattgcctgatttatcgccagcggcctgcttacggtcaggcctgccaggtttatacctgggcgctggcgatatggcgcccttagcggcgattcaggctaccgcgacgatagagattacggcgaatacggctaagacccggcttcggcttgcgaggttcgtcgaggctggcgaggacaatctccagcacccgctcagcgacatcgcgatgacgctgggccacggccagtaccggacactgcagaaaatcgagcagctcattatcaccgaaggtggcgatcgccagctcggagggcagtttaccctcgcgacgcaaggtcacatccattacgccctgcagcagcgggaaagaggtggtaaacagcgcctgtggcatcggatgggtttcaagccatttctcaaacagctgggccgccgcttcgcgctcatagctgttggcatagagataatgcacctcacgcggatcgtcctgccaggctttacggaagccctgttcgcgcaggaagctcaccgacagctccggcagcgcgccgagatagagcaccgtttcgccaggaaacgtccgcagctcagctgcgagcatctcggcgtcatcctggtcagcgccaaccacgctggtgaagtgctcgcgatcgagggcgcggtcgagggcgacaatcggaaacgggtcgttagcccagcgctgataaaaaggatgctccggcggcagcgaagtagagacaatgatagcgtccacctggcgctgcagcagatgctcgatgcagcgcatctcgttatcgggctgatcctccgagcaggcaatcagcagctgatagccgcgctgacgcgcctgacgttcgagataatttgcaatccgggtatagctggtgttttccagatccgggatcaccagaccgatagagcgtgtgcgtcctgcacgcaggccagcagcgaccgcatttgggtgatagttgtgctctcgcaccacagccatcactttttcgaccgttttatcgcttacgcggtactgcttcgctttgccattaatcacatagctcgcggtggttcttgaaacaccggccagccgggcgatttcatccagtttcacaattgccccttgggtaagaagtgccaaacataaccattattcaggtatggaatcctttttataacatctaagcgcagaatagttagcgcagcaaccgctttcgcttacagttcctactgatttcgcaaaaaaaaagcccgacagtctctgccgggctatttttacagcagttcccgatccttagcgcatgattttatcaccgcgagacaggccgaccacgccggagcgagccacttccacaatccgagcgacatcgcgcagcgaggccagaaatgcatccagcttatcgctggtgccggcgagctggacggtatagatagaaggcgtcacgtcgataatctgtccgcggaagatttcggtgttgcgcttcacttcttcacggccatagccgctggcctgaaccttcaccagcataatttcgcgttcaacatgagccccctgccccagctcgctgacccgcaggacatccaccagcttgtgcagttgcttttcaatctgctcaatcgctttttcatcgcccacggtctgaatggtcattctggagagagtgggatcgtccgtcggcgcgacagtcaggctttctatattatagccacgctgggaaaagaggccgataacgcgggacaatgcacccgattcgttttccagtaataccgataatatccggcgcataatcaggtcctctccgttttgctcaaccacatttcatccatgccgccgccgcggatctgcatggggtacacatgctcactgccgtcgacggtcacatcgacaaacaccagccgacgctggcgcacctgctccagagcttcagcaagcttcgtctccagctcctgcggctcgctgatgcggatcccgacgtggccataggcttccgccagacggacaaagtccggtagcgattccatataggactgcgagtgacgcccggaatagagcatatcctgccactgcttcaccatcccgagatagcggttgttgaggttaagcaccaggaccggcagctcatactgcagcgcagtggagagttcctgaatgttcatctggatactgccgtcaccggtcacgcagaccaccatttcgtccggcagagccattttgacccccagcgcagccggtaggccaaagcccatggtgccgagaccaccggagttaatccagcgccgcggtttatcgaaggggtaatacagggcggcgaacatctgatgctgacccacatcggaagtgacgtaggcatcgccctgggtcagccgccagatagtttcaattaccgcctgcggtttgattttatcgctctggtcgtcgtagcgcagacaatgacgggcacgccactgctcgatctgttgccaccagtcgcgaatgtcgtccagcggctgctgcgcttcctcctgctccagcagctccagcatctgctccagcaccagccgggcatcgccgacgatcggcacatctgccggcacggttttcgagattgaagtcggatcgatatcaatatgcagtaccgtcgcgttcggacaatacttggccaggttattggtggtccggtcgtcaaagcgaacgccgacggcaaaaatcacgtccgagtggtgcatggtcatgttggcttcataggtgccgtgcatccccagcatccccagcgcctgcgagtgtgtcgccgggaaagcgccaagtcccatcaaggatgaggccaccggcagcttcagtttttccaccagctcgcgcagctgaggttcgcaatgcgcattgatcgccccgccgccgacgtagacgaccggcttacttgcggccaccagggtctgcagggcgcgtttaatctgccctttatggccactggtggttgggttatacgagcgcatgctcactgcgtccggccagacgtaaggcagcttcttcgccggattgagaatatccttcggcagatcgaccactaccggaccggggcgaccgctggccgccagccagaaggctttcttcagcacgccgggaatatcttcggtctgcttcaccaggaaactgtgcttcaccaccggacgggaaatccccaccatgtcgcactcctggaaggcatcgtagccgataagcgaggtggctacctgccccgagaggatcaccaacggaatagagtccatataggctgtcgcaatgccagtgatggcgttcgtcgccccaggcccagaggtcaccagcaccacgccgacctccccggtcgcccgcgccaggccatccgccatatgcaccgccgcctgctcgtgacgaaccagcacatgatcgataccgccaagggtatgtaacgcatcatagatatcgaggactgcgcctccgggatagccgaatacttgcttgacgccctgatcgacaagcgattggacgaccatctcggctcctgacaacatctccatggtttgcctccaggcttattgttttacgacagcggaactcaatttccgcgcgctcgcacgatgcgaaggagtggtcctccgcattgaggtgaatgtactgcatgccactaccataactgctcgccagcaggcaggcaattcgccgcagctgaggccttatttcttgaataagaagaaaagaaagcggtgaggggaaaatatggtgaattgcttcagagataagaaaagagaatggtaaatactcggcgaaaaagggtgataacaggaatagatccatttttcacgaacacaacgaacccctcgcgcaaggtaaacagaataaaattctgctttatttgatttatgtcatataaaaaaaggagccgaagctccttgctatctatcgtcgtcgggtcagcgcttgcaaatgtccaccaacagctcttccatccactggtggcctttatcacgaccagcggcttcgtgccaggagagatagcaggtccgactgttgaccttcaacggcaaaggtaatatttgcagggcaagcttgtcagcaaattcatctgccagccagcgcggggcaatggccaccatctgggtttgcgatactacgtttaatacgctgaccatcgcattaccctgataggcgatacgcgcttgtttatcggccgtgtcataccacggcaaactaaatgaggcataccggtcgagagcaacggcggcatgctcctcgcgataaatatccgcctccatcatcggcccggaaatacgcggatggttgcgactggcgaccaggaccatttcgtctttaaataacggaacgcaggcaaactcagggcgacggaactcttcataaccgattacgaattctgtttcctgataacgtagctgatgttccgtattttgattcagcgcagacttaaagactaaatgaatattgggtgctatctctgcaactttattaaaaataaccgacgtcaggatgttatccagcgggctgcagacgcacagatggaacacgcgctcactgctcagcggttcaaaaccggagcctggcaattcgttttggaccagctgcagcgcctggcgtaccgagccaaacagctgataggcgcgcgccgtcggctgaataccgcggccatagcgcacaaaaagctcgtcattaaacatcactttcagtcgtgaaaccgcattgctcaccgcgggttgtgacatgccgagcgtatgggcggcacgagtaatattctgctcttgcataaccgcatcaaaaacggtaagcagattgagatcaaccatccgtagttgaggtttaacgacttcctgtccgggggctgatttatattctggagtttcaattaacatatctaattccgccgtcacgatgaattcccttcactaaaccgctataattagcgccgaaaatatcatttaccatgcaaatgacatttacaaaatagcaaaagaaatttttaggaatatatcaaggctatgagtggcagtgaagaaacggtcctgatcaaaaaattgagccgctcaaaccatactgattacttaatgatgataagtgtaaccataatccataaaaataaaaacagcaccacgagttaactgtaacttaagcaataataaagtattttatttttccctccataaaattaacaaatccttatcattgaaaaataatccgctagcgttcgaatacattcacaggaaaaataaatttaatattttcatccagataccgttttttgtcccttcattggcgacacctcttcgacgatgccttgaatgcaaagcactttttcaaatgaaacaaatggggataaaccgccttcggtccaaaataggatcttcggcaaaatggggcttacatcagcacattttgctaattcatttagtcagcccaaaacgctttttccatgccaggggttgactttaaaacagctatccagtaactctaaaagcataacgatttcatctggagtttgatgcaatgattcgcaccgctcgtatcaccagcctactactactaaacgcatgccatttgcgcggtaggctgttgggcgacgttcagcgttaagtcatcttccagcaagactataaaacccgcgccttggcgcgggtttttttatgctcgtcaacaaggcgccaggacacagactaaggatccaaaccatgagccagcaagtcattattttcgatacgaccttacgtgatggcgaacaagcgttacaggcaagcctgagtgtcaaagagaagctgcagatcgcactggcccttgagcgaatgggggtcgacgtaatggaagtcggtttcccggtatcctcaccgggcgattttgaatcggtgcaaaccatcgcgcgcaccattaaaaacagccgcgtgtgcgccctggcgcgctgcgttgagaaagatatcgacgtggcggcggaatcgttaaaagtggccgaggctttccgtattcatacctttattgccacctcgccgatgcatatcgccaccaaactgcgcagtacgctggatgaggttattgagcgcgcgatctatatggtgaagcgggcacgcaactacactgacgacgttgagttctcctgtgaagacgccggccgtacgccgattgccgatctggctcgcgtcgtggaagcggcgatcaacgccggcgccaccaccattaatatcccggataccgtcggctataccatgccgttcgaatatgccaacatcatcagcggcctgtatgatcgcgtgccgaatatcgacaaagcaattatttccgtccacacccatgatgatctgggcatcgctgtcggtaacgccctcgccgcggtccacgccggtgcgcgccaggtagaaggtgcgatgaacggtatcggcgaacgcgccggcaactgcgcgctggaagaagtgatcatggcgatcaaagtgcgcaaagacatcatgaacgtgcacaccaacattaatcatcatgaaatctggcgcaccagccagaccgtcagccagatctgcaatatgccgatcccggcgaacaaggccatcgtcggcaccggcgccttcgcccactcctccggcattcaccaggacggcgtgctgaagaaccgcgaaaactacgagatcatgaccccggaatctatcggcctgaaccaggtgcaactgaacctgacttcccgctccggccgcgcggcggtgaaacaccggatggaagagatgggctaccaggagagcgattacaacctggatcatctgtacgacgcattcctgaagctggcggacaaaaaaggccaggtcttcgattacgatctggaagcgctggcctttatcaacaagcagcaggaagagccagaacatttccgcctggattacttcaatgtccaatccggatccagcgatatcgccaccgcctcgatcaaactggtctgcggggatgagatcaaaaccgaagccgccaacggcaacggtccggtcgatgctatctaccaggcgattaaccgcgtcaccgactacaacattgaattagtgaagtatggcttaagcgcgaaaggccacggcaaagacgccctgggccaggtggatatcgtcgttgactacaatggccgccgcttccatggcgttggtctggcaacggatatcgtagagtcgtcagccaaagcgatggttcacgtgctgaacaacatctggcgcgccgccgaagtcgaaaaagaattgcaacgcaaagctcagaataaagagaacaataaggaaaccgtgtaatgtcgaagaattaccatattgccgttttgccgggtgatggcattggcccggaagtgatgaaccaggcgatgaaagtactggaagccgtacgccaacgttttgccatgcacattaccaccagccagtatgacgttggcggggcggccatcgaccgtcagggaactcccctgccgcaggcgaccgtcgccggatgcgagcaggcggatgcgatcctgttcggctccgttggcggtccgaaatgggagcacctgccgccggcggaacaaccagagcgtggcgcgctgctgccgctgcgtaaacactttaaactgttcagcaacctgcgcccggccaaactgtatcaggggctggaagagttctgcccgctgcgcgccgacatcgctgctaacggcttcgacattctctgcgtacgcgaactgaccggcggcatctacttcggccagccgaaaggccgcgaaggcagcggtcagcatgagaaagcctttgataccgaggtgtatcaccgctttgagatcgagcgtatcgcgcgcatcgcttttgaatccgcccgcaagcgtcgtcacaaagtgacttccatcgataaggccaacgttctgcagtcctccatcctgtggcgcgaaatcgtcagcgagatcggcaaggagtatccggacgttgagctggcgcatatgtatatcgataacgccaccatgcagctgattaaagatccgtcccagttcgacgtgctgctgtgctccaacctgtttggcgacatcctctccgacgagtgcgcgatgatcaccggctcgatgggtatgctgccgtccgccagcctcaatgaacaaggttttggcctgtacgagccggcgggcggttccgcaccggatatcgccggcaaaaatatcgccaacccgatcgcgcagatcctctccctggctctgctgctgcgctacagcctcgatgctgacgaagcggcgaccgccattgaaaacgcgatcaaccgcgccttagaagaaggggttcgaaccggcgacttagcgcgcggcacggcggcggtcagcactgatgaaatgggcgatattattgcccgctatgtcgcagaaggggtgtaatcatggcgaagacgttatacgaaaaattatttgatgcgcacgtagtgtatgaggcgcagaacgaaaccccgctgctgtatatcgaccgccatctggtgcacgaagtcacctctccgcaggcgtttgacggtctgcgcgcccatggccgccaggtgcgccagccgggtaaaaccttcgctaccatggatcataacgtctcgacgcagaccaaagacattaacgcgtccggtgagatggcccgcattcagatgcaggagctgattaagaactgtaaagagttcggcgttgaactgtacgacctgaaccacccgtatcagggcatcgtccacgtcatgggcccggaacaaggggttaccctgccggggatgacgatcgtgtgcggtgactcccataccgccacccacggcgcgttcggtgcgctggcgttcggtatcggcacctccgaagtggagcatgtgctggcgacccagaccctgaaacagggccgcgcgaagaccatgaaaatcgaagtccagggcaaagcggcgccgggcattaccgccaaagatatcgtgctggccatcattggtaaaaccggtagcgccggcggcaccggccatgtggttgagttctgcggcgaagcgatccgcgatctgagcatggaagggcgtatgaccctgtgcaacatggcgatcgagatgggcgccaaagcgggcctggtcgcgccggacgaaaccaccttcaattacgtacgcggccgtctgcatgcgccgaaaggcaaagatgttgacgatgccgtagcgtactggaaaaccctgaaaaccgacgacggcgcgacgtttgataccgtggtaacgctgcaggcggcgggaattgccccgcaggtgacctggggcaccaacccgggccaggtgatctcggtgacggataacatccccgatccagcgtcgttcagcgatccggtggaacgcgccagcgccgaaaaagcgctggcctatatggggctgaaatccgggatcccgctgacggaagtcgctatcgataaagtgtttatcggctcctgcaccaactcgcgcatcgaagatttacgcgccgcggcggaaattgctaaagggcgtaaagtggcgccgggcgtccaggcgctggtggtgccgggttctggtccggtgaaagcgcaggcggaagcggaaggtctggataagatctttatcgaagccggctttgagtggcgcttacctggttgctctatgtgtctggcaatgaataatgaccgcctgaatccgggcgaacgctgtgcctcaaccagcaaccgtaactttgaaggccgtcagggccgcggcggacgcacgcacctggtgagcccggcaatggccgcggcggcagccgttaccggccatttcgccgatatccgtaatctgaagtaaggagaccatcatggcagagaaatttacccaacataccggcctggtggttccgctggatgctgcaaacgtcgataccgacgcgatcatccctaagcaatttttgcagaaggtcacccgcaccggctttggcgcggacctgtttaacgactggcgctttctcgacgataaaggtcaacagccgaacccggagttcgtgctgaattttcctgagtaccagggggcatcgatactgctggcgcgggaaaacttcggctgcggctcctcgcgcgagcacgcgccgtgggcgctgaccgattacggctttaaggtcgttatcgccccgagctttgccgatatcttttacggcaacagcttcaataaccagctgctgccggtgaccctgagcgacgagcaggtcgacgagctgttcaagctggtgcaggccaacccgggcattacgtttgaagtggatctggaagcgcaggtagttaaagccggggataaaacctacagctttaagatcgacgatttccgccgccactgcatgctcaacggcctggatagcatcggcctgacgctgcagcatgaagcggcgatctccgactatgaacgcaagctgccggcatttatgaattaacctttgggcccggtcatttgatcgggctttttattttattgcggagaaaattgcgatctcacgcacaaaaaccaattttaatgtgctgattgtcagaccttaccgccaccctgccctaccgcctaaagaagaattattccgctttcctccccttctccagcactgtttatgtattttccctgcactgcaagtaaaaataaggcacgagtgtttaatataaaaatataagaatgtgaagaaagcgttaatctcatagagaacccctatggctatgcacaaaaaaaagcattatttttcgatttttcccctcgttatcttttgccacagagaaatattaactaaggacacgcctgggccccgcatatcggcctcccggcctcctgtggagagaagagatgagccactatccgcaccttttcagtccgttgaccatcaacggtatgacgttaaaaaaccgcattattatgccccctatgggcaccaatatggccacgctcaatggcgaggtgtcgcaggaacagctggaatactacgaactgcgggccaaaggcggcactgggcttatcaccatcgaaaatatttgtattgatttccccttcgcctccaacggcaccacccaactgcgcatcgataacgatcaatatattccacggctgtttaaattaaccgagaccctgcataaacatggcgcctgcgtatccattcagttaaatcatgccggcgcttccgcttatgcctaccgactggaaggccagacgccgctctcctcttctacaacgccgtcgaagaagcacggtaatattccgcgtccgatgacccatgaggaaatttatcatgcggtagagaaatttggtgacgccgcggagcgcgttcggcgcgcaggttttgactgcgtcgaaattcatgccggtcactcctatttaattagccagtttttatcgccgctgtttaataagcgcactgatgaatttggcggcagcgtcgaaaatcgcactcggatactgagtctgattgtcgataaggttcgcgcctgcgtggggccgcgttttccggtcagcctgcgcatcagcgccgacgacttcctcaagggcggcaataccctcgaagattccctgcgtattcttgagctctgccaggagaaggtcgatatcatcaacgtctctgcggcgcagaacgataacctgaatctgcaaatcgatcagatgtcgctggaggatggctggaagcgctatctctcccgcgcggtgcgcgataaattccataaacccacggtcatcgccggcaatattcgcactccgcaggtagccgaagatatcctcgccagcggcgatgccgatcttatcgccattggccgcggtctgattgccgagccggagtgggtgcagaaagtgcaaggcggaaaagagcgtctgatgcgcaaatgtatctcctgcaacatcggctgcgccgaccatcgcatcgcccgctcgcgcccgctgcgctgttcgattaacccggatattattcacggtgacgcctataaaatgcggcgcgtgaatcgcgacactaacgtggtggtcatcggcgccggcaccgccgggatggaagccgcctgcaccgcggcggaagttggttgccatacctggctgctggaagcgaaaaaccacgttggcggcctcgccagcgaaatctcccgcctgccggagaaaaaacgcatcgctgatttcccgcagtttatgaaaaatcgtatcgcctcgctggacaacctgatgctgcagatcggcaagcgggccgacgtggcttcagtttccgccctgcgtccgcatctgattgtcaacgccaccggctcaacgccgctgctgccgcccattgaaggcttgcgggaaaacattgacgtcgagaacggcaagatcttttccattaccggcatgatcgacaatctggcgaaatttaccgatatcaagggcaaacgcatcgccgtagtcggcgccggcgccgttggccttgacgttatcgaatactttaccgctcgcggcgcacaggcggtgctaatcgagatgcaggacgccgccggtcgcgatctcgacatcattaccaaaaatgccatgttgaccatgctcgacgagcaccaggtcgaacagcacatgaatacccaactgatggcggtcgctgccgaccatttccaggtgaaaaatacacagcaaaccttcgatattcccttcgactacggctttgtctgtctggggatgcgcgccaaccggacgggtctcgacgagatcgagcgctgggccaatgccaataacgtcaaaatcatgaacatcggcgacagcgtgatggcgcgacgcattatcgatggcgtccgcgaaggccgcaacgtactggatgcactggaagacatgggtgcgctgggcagcagcgaagcacaacgaattccctttctaacttattgaggatttttgtcatggcagaacgtattactggacacactgagctgattggcctgatcgccaccccgattcgtcacagcatgtcgcccaccatgcacaacgaggctttcgcccatctcgggctggactacgtctatctcgcttttgaagtcggtaaccaggagctaaaagacgtggtgcagggcttccgggcgatgaagctgcgcggctttaacgtctctatgccgaacaaaaccgagatttgccagtatctcgataaactgtcgccggcggcacagctggtcggggcggtcaataccgtggtcaacgacgacggcgtactgaccggacatatcaccgatggcaccggctacatgcgcgcccttagcgaagccggtatcgatatcatcggcaagaagatgaccgtactcggcgccggcggcgcggcaacggcactctgcgtccaggcagcactggatggcgtgaaggcgatctccatcttcaaccgccgcgataaattcttcgccaacgcagaagaaaccgtggccaagatccgccacaacaccgactgcgagatccatctgttcgatctcgacgatcatgacaagctgcgcgccgaaattgacagcagcgtgatcctgaccaatgccaccggggtcggcatgaagccgttcgaaggccagatgctgctacctgacgacagcttcctgcgtccggacctgatcgtctccgacgtcgtctacaacccgcgcaaaacccacctgctggaagtggccgagaaaaaaggctgccgcacgctgaacggcctggggatgatgctgtggcaaggcgcgcgcgcgttcgaaatctggacgggcaaacagatgccggttgattacatcaagagcattctgttctaagaggcgaatgatgaaaaataaatacatccctactgcggcagggctgtatctcaactacctgatccacggtatgggggtgctgttaatcaccctcaacatggcccatcttcaggaacagtggggaacagacaaagccggcgtatcgatcgttatatcttcgttaggtattggtaagttagcgaccatcgtgaccggatttctctcggatcgcttcggtcgcaagccctttatctatcttgggatccttagctacctgatctttttcgtcggcatcctgctgaccaaaaatatctatctggcttacgtgttcggcattatggcgggcctggcgaacagcttcctcgactccggtacctatccggcgctgatggaatctttcccgcactctgccagccgggccaacgtgctgatcaaagccttcgtctctgcagggcagttcctgttgccgttcattatcagcttcctgatatgggcaaatctgtggttcggctggtcgttcgtgattgcggcagcgctctttgtactgagcgggatttatctgcttaaaatgccgttccctgacagccaggcggcgaaaaaagaggaagcccctacggcacaggcggaaacagccgtccggccacaggctaataagctggatatggtgatcttcaccctgtacggttatatcggcatggcgaccttctatctggtcagccaatggctggcgcagtacggccagttcgtcgtcggcctgccctatgcctcggcgattaaactgcttagcatctataccgtcggctcgctggtctgcgtctttgtaactgccgccttcgtcaaagaggtgtttagctcggccattgcgatgattatttatactggcctgtcgatgatttcgctgctgttggtgtgcctgttcccgacgccgatgatggtgaccggctttgcttttgtcatcggctttgccgccgctggcggagtgctgcagctgggtgcgacaatcatggcgatgagcttcccgaacggaaaaggcaaagcaaccggcatcttctacaccgccggcagtatcgccagcttcacgatcccgttgatcaccgcaaagctttcgcagatcagtattgccagcattatgtggtttgattttctgatcgccgttatcggctttgtgatcgccctgtacatcggctatcgtcaactgcaggctcgggcggcgcaaaaagtgtcacgcaccgcagtcaccgcctgaagtacaacgcgaaaaataatggatacctacatgacaaatgcagtaaccgtaaagaacatcacctttcaggaaggggaaaccctcatttgtgtaccgctgatcggtaaaaccctggatgagatactgggtaacgcccacggcctggtcgatgccggcgctgatattatcgaatggcgcgttgaccactttgcccaggtcagagagatggcccaggtgatggccgcgctggcggaaatccgtggcgcgctgaaagcgcttccgctgctatttaccttccgcagtaagaaagaaggtggcgaaaccgagatcagcgacgaagcctattttgcgctcaaccgcgaggccgcacgcagtggactggttgatgttatcgatatcgaactgttcaatgatgaagcgcagatccgcgcgctggttgacgatgcgcatgccgcgggcgtcaaggtgatcatgagtaatcatgatttccataagacccccgctcaggaagatattatctatcgcctgcgccgcatgcaggatctgggggcagatctgccgaagatcgcggtgatgccgcagtcgccgcaggacgtactcaccttgctcgccgccacgctgaccatgaaagagaagtctgcgacgcgtccgctgatcaccatgtcgatgggcaaatccggtggcgttagccgggtcaccgggcgcttgttcggttcggcgatgaccttcggtaccgttggtcaggcctccgcgccggggcagatcgccatcgctaagctgcgtgaagtgatggatattctctcctgatatccggatggcccggaggtcacatccgggccatccgttaacagatcttctggctgtcgtggataaccacatttttaaatgactccagcgccggagagagccccttgtctttcatggtcgccagatagatatagcggggggggatggtgtttttaatcttcaggatatggacgttgtaataggagagcgcggtgatgcgcggcataatcgcgatcccgtagtcaatactcaccagcccggccatcgccgtatcctcatccacatagcaggcgatctccggcaccagcttttgctgcataaatacattatcgataaacggacgtaagccgctattttctgaaaaatagatatacggataatgaatcgtctccaccagatcgacttcatgttcatatagccgggccagcggatgatcctttgccgtgaccaccaccagttcctgctggatcaccggaataaaatcgatatcgggttcatcggcaatataagagcagatcgccagatcgacttttccggccttcagctcctgcaacagcgtcagcgatgtcccttgagtaaaagaaaaagtcacattgtgacattcaggtgaaagagaatatttattaattaactgtggaacaacatactcccccatcgtgtaaataaaggcgatgcgaatattctctttattctcagcgccatttttttgcaatatcatgcgtccgttctccagcgaggccagcgcatcttcaacatacggcaaaaaacgcttgccgttttgggtaatttttacgttccgcccctgtctggcgaatagcgcgacccctaactccttctccagctccgatatcgcgtggcttagcgagggctgggtgatgcacagactggaggcggcttcggtgtaatgctcagtttcagacagacgtttaaaataataaagttgctttaggttcattatttttacccgtataatataagaataaatgcactgacgctaatataccatgcaagccaccaataatgcgcatgaacgggtaaatatcggcgttacatcaaatattatttgacgaagggcatgaatgtgccacaaggcattgccattcatagatactacctatagctccttgagatatttttgcatattagaatatatgcaaaaatattttaaactttaaaggaactcgctatgagtatgtcaaactctcaggaagtcctcacttccacatcgggggcgaaaaaaagaagccgcgtacggatagttattctgctgctactctccgtcggaacgatgatcaattatctcgaccgtaccatcctgggtattgtagcgccacagttaagcaaagaaatccatatcgatccggcgatgatgggcatcatcttctccgccttcgcctggacttatgcgctggcgcagatccccggcgggatgtttttagaccgctttggcaacaaactgacctatgccctgtcaattttcttctggtcgctgtttaccctgctgcaaagtttcaccctcggcctaaaatccctgctgcttctgcgcctgggactcggcgtcagcgaagcgccctgctttccggccaacagccgcatcgtcagcacctggttccctcagcatgagcgcgcgcgggcaacggcaacatatacagttggtgaatatatagggctggccgctttctcgccgctgttatttttaattctcgaacatcatggctggagaacgctttttttcctcaccggcggattaggtattttatttactttagtgtggtggcgtttttatcatgaaccgcatgaatcgcgcacggctaatcaagcggagctggagtatatcggcgcaaacggcattaacaataaaatccagaacgttccatttaactggcgtgacgccagacgcctgctgggctgtcgccagatcctcggcgccagcctgggtcagttcgccggcaacaccacactggtctttttcctgacgtggtttcccagctacctcgccaacgagcgccatcttccatggctgcacgtcggcttcttcgccacctggcccttccttgccgccgcgattggcatcctcttcggcggctggatctccgaccggttgttgaagcgaaccggctccgtcaacatcagtcgaaagttaccaataatttccggtttattgctgtccagctgtattatcgcggcgaattgggtaagcgccaatagcaccgtaattattatcatgtcggtggctttttttggccaggggatggtcggtctgggctggaccttaatttcggatattgccccggaaaatatggcaggcctcaccggcggcatatttaatttctgtgccaatatggcctcgattatcgcaccactgataattggtgtgattatttccgccacgggtaatttcttttacgcgctgatctacgtcggcctgacggcgctgattggggtgattgcctacatttttatcattggcgacattaagcgtatcgaactcaagtaggcctggtcgccccggcgatgccggggcgagtagtcagatatccttcaccttgctggtcaaaaacagcgtcaccagcgaaatggccgcgatcgtccagtagacgctggcgtgaccatagctctgggacagcgccccctgcatcacgccggcaaggatcacgccgggggaaatactgttggtgaacagggtggtcgccgctcccgcccgtcccggcattaaatcctggaaccacagcatgcctatcccggcgataatgccgataaagatggcattgaacagctgcagagccagcagcgccgtgcgaccatgaaacaggatcagtccggcataaaacagcacgccggcggccaccgccgccaccatcattttacgtttgccaaagcgctttacgtagtagccggcgaggatcatcgccggtatctccagcccggcggcagtgcccatcaggatcccggccaggctgtcgggaagcccgagatcgctgctgatccacagcggcatatcaatgatgtacatggtgttgcaggtccacatcagggtggaggcgataaacagcatacgcacgttcttgtcctgccagccgccggcctgcgctagcgccgccgcctcctccgagggctgttccacacgcggaaccgaaggcagtttgatggcaatcagagcgaggctaatgacaaaaatgcccgccgcaatggagaacatggtggtgaagccatagttgagcgccagcataaaggccagcggcgggccaatcacccaagccagcgacagctgggcgcgcatgaccgagctgaacatcaccacttcccgcgccgagctgtcggcgtactcccgcgccagcgcgaagagctgcggcatggccgcgttggcaatggatgccagcatcacgccgcaggtgatcagcgtcagatagtggcggttgaaggcaaacagcagcgcattacccaccgccatcagacagcagaacataatcaaccgccgccggtcgccgcggctatcggagcgcttggccagccacaggctaaccaggatcccggcgatggcgtttacggtatagaacaggcccacccagaacggttgcgcccccacttcgcggctgagaaacaaactcaacgtcggcgcctgcaacgcgcccgccacgcccatcataaaagcaaccagcataaaggcggcatagacgccgttaagccgtcgtcccatcgtcatcaaccacagcatggaatgtccttaacacacgcgaagaaaacgaaaaaagccagcagaggctttctgctggcgggtgattctatactctatggatttcatgctgcaggacaaaacggttaaccattttgcgccgcgctcgcgctggccctgaaaaggtgagtcccgtagaggcgaatcacgcagcccgaacatacggcccaggaagcatcgacagcgcacctgcagtttgaaaaacgacgagtataacaccaatactcagtcacacatgatgtctgcaagtcaatgatcagaggtcgttgacgtcactccccactgcatcagttcccccagaatttcctgctgtcgtcctgccatcaggcgggccagccaggacgcttcctgcgtcgcagaaaagtagcgttggtagaacgattttgcggtagacctcatcatattcacctcctcgcttcatcgggattcattattggcttaatataggaagtaataaattgctgagttttgcgcaggagttccccttttatgtcttccggccgtctgcaacaacagttcattcgcctatggcagtgctgcgacggcaagtcgcaggagaccacccttaacgagctggcggaaatgctgagctgctcgcgccgccatatgcgcaccctgctcaatatgatggaatcccgcggctggctgacctgggaagcggaggcaggccgcggcaagcgttcgcggctaacctttctctataccggcctcgccctgcagcagcaacgtgccgaagatctccttgagcaggatcgcatcgatcagctggtgcagttggtcggcgataaggctgccgtccgccagatgctggtctcgcatctcggccgcagcttccgccaggggcggcacatcctgcgcgtgctctactatcgtccgatgaagaatttgctgcccggtagcgcgctgcggcgttcggaaacgcatattgcccggcaaatattcagcgccctgacgcgggtaaatgaggaaaatggggaactggaagccgatattgcccaccactggcagcagctgacccccacccactggcgctttttcctccgtcccggcatccattttcaccatggccgtgagctggagatggccgatgtgatcgcctctctgcagcgcagcaatgccctgccgctctattcacatatcgaacgcatcgaatcgcccaccgcctggaccctggatattcatctgcgccagcccgaccgctggctgccctggctgctggggcaggtgccggcgatggtgctgccgcaggagtggcagaccatgaaccacttttcctccatgccggtcggcaccggcccctatgccgtggtgcgtaacaaccagaatcagctcaagatccatgcctttgaggactattttggctaccgggcgctgatcgatgaggtgaacgtctgggtgctgccggagattagcgaagagcccaacggcggcctgacgctgcagggcaataccgaaagcgaaaaagcggtagagagtcgcctggaagagggctgctattacctgttgttcgactcgcgaagcccgctgggggccaacgacgcggtgcgccgctggctaagctatctgtttcagcccgccaacctgctctaccatgcgggcgaacactaccagggcaactggtttcccgcctacggcctgctgccgcgctggcatcacgccagcaaccacgcctgcgagaagccggcggggctggagacagtcacccttacctactaccgcgatcacgtcgaacatcgggtgatcggcgggatcatgcgcgacctgctggcggcgcatcaggtaaagctggagatccaggagctggagtacgatgcctggcatcgcggcgaggtggtcagcgatatctggctcaacagcgtgaacttcaccttaccgatcgaattttcgctcttcgcctatctgtacgaagtcccgctgattcagcgctgcattcccattgactggcaggcagacgcctgccgctggcgagcaggagagtttaatccggccacctggagccagcggctgctggccgggcaacatatcgtgccgctgatccaccactggctgatgattcagggtcagcgcagtatgcgcggcgtgaggatgaataccctcggctggttcgattttaaatccgcatggtttgcgccgccggagccgtaagcgctttccgtcatctgacaaaatcattacactaaggccgttctcaacggggtgctaataaacatacgcaatatcattcaagttgcatcaaggcagcaagcgggtgaatcccctggagcatagataactatgtgactggggtgaacgcgcgaagctaacgcagatgcggcttgaaggatgaagcgtatgggctgagaaaatacccgtcgaacctgatccggataacgccggcgaagggatttgaggctcactcaaaatcctttgccaccccttttttctgaggtgcaaagtgttgaaaaaattactcccgctgctggcgctggtcgccatgcccgctttggctaagcctgttcttaccgtctatacctatgactccttctctgccgactggggccccggcccggcggtcaaaaaagcctttgaagcggagtgcggctgcgagctgaagttcggcgcgctggaagatggcgtttcgctactgaatcgcctgcgcatggaaggcaaaaacagcaaggccgacgtcgtgcttggccttgataacaacctgctggaagccgcggcgcagagtaaactgtttgccaaaagcaacgtacccgccagcgcggtcagcgtgccgggcggctgggataatgacacctttgttccctacgactatggctatttcgccttcgtctatgacaaaaacaaactggctaatccaccgaagagcctgaaagagctggtcgagggcccgcaaaaatggcgggtcatctatgaagatccgcgtaccagcaccccgggactgggcctgctgctgtggatgcaaaaggtctatggcgatcaagcgcccgaggcctggcagaagctggccgcgaaaaccgttaccgtcaccaaaggctggagcgaagcctatggtctgttcctgaaaggggaaagcgacctggtgttgagctataccacctcgccggcctaccacatgcttgaagagaagaaagacaactatgcggcggcgagcttcgccgagggccactatctgcaggtcgaagttgccgcgcgtaccgccgccagcaagcagccggaactggcggaaaaattcctcaaatttatggtatctcctggcttccagaacgccatccctaccggcaactggatgtatccggtgaccaaggtcaccctgccggccgggtttgataccctggtgaagccgcagaccaccctgtcctttaccccgcagcaggtcgccagcgagcgtcaaacctggattagcgcatggcaacgcgccgtcagccgctaaaccttcgcgggctgatgccgggcctgttcgccgctacgctgctgtgcgctgtcgcgctggcggcgtttctggcgctgtggtttagcgcccccggcgcgggctggcaatcggtcttcagcgatagctacctgtggcatgtggtccgcttctccttctggcaggcgtcgctgtcagcgctgatctcggtgggaccagccatctttctcgcccgcgcgctttaccggcgtcgcttcccgggccgtacgctgctgctgcgcctgtgcgcgatgaccctgatcctgccggtgctggtggcggtgttcggtatcctcagcgtctatggccgccagggctggctggcctcactatttcacgcgctcggctggcaatgggagttctcgccctacggtctgcagggcatcctgctggcgcacgtctttttcaatatgccgatggcgacccgtctgctgctgcaggcgctggagaacattcccggcgagcagcggcaaattgccgcccagcttggcatgcgcggctatgccttcttccgcctcgtcgaatggccgtggctgcgccggcacattcccgccgtcgccgcgctgatttttatgctctgcttcgccagcttcgccaccgtgctctcgctgggcggcggcccgaaagccaccacgatcgagttggctatctaccaggcgctgagctttgactacgatccggcgcgagcggcaatgctggcgctgatccagatgctctgctgccttgggctggtgctgcttagccagcgtctgagtaaagccgtcgccatcggcgtcagccatgtgcgcggctggcgcgaccctgacgatcgcctgcatagccgcctgagcgacgggttgctgatcggcgccgccctgctgctgctgctcccgccgctgctggcggtcatcgtcgacgggatcaaccgtaatatgctggacgtgctggcgcagccagcgctctggcaggcattgagcacctctctacgcatcgccatcgccgccgggctattgagcgtgaccctgacgatgatgctgttatggagcagccgggagctgcgctctcgccagcggccgttggccgggcaggcaatggagctgagcggcatgctgatccttgcgatgccgggaattgtgctggcgaccggcttcttcctgctgctcaataacactatcggcctgccggagtccgccgacggcatcgtcatcttcactaatgccctgatggcgatcccctatgcgctgaaagtactggaaaacccgatgcgcgacattgccgcccgctacagcatgctgtgccagtcgctgggtattgaaggctttgcccggctgcgggtggtcgagcttcgcgctctccggcgcccgctggcccaggcgctcgccttcgcctgcgtactgtcgattggcgatttcggcgtggtggcgctgttcggcaacgaggcgttccgcaccctgcctttctatctgtaccagcagataggcgcctaccgcagccaggacggggccgtcaccgccctgctcctgctgctgctctgtttcttgttgtttacgctgattgaaaaacttccggggcgtgatgctaaaactcaatgctgtgacctggctataccagcatctgccgatgcgcttcaccctcgacgtcgcgcgcggggagcgcatcgcggtgctcggtcccagcggcgccggaaagagcaccctgctgaatctgatcgccgggtttctgccacccgccagcggcagcctgctgattaacggcgaggcgcataacgcgacgccgccggcgcagcgtccggtctcgatgttgtttcaggagaataacctgtttaaccatctgaccattcgacaaaatatcagcctcggcatccacccaggccttaaactgagccgcgagcagcaggcgcaggtcacggcgatagctggacagatgggaattgatgcgctgctggaacgtctgcccggcgagctctccggcggtcagcggcagcgcgcggcgctggcccgctgtctggtgcgccagcagccggtgctgctgctggatgaacccttctcggcgctcgatccggcgctgcgccaggagatgctgtccctggtcgccgatgtctgcgagcagcagcagctcaccctgctgatggtctcccacagcgtagaggacgccgcgcgcatcgcgccgcgctcgatggtggtcgccgaagggcgcattgtctgggatggcgccaccgccgagctgttaagcggccacagcagcgcctcgcatttgatggggatcagcgcgcgatgaccttgtgcaggatcgccagatagaccggcatcagcggatggcggaagacaaatgttaacgctgtagccgccagcgcgaccatcagcggcgacagccacagcagtcggccgcgcggcagccagcgggtcagccgatcgcctgaggttttcgcgctccgccacagccgccagcacagccatcccgccagccaggccagcagcgccgcccccaatagcagccatttaaagctggcgctgttttcatcagccggaatatcaatcgccgccccggcgaggatgcccggaaggaaatagagcggcggccagagcaggcagccgataatattcggtagcacgaacttggccaccggcaggtcgagcatcccggcgaccattggcaccagcggacgcgtcggtccgacaaagcggccaatcagaatggtgatcatgctgtgctgatgcagcgcatgctcggttttctccagcagggcgcggtttttcttcataaacgaccagcggtgcaacggcttcttaaagcgccagccgagccagaatgagatccagtcgcccagcaggcagccgacaatccccgccagccacgcctgccagaagttaacttcgccgccgccgatgagcgccccaaggccagccatcatcaccgtgccgggtaagataagccccaccagcgccagcgactcgagaaaggccaccagcatcacggctaacaatgagtagaccgtggattgggtaataaagtgttcgagcaatgcttgcataatgtacccggttaaaaaacgaagcccggattctccgaagccatcgcgccgtcgtcaagccatcaattgtcttaatagtttactggctgtgacatttaagcgggtcatcatttcactttctttactttttattcacaacccgcgcggaattcgctcgggctggccccggtgcattttttaaacacgcgggaaaaatagagctgatcttcgaagccgacgttgcgcccaacggtggcgatcggcatccgcgtggtgctgagcaacagtttggcctggctgatgcgctgatcctcccgccagccgaggacgctgacccccagctgctggcggaacaggtgcgacagacgcgagggcgacaggcagacgtgctgggcgacgctggcgatatcaaaatggctgtccgccagatggtcgctgatgtactggcaggcgtcgcgcacccggttgtccagcggcggatgcagcgattcgttgatcgcctccatgcgccgcagcagcagctgttccagcaggtttatcgccaacagttcggaatagcgcccagccccctgcccggcatcaacgatctggccgaacagctcgccaaagcgcgcctgccactgttcatccggacggaaaaagccggtctgggcaaaaatcgttggccagttgagccactcgtgccagtaggcgcgcgggcggaagtagacccactggtgataccactcgctggcgtcgggatggcggccatagtgatgaatttccccgggcgggaacagcagcatatcgcccggccggcagacaaactgttcgccgtggttgttgatcaccccctcgccgcggatcgtcagattgagaatatagcctttcatacccagcgggcggtcgataaagaaatccaggtatccctgcgcctcaatcggcgtcaggccggtgaccagatgagcgttaaaagagtagcccggcagcagcggatcgttttgcgtttcggccatacgcgtggttctccccgaaggtatcagtggcaccaattgtccatattcatcattttatcgctctcggccctgtcgcgactgcgacggcggtgggaatttggcgaaaaacccgcacagcaagcgaaaaaagcgccagcagcgtgcattccaccgtgatatgccgggtaacaaaagtgtctataaatacggcagaaaagtccacatcgaatatttgcacggcgtcacactttgcaaggtaacagcaaaataatccataagattagcgaatccggcctgacggattttgccggggatatctactgttgctgcatgaatgatttctgcatggagtaacaagatggcaattgcgattggcctcgactttggtagtgactcagtccgcgctctggcggtggaatgcgcgtccggcgcagagctggcgaccagcgtggagtggtatccgcgctggcgggaaggacagtattgcgatggcgctaacaaccgcttccgccatcacccgcgagattacatcgagtccatggaagcggcgctgaaaagcgtgctcgcttcgctgagcgccgaacagcgcgccgacgtcgtgggcattggcgtcgacagcaccggctcaactccggctcccgtcgatgccgagggcaacgtgctggcgctgcgcgaagaattcgctgacaaccctaacgccatgtttgtcctgtggaaggatcacaccgcggtcgaggaagccgaggcgatcacccgcctgtgccaccagccgggcaaagaggattactcgcgctatatcggcgggatctactccagcgaatggttctgggccaaaatccttcacgtcacccgcgaagatagcgccgtcgcccaggcagccgcctcgtgggtagagctttgcgactgggtgcccgccctgctctccggtactacgcgtccgcaggatctgcgccgcggccgctgcagcgccggacataaatcgctgtggcatgagagctggggcggtctgccgccggccagcttcttcgatgagcttgatcccatcatcaaccagcatctggcctggccgctgttcaccgatacctggacggccgatgtgccggtcggcacgctgagcgcagagtgggcccagcgcctgggtctgtcgcagaccgtggccatctccggcggcgccttcgactgccacatgggcgccgttggcgccggcgcgcagcctaacgcgctggtgaaagtcatcggcacctccacctgcgacattctgatcgccgataaagagagcgtcggcgagcgcacggtcaaaggcatctgcggccaggtcgacggcagcgtggttccacactttatcggcatggaggcaggccagtccgccttcggcgatatttacgcctggtttggccgcattctcggctggccgctggagcagctggctcagcagcagccggcgttgcgcgagcaaatcaaagccagtcaaaaacagttactgccggcgctcaccgaagcctgggccaacaatccatcgctggagcatctgccggtggtgctcgactggttcaacggccgccgcacgccgaatgccaaccagcgcctgaaaggggtgatcaccgaccttaacctggccaccgacgcgccggcgctgttcggcggtctgatcgccgccaccgccttcggcgctcgcgccattatggagtgcttcaccgagcaggggatcccggttaacaacgtcatggcgcttggcggtatcgcgcggaaaaaccaggtcatcatgcaggcctgctgcgacgtgctgaaccgtccgctgcagattgtcgcctccgatcagtgctgcgcgctgggggcggctatcttcgccgccgtcgccgccggcgtctatgaggatattccagccgcccaacagcggatggcaagccaggtggaaactaccctgcagccgcgtccggcgcaggcacagcgtttcgaacaactctatcagcgctaccagcagtggtcggtcagcgcggaacaacactatctcccttcggctgcaaaggcggaaaaagccccgcaatctcaggcagcgctcacccattaaggatacgaaaatgacgatttttgataactatgaagtatggttcgttattggcagccaacatctgtacggcccggaagccctgcgccaggtgacgaagcatgccgaacatgtggtgaacagcctgaatgcggaagccaaactgccgtgcaaactggtccttaagccgctgggcaccaccccggacgagatcacccatatctgccgcgacgccaactacgatgacaaatgcgccgggttagtggtctggctgcataccttctcgccggcaaaaatgtggatcaacggcctgaccatcctcaataagcctctgctgcagttccatactcagtacaacgccgcgctgccgtgggacagcattgatatggactttatgaacctgaaccagaccgcgcacggcggccgcgagttcggcttcatcggcgcccgtatgcgccaacagcacagcgtggtcaccggccactggcaggataaagaggcccaccagcgtatcggcggctggatgcgtcaggcggtctccaaacaggatacccgtcatctgaaagtgtgccgtttcggcgataacatgcgcgaagtggcggtgaccgacggcgataaagtcgccgcgcagattaagtttggcttctcggtgaacacctgggcggtcggcgatctggtgcaggtggtgaacagcatcagcgacggcgatatcagcgccctggtcgatgaatatgagagcagctaccgtctgaccccggcagcgcaggttcacggcgagaagcgccagaacgtgctggacgccgcgcgcattgagctggggatgaaacgcttcctcgaacagggcggtttccacgcctttaccaccacctttgaagatctccacggcctgaaacagctcccgggtctcgccgtacagcgcctgatgcagcagggctacggctttgccggcgagggcgactggaaaaccgccgctctgcttcgcatcatgaaggtgatgtcaactggtctgcagggcggcacctcctttatggaggattacacctaccacttcgacaatggtaacgatctggtgctcggctcgcacatgctggaagtgtgcccgacgatcgccaccgccgagaaaccgatcctcgacgttcagccgctgggcatcggcggcaaagcggatccagcgcgcctgatcttcaatactcaaaccggcccggcgatcgtcgccagcctgatcgacctgggagaccgcttccgtctgctggtcaataccatcgaaaccgtcccaacgccgcacgatctgccgaagctgccggtggccaacgccctgtggaaagcgcagccggatctgcgtaccgcgtcggaagcctggatcatcgccggcggcgcgcaccataccgtcttcagccatgcgctgaacctcgacgatatgcgccagttcgccgagctgcatgatatcgagctgaccgtcatcgacaacgatacccgtctgccgtccttcaaggacgcgctgcgctggaatgaagtgtattacggttcaaaacgctaagaggccgtcccctcacccttcccctctccccgttggggagaggggaccgaccgggcgccatgccgcctttctccctctcccgccgggagagggtcggggtgagggatacccgactcgcctgctattcggagcacactatgttagaagatcttaaacgccaggtgctggaagctaacctggccctgccaaagcataatctggtgaccttaacctggggcaacgtcagcgccgtcgaccgcgagaaaggggtgttcgtgatcaaaccctccggtgtggattaccgcgtgatgaccgccgacgatatggtggtggtcagtctggagagcggcgaagtggtagagggtaataaaaagccctcgtcggataccccgacccatcgcctgctgtatcaggccttcccgacgctgggcggcattgtgcatacccattcgcgccacgccaccatctgggcgcaggccgggcaatctattcccgcgaccggcactacccatgccgactacttttatggcccggtgccctgcaccaggttaatgaccgatgcggagatcaacggcgactatgagtgggaaaccggcaacgtgattgtcgaaaccttccgccagcagggaatcgacccggcgcagatgcccggcgtgctggtccattcccacggcccgttcgcctggggcaagaacgccgaagacgcggtgcataacgccatcgtgctggaagagatcgcctatatggggattttctgccgccagctggcgccgcagctgccggctatgcagcagaccctgctggataagcactatctgcgtaagcacggggccaaagcctactacggccaataatcaccctgctcgcgctgcgcttagcagggccagggctctgcgccatctggtagccgggataaggcgcaagccgcaatccggagcaacattagcgccgaacacctgtataaaaccccagcacccctcatgaaaccaggctataatcaggcctggttttttatcggcgagaatacccgtgacccagccacgagcaggatttttactcacccgtcactggcgggacactccgcagggcaccgagctctccttctggctggccaccgacgacggtccgctgcaggtaaccctcccgccgcaggagtccgtcgcctttattcccgaagcgcagcgggcgcaggctgaacggctgctgcagggggagaaagggctccgcttcgccccgctggccctgaaagatttccaccgtcagccaattgttggcctctactgccgcgcccatcgccagttgatgcgtctggagaagatgctccgcgacagcggcgtcaccgtttacgaaggcgatatccgcccgccggagcgctatctgatggagcgctttatcaccgccccggtgtgggtggaaggcgaaacgcgcggctcgcagctggtcaacgcacgcatgaagccgaaccctgactatcgtccgccgctgaaatgggtgtcgctggatatcgaaaccagccgccacggcgagctgtactgcatcggtctggaaggctgcggccagcgggtggtctacatgctgggccccgaaccggaaacgccgccagacgtcgacttcgagctggtcttcatcgccagccgtcccctgctgctggaaaagctcaacgcctggtttgccgaacacgaccccgacgtgctgatcggctggaacgtagtgcagttcgatctgcgcgttctgcaaaagcacgccgaacgctatcgcatcccgctgcgactcggccgcggcaacagcgagctggagtggcgtgagcacggctttaagaacggcgtctttttcgcccaggccaacgggcggctgattatcgacggcatcgacgcgctaaaatcggcgttctggaatttctcctccttttcgctggaggcggtggcccgcgagctgctgggagaaggcaaagccatcgacaacccatgggatcggatggatgagatcgatcgccgctttcatgaagacaaaccggcgctggccatctataacctgcaggattgcgagctggtgacgcggatcttccacaaaacggagatcatgccgtttttgctcgaacgagcgacggtcaacggtctgcccgccgaccgccacggcggctcggtcgccgccttcagccatctctatttcccgcgcatgcaccgcctgggctacgtggcgccgaatctcggcgacgtaccgccgcaggcgagccccggcggctacgtgatggactcccgccccggcctgtatgactcggtgctggtgctggactataaaagcctgtatccgtcgattattcgtacttttttaatcgatccggtcggcctggttgaagggctggcgcaacccgatgaccagcacagtatcgagggcttcctcggcgcccgcttctcgcgagataagcactgcctgccggggattgtcagccagatctggcacggccgggatgaagccaaacgccagcacaataagccgctctcccaggcgctgaagatcattatgaacgccttttacggcgtgctggggaccagcgcctgccgcttcttcgacccgcgtctcgcctcgtcgatcaccatgcgcggccatgcgatcatgcgccagaccaaagcgttaattgaagccaaaggctatgacgttatctacggcgataccgactccaccttcgtctggcttaagcgcccgcacagcgaagcccaggcggcggagatcggccgcgagctggtcagcgatgtcaacgcctggtgggcgcaggagcttagcaaaagccagcttaccagcgccctggagctggagtatgaaacccacttctgccgctttttaatgccgacgatccgcggcgccgataccggcagcaagaagcgctatgccgggatgattcaggagggcgatgcccagcgcatggtgtttaaggggctggaaacggtgcgtaccgactggacgccgctggcccagcagtttcaacaggagttatacctgcgcatcttccgcaaccagccgtatcaggattatgtgcgggagactatcgccaggctgatgaacggcgagctcgacgaacagctggtttatcgcaaacgcctgcgccggccgctggcggagtatcagcgcaacgtaccgccgcacgtgcgcgccgcccggcttgccgatgaacacaacctgaagcttgggcgggcgcagcagtatcagcagcgcggcaccatcaaatacgtctggaccaccagcggcccggagccggcggattaccagcagtcgccgctcgattacgatcactatttaacaaagcagttgcagccggtggcggaagggatcctgcccttcgtcaacgatgactttgctacaatagtgacaggacagttggggctattttgatttttggtcacccattccacgggcacgaaagcctaaaaatgaagcgtgaggagaacgtgacgaacgttctgccatccagtaatatagcgccctttccattcctggccccaattttgacgcatctccgattgttcatggagatgatcaactattgcctgcaattaaagaactaaagagccgaacatatatgccttttacacttggtcaacgctggattagcgacacagagagcgaactaggattagggacggtggtagcgctggatgcgcgcatggtcactctccttttccccgccatcggcgaaaaccgtctgtactctcgcaacgattccccgatcacccgcgtaatgtttaacccgggcgacaccatcaccagccatgaaggctggcagctccacgttgacaaagtgaatgaagagaacgggctgctgtcctacactggcacccgcctggacacccaggaagcgaacgtcaccctgcgtgaagtgctgctcgacagcaaactggtattcagcaaaccgcaggaccgcctgttcgccggccaaatcgaccgtatggatcgctttgccctgcgctaccgcgcgcgcaagttccagagcgaacagtaccgcatgccgtggagcggcctgcgcggccagcgcaccagcctgatcccgcaccagctgcatattgcccacgatgtgggccgtcgtcacgcgccgcgcgtcctgctggccgatgaagtgggcttaggtaaaaccattgaagccgggatgatcctgcaccagcagctactctccggcgccgccgcgcgcgtgctgatcgtggtcccggaaaccctccagcaccagtggctggtggagatgctgcgccgtttcaacctgcgtttctcgctgttcgacgacgagcgctacgccgaagcgcagcacgatgcctacaatccgttcgaaaccgaacagctggtgatctgctctttagacttcgtgcgtcgcagcaagcagcgcctggagcacctgtgcgacgccgagtgggacctgatggtggtcgacgaagcgcaccacctggtgtggagcgaagaggcgccgagccgtgaatatcaggctattgaacagctggctgagcgcgtgccgggtatcctgctgctgaccgcgacgccggaacagctgggaatggagagccattttgcgcgcctgcgtctgttggatccgaaccgcttccacgattttgaacagtttgtcgaagaacagcagaactaccgtccggtggccgacgccgtcgcgctgctgctggcgggcaacaagctgagcgatagcgaactcaataccctgggcgatctgatcggcgagcaggatatcgagccgctgctgcaggccgccaacagcgatcgcgaagatgcccaggccgcgcgccaggagctgatctcgatgctgatggaccgccacggcaccagccgcgtgctgttccgtaatacccgtaacggcgtcaaaggtttcccgaaacgcgagctgcacaccattcgtctgccgctgccgacccagtaccagacggccatcaaagtgtccggcattatgggcgcgcgcaaaaccgcggaagagcgcgcgcgcgacatgctctatccggagcagatctatcaggaatttgaaggtgataccggtacctggtggaacttcgacccgcgcgtcgagtggctgatgggctacctgaccagccatcgctcgcagaaggtgctggtaatctgcgctaaggccgccaccgccctgcagctggagcaggtgctgcgcgagcgcgaaggcatccgcgccgcggtgttccatgaagggatgtcgattatcgaacgcgaccgcgccgcggcgtggtttgctgaagaagacaccggcgcccaggtgctgctgtgctccgagatcggctccgaaggacgcaacttccagttcgccagcaacctggtgatgttcgacctgccgtttaacccggatctgctggagcagcgtatcggtcgtctcgaccgtatcggccaggcgcacgatatccagatccacgttccgtacctggaaaaaaccgcgcagtcggtgctggtgcgctggtatcacgaagggctcgacgccttcgaacatacctgcccgaccggtcgcaccgtctacgacagcgtgcacgatgaactgatcaactatcttgcggcgccggaatccaccgacggctttgacgatctgatcaaatcctgccgccaacagcatgatgccctgaaggcgcagctggagcagggccgcgaccgtctgctggagatccactccaacggcggcgagaaagcccaggccctggcggagagcatcgaagagcaggatgacgacaccagcctgatcgctttctcgatgaacctgttcgatatcgtcggcatcaaccaggacgaccgcggtgaaaacctgatcgtcctcaccccttccgaccatatgctggtgccggatttcccgggcctgccggaagacggttgcaccatcaccttcgaacgtgacgtggcgctgtcgcgtgaagatgcgcaatttattacctgggaacacccgctgatacgcaacggtctggacctgatcctttccggcgataccggcagcagcaacatttccctgctgaagaacaaggcgctgccggtcggcaccctgctactggagctgatctatgtcgtcgaagcgcaggcgccgaagcagctgcagctcaaccgcttcctgccggcgaccccggttcgcatgctgctggataagaacggcaacaacctcgccgcgcaggtggagttcgaaagcttcaaccgccagctgagcgcggtcaaccgccataccggtagcaagctggtcaatgcggtgcagcaggacgttcatgcgattctgcagcagggtgaagcgcagatcgccaaagcggcgcaggggctgatcgacgcggcgcgtaacgaagccgatgaaaagctgacggcggagctgtcgcgtctggaagcgctgaaggcggtgaacccgaacatccgtgacgacgaactggcggcgatcgaaagcaaccgtcagcaggtgatggatgcgctggcgcaggccggatggcgtctggacgcgctgcgtctgatcgtcgtcactcaccagtaacggaacgcgaacatggcgatggaaaactacaatccgccgcaggatccctggctggtgatcctgtatcaggatgagcacatcatggtggtcaacaagccgagcggcttgttgtccgtccccggtcgtcttgaggagcataaagacagcgtgatgacgcgcattcagcgcgacttcccgcaggccgaatcggtgcatcgcctggatatggccaccagcggcgtgattgtggtggcgctgaataaagccgccgaacgtgaactgaagcgtcagttccgcgagcgcgagccgaagaagcagtacgtcgcccgcgtctggggccatccgcagccggcggaaggcctcgtggatttaccgctgatttgcgactggccgaaccggccaatgcagaaggtgtgctatgaaaccggcaaagcggcgcaaaccgaatatgaggtgctggagtacgcagaggataacaccgcccgcgtgcgcctgaagccgattaccggacggtcgcaccagctgcgcgtgcatatgctggcgctggggcatccgatccttggcgaccgcttctatgccacgccggaggcgctggcgatggccccgcgcctgctgctgcacgccgagacgctcaccatcacccatcctgcctacggcaacgcgatgacctttcgcgcgccgatcgacttttaacgctcatacttcgagttgcatgcgggttggctgcgtgcaactcggattagtgaggatacagaaaacaatcccgattaatcgcgggcgaaccacgcgtcaatcatctgctcaacgcgggcgacgacgagatcggtgtcgtgacgacggctgcgcgcacaggcgtgcgccggctcatcgcacagcaggcagcggcgctgcgattcgcccagcgactggcgtcccaccagcccgttctgcggacagattacatcgatatcccacaggcgtcccagcggatggctctgctccagcgtactgcacatcgctttgatttcgctggccggatgcgctacgcaccacagcgcttctggcccggtcggcagccatagcacctgacgatccagcgtttgccagcggtgcttccacagcagctgatcgcaggcctggagggcaacgcccatcatattgcgatagcgaatgctgtccttcaccgcccccggggtcaccagggtcagggaaataacaggctgctgataatgggccaaccagtcggcctggcgggctgcacgctgctctttcgccgccagcaatgcgtcgatgctgacgcccgcctgggcgggagtatccactgacattaattcctctcctacatatgataaatacgacagcgcctggactgtcatgatgatggttgcgatagccgatcgcgcgctgattgtaacgctaaatgcggagcatttaggatacagaacgcagatattttcggcgttctgtagcggaaaatagcagatttatcgctgagcgtagcgttatatcacgccagatagtggctgaggaacagcaaccccagcgagacatttatcgccccgccgatgcgggtagcgatctgcgcgaacggcatcaggctcatgcggttgccggcggtcaggatcgccacatcgccggtgccgccctgcccgctctggcaacaggaaacaatcgccacatcgatcgggtgcatccctatctttttaccaaccaggaaaccggtcgccaccagcgcggagacggtactgacgatcaccagcaggttggttaaagtgaaggcgtttaccagttcctgccacggagtgatcgccacgccgacggcaaagaggatcgggtaggtgactgcggtgcggaagaatttatacaccatctgcgacccctcctgcagacgcggagacaccacgttagccagctttaacagtaccgcgaggaacagcatgcctaccggcgccggcagaccaatcagtttgtggccgagcatccccatcatatacagcagtaccgccagcagcgcgccggaggcgagggtcccaacgtcggtcttaccgctcacgccttcgctctcgctgaggctgcgggtttcatggctgcggttcggcatcagttgcccttcgccggtcagatgcgggaagcgcttgccgagctggttgaggcagccggagatgacgatcgccgtcaggctgccaagcatcaccatcggcaatacccggcccagggccacgccctgctccatatgcatcagcgcggcataacccattgacagcgggatcgccccctctcccacgccgccggccataatcggcagcacgataaagaagaacacctggaacggctccatgcccagcagcgtgccgacgccgatgcccaccagcatgccgaccacttcgccgcacagcatcgggaagaagatcttcagaaagccctgaatcagcgtggtgcggttcatactcatgatgctgccgacaatgatgcagcagatatagagatagaggatgttagtggatttatagaatttggtcgtggattcaataaccacgtcaggcagcagaccatagtggaccagcgcggaaggaataaaggtggcgcagatcgccgccgcaccgagtttccccagcaccgggaggcgtttaccaaactcgccgcaggcgaagccaaagaaagccagggtggccaccatcaccacgatatcgctcggcagtttgccgccaaggcagtcgagggcaatcagtcctccggccagcagaaacagcggcagcgggacgatccccaccttccagttatccataatatgccaccagcgctgcttgagcgtggttttcggcgtatcgatcggttcaagggttgcagagaatgcattgtctgtggtgctcataaattcagccctgtcgttattattcattttcagcgtaaagggacagcggcgtcgttaatgtgaagcttcccagattaaaaaagaagttttaatggtcactatggtttttatggtttctattcgctgaactgcccgggagtgatatatctctgatttatgactgtggtttttatggtttttatttcccgccggccgcctatttccgccgcgaccgctggcggcagcccgcgcctgcgccgctgatcacaactttcccttaacatttacgtcacgtgacagaaaaatgttagagtgccggtatggttaatacgtcgtccggggcctatgaaattatcttttcaatataagctgtttatttctctggtcgcttttttctcggtcctttttatcgcgctgggcatttattattattttgacgccagccgccagctttatcaggagatgagcgcccgggccaaaatacaggccgaagagatagccctgatgccgaatttacgtcaacaggtcagccggcacgacccacaggcgattcaggcgtttatgcagcaaatcgccgcccatagcgacgccagctttatcgtcatcggcgaccgtcagggagttcatctgtttcattccgtccatccggagtgggtcggcacccgactggtcggcggcgacaaccaggcggtactggaaggaaaatccatcaccaccattcgcaaaggcggcctcggggtctcgctgcgcagcaaaacgcccatcgttgatgacgcagggcgagtgatcggtattgtctccgtcggctacctcaccagctatctcgacagcattactctgactaaagtgatcaatatttttatcgccgccgtcctgctgctcatcgccctgtttatcttctcctggtactttacccgcagtatcaagaagcagattttttcgctcgagccgcgggaaattggcctgctggttcgccagcaaaaggcgatgatggagtcgatctttgagggggtgatcgtcatcgatcgccagcggcgtattgaggtgataaaccatgccgcccgcagcctgctggggctcagccagcccgcccgccagctgcgcggtcagtcgatcgacagcgtcatttcgccgcagccctttttcgccagcggcgacatgctcgaacgcgatacccacgatgagctgtgccgcttcaaccagttgaccgtgctcgccagtcgggtgcgcattatgctggagaataccctgcagggctgggtgatcacattccgtgaccgcaatgaaatcaatgccctcaccgcccagctgagccaggtgaagcgctatgtcgacaatctgcgcatcatgcgccacgagcagctcaaccggatgactaccctctccggcctgctgcatatgggccattatgacgaagcgatccgctatattcaggcccagtcggaacatgctcaggagctactggactttatctcctcgcacttccactcgccgacgctatgcggtctgctgctcggcaaagccacccgcgcccgcgaaaaaggcgtggcgctgagcttcgacccggcctgccgcatcgaccgccccctgccgtcgctgatggaatccgagctgatctccatcatcggcaacctgctggataacgccatcgaagccacgcagcgtgccgagctgccgcatgagccggtggaagtcctgatccagctcaacgcccgggagttgattatcgaagtggccgaccgcggcgtcggcatccgccccgatatccgcgagcgcatttttgaacgcggcgtcaccaccaaaacccgtggcgatcacggcattggtctgtatcttattgaacattatgtcactcaggcgggcggcaccatcgaagtcgccgataacgcgccgcggggaacgatcttcaccctatttatcccggccgacgcgcacgccggtccgcaaccggaggcccacgatgcatcatgacctggtcgatgtgctaatcattgaagatgagagcgaactggcgcgcctgcacgccgagcttgtgcaaaaacacccgcgactgcggctggcaggcatggcggcctccctcgcccaggcgcggcagctgcttcacgccacgccgccgcagctggtgctgctggataactatttaccggacggcaaaggcgtcacgctgatgaccgacccggcgctggcgaccagccaatgctcggtgatctttatcaccgccgccagcgatatggaaacctgcagccaggccatccgcaacggcgccttcgactatatccttaagccggtatcatggaagcggctgagccagtcgctggagcgctttatccagttctacgatcagcaacgggagtggaaaatcgtcgatcagcaaaacgtcgattccctctatcaactgcaggcgaagaactatcgcgtggatagcggcagcaaggggattgaagagaaaacgctggcgctggtgcagggactgtttagcggccgggaagcgcactgtttttccgttgatgaagtggtcagcgccgccgggctcagcaaaaccaccgcccgtcgctatctggagcacggcgttgagaccggttttctggaagtggagatgctgtacggaaaaattggccatccgcggcggctgtatcgccgcgctaaggtcaaaagttaaaacccctcgccggacgggaggggctggaaacgtcagaagccgcgctgctctttgatcagctcccaggccttctggatctcctgggccttctgtttggccatctccatcatctccggcggcagacctttcgctaccagcttgtccggatgatgttcgttcatcagcttgcgataggcgcgcttcaccgtcgccgcgtcgtcggtcggttttactcccagcacattgcaggcatcttcgagggtcggcccacgctgcgcctgctgccagccggcgttgccgccatgctggccataagagcgctgctgcgaaccgccgccaaactgggcgccgccctgcatcatccgcaggaattgatcgaactgggcgcgggagatgccgagctcgtcggcaatgacgaacagcacttcacgttcgttaggatgcagttcgccatcagcgaacgccgcctgcagctgaatttccagaaacatccgaatcagatcgaaacggccaaagcagacgctgcgcagctgacgcattttctcgcgcaggggatagttgtcggccttaccgtcgcgaaacgcctgctgcgccgcggtgcgcgaggcgccatgcaggttcatgcgatccattagcacattggcgacatgaatatccgcttcggtaacgcggcccttggatttggtcaggtgccccatcacttcgaaggtggtggaaaagaagagcgactgacgctcctgctgattggcgaagagatttaaccggcggctgcgcgcccggtcaaacatatggccgaccagaaagccaagcaccacgccccagaacccaccacccatcagcaaagccactgccacgccaatcactttacccaaatactgcatagactccccaactgtttatcgccgttaagctcgaatatgaccgcacgttacccggcactcgcgcctcggtcaattgtgggacatagcctataatttgctttatcatactcgtcattcaacagggtgcctaacgctcgggctcgaaacgggcaggattaacactagcgtgataatgttgagtaagttaggctctgaccgtttgcaagccgctgtcacaagatgatggaacaataaatacaacgtatgaaaaaacgtattcccagcctcctggctacgatgattgccagcgccttgtatagccaacaaggcctcgctgccgatctcgcaacgcaatgtatgcttggcgtgccaagctatgatcgtccgctcgtggaaggtcgtcctggcgatctgccggtgacgattaacgccgatcatgcgaagggcaactacccggacaacgccgtctttaccggcaacgtcgatattaaccaggggaatagtcgcctccgcgccgacgaagttcagctgcaccagcagcaggccgcgggccaggcgcagccggtgcgcacggtggacgcgctgggcaacgtgcattacgacgataaccaggtgatcctcaaagggccaaaagcctggtcgaatctgaataccaaagataccaacgtctggcagggcgattatcaaatggtcggacgccagggacgcggcaccgccgacctgatgaaacagcgcggtgaaaaccgctataccattctcgaaaacggcagctttacctcctgtctgccgggctccgacacctggagcgtcgtcggcagcgaagttatccacgatcgcgaagagcaggttgccgagatctggaacgcccgcttcaagcttggctctgtgccgattttctatagcccctacctgcagctgccggtgggcgataagcgtcgttcaggcttcctgatcccgaacgcgaaatacagcaccaaaaacggcgtggaattctccctgccgtactactggaacatcgcgccaaacttcgatgccactattactccgcactatatgaacaaacgcggcggcgtgatgtgggaaaacgagttccgctatctgacccagctcggcagcggcttaactgaattcgactacctgccgtcggataaagtctacgaagacgaccactcgagcgacagcaacagccgccgctggctgttctactggaaccactcaggggttatcgatcaggtatggcgtctgaacgctgactacaccaaggtcagcgatcctgactacttcaacgacttcagctcgaaatatggttccagtaccgacggctatgcgacgcagaaattcagcgccggttacgtcaaccagaactttgacgccacggtatcgaccaaacagttccaggtctttgaccgcgaatcgagcaactcctattcggctgagccgcagctcgacgtcaactactaccagaatgatgtcggtccgttcgatacccatctctatggacaggttgcccattttgttaactcgaataacaacatgccggaagcgacccgcgttcacttcgaaccgacgatcaacctgccgctgtccaacggttggggcagtctgaataccgaagccaagctgctggcgactcactaccagcagagcaacctcgataagtacaatgccgccaacggcactgactataaagagtccgtcagccgcgtaatgccgcagtttaaagtcgacggcaaaatggtctttgaacgcgacctgcaggagggattcacccaaacgctggaaccgcgcgtgcagtatctgtacgtgccgtaccgcgatcagagtgaaatcggcaactacgactccacgctgttgcagtcggattacaccggtctgttccgcgaccgtacctatagcggtctggaccgcatcgcgtcggctaatcaggtcaccaccgggctcacctcgcgcgtgtatgatgccgccgcggtggaacgttttaatatttccgttggtcaaatctactatttcaccgagtcacgcaccggtgatgacaacatcaactgggagaacaacgataccacgggttcactggtctgggccggcgatacctactggcgcattgccgatgaatggggtctgcgcggggggatccagtacgatacgcgtctggataacgttgccactggtaacggcaccattgaataccgtcgcgatgagaaccgcttagtccagcttaactatcgttacgccagcccggaatatattcaggccacgctgccgtcatattccaccgcggcacaatataaacagggtatttcgcaggtggggatgaccgccagttggccgattgtcgatcgctggtccgtggtcggggcctactactacgatactaatacccggaaagcagcaaaccagatgttgggtgtgcagtataactcctgctgctacgccatccgtcttggctacgaacgtaaagtcaacggctggaacagcaacgacaacggcggcgagagcaaatacgataacaccttcggaatcaatatcgaattgcgcggtctgagctctaactacggcctcggcacccagcagatgctgcgctcgaacattttaccgtaccagagctccctgtgatgcggctggtttacaacatcatccgcatttgcggttaatcgaaatggaaaaagtatgaagaactggaaaacgctgcttctcggtatcgccatgatcgcgaataccagtttcgctgccccccaggtggtcgataaagtagcggccgtcgtcaataatggcgtcgtgctggaaagcgacgtcgatggtttgatgcaatcggttaagctcaatgctggtcaggctggccaacagctgccggatgacgccaccctgcgccatcaaatcctcgaaagactgatcatggaccagatcgtgttacagatggggcagaagatgggcgtgaagatctctgacgaccagctcgatcaggctatcgccaacatcgccaaacaaaataatatgaccttggatcagatgcgcagccgtctggcgtatgaaggcatcaactacaacacctaccgtaaccagatccgtaaagagatgctgatttcggaagtgcgtaacaatgaagtgcgtcgtcgcatcaccgtgctgccgcaggaagtggaagcgctggcgaaacagatcggcgaccagaacgacgccagcaccgagctcaacctgagccacatcctgatcccgctgccggagaacccgacctctgacgaagtcgccgcggcccaggagcaagcaaactccatcgttgagcaggcgcgcaacggcgccaacttcggcaaactggcgatcacctactccgctgaccaacaggcgctgaagggtggccagatgggctggggccgtatccaggaactgccgggcattttcgctcaggcgttaagcaccgcgaagaaaggggatatcgtcggtccgattcgttccggcgttggtttccacattctgaaagtcaacgacctgcgcggtggtacccagaatatctccgttaccgaggttcacgcccgtcatattctgctgaaaccgtcgccgatcatgaacgacgcccaggctcaggctaagctggaacagatcgcagccgagattaagagcgggaaaatcacgtttgctcaagcggcgaaaacctattcggaagatccgggttcggcaaaccagggcggtgatttaggctgggccacgccggacatctttgacccggcgttccgcgatgcgctgatgcgtctgaacaaagggcagaccagcggaccggtgcactcttcctttggctggcatctgatcgaactgctggatagccgtcaggtcgacagaaccgacgccgcacagaaagatcgtgcttaccgcatgctgatgaaccgcaaattctctgaagaagcggcaacctggatgcaggaacagcgcgccagtgcgtatgttaaaattctgagcaactaatatcgatgcctgaaacccgtaaagttgttatcactcccggcgaacccgccgggattggccctgacctggtcgtgcagcttgcccagcgcgactggccagttgagctggtgatttgcgccgatggcgccctgttaactgaccgagccaagcggctcggtcttcctttatctctcctcccttacgatcccgcgcaacctcctgttcctcagcgcgccggtaccctgacgctgctgaacgtgccgctaaacgtcccggcggagcccggcgtgctgaatgtgcaaaacggcgcctacgtagtggagacgctggcgcgcgcctgcgacggttgccttagcggcgagtttgcggcgttagtgaccggcccggtgcataaaggcaacatcaacgacgccggtatcgcctttaccggtcataccgagttctttgaagagcgcgcgaaggccagcaaagtggtgatgatgttggcgaccgaggagctgcgggtggcgctggtcaccacccatctgccgttgaaagccatcagcgaagcgattacccccgagctactgcgcgagatcatcaccattctcgatcacgacctgcgcacgaaatttggcattgcccagccgcatgtgctggtttgcgggcttaacccgcacgctggcgaaggcggccatatgggaacagaagagatagacaccatcattccggtgctggaagagatgcgcgcaaaggggatgaacctcagcggtccgctgccggcagacaccctctttcagccaaaatatcttgatcatgccgatgcggtactcgcgatgtaccacgatcagggcctgcccgtgctaaaataccagggctttggccgcggcgtgaacattacgctcggtttaccttttattcgtacctccgtcgaccacggcaccgcactggaattagcgggccagggaaaagcggacgtcggcagttttatcacggcgcttaatctcgccatcaaaatgattgttaatacccaatgaataatcgagtccatcagggccatttagcccgtaaacgcttcgggcagaacttcctcaacgatcagtttgtgatcgacagcatcgtctcggcgattaacccgcagaaaggccaggcgatggttgaaatcggccccggcctggcggccctgaccgagccggtcggcgaacgccttgaccagctgaccgtcatcgaactggaccgcgatctggcggctcgcctgcagacgcatccgttcctcggtgcaaagctgaccatctatcagcaggatgcgatgaccatgaactttggcgaactggcggagaaaatgggccagccgctgcgcgtcttcggcaacctgccgtacaatatctcgaccccgctgatgttccatctgttcagctatactgatgccattgccgatatgcactttatgctgcagaaggaagtagtgaatcgtctggttgccggaccgaacagtaaggcgtatggtcggttaagcgtgatggcgcaatattattgccaggtgatcccggtactcgaagtgccgccgagcgcgtttaccccgccgcctaaggtcgactccgcggtggtacgcctggtgccgcacagcaccatgccgtatccggtcaaagagatccgggtgctgagccgcatcaccaccgaagcgttcaaccagcgccgcaagactatccgcaacagtctcggcaatctgttcagcgtggaagtgctgaccgagctgggcatcgacccggccatgcgcgccgaaaatatttccgtggcgcagtactgcctgatggccaactggctgtctgacaatctgccaacgaaggagagctaaccatgattcattcgccccgggtgtgtgtccaggtacagagcgtctatatcgaatcgcagtcttccccggaagaagagcgctacgtcttcgcttacaccgtcaccattcgcaacctggggcggagtcaggttcagctgcttggccgctactggctcatcactaacggccacggtcgtgagactgaagttcagggtgaaggggtggtcggcgagcaaccgcatattcccgccggcggtgaatatcaatataccagcggcgcagtgattgaaacgccgctgggaaccatgcagggtcattatgagatgatcgatatcgacggcgcgccgttccgtattgagatccctgttttccgtctcgcagttccaacgctcattcattaaaacaatgtcaacataccttattggcgacgttcacggttgctacgatgaactgatcgcattattagcgcaggttgaattcgatccgcggagagatacgctgtggctgaccggcgatctggtggcccgaggcccgggatcgctggaggtcctgcgctatgtcaaatctctgggcgacagcgtacgactggtgctgggcaaccatgacttacacctgctggcggtctttgccggtatcagccgcaacaagccgaaggatcgtctgaaaccactgctggaagcgccggatgccgatgagctgctcaactggctgcgtcgccagccgctgctgcaggtggatgaagagaaaaagctggtgatggcccatgccggcattacgccgcagtgggatctggagaccgcccagcagtgcgcgcgcgatgttgaagcagtgctctccagcgactcctatcctttcttcctcgatgccatgtacggcgacatgccgaaccactggagcaacgagctgagcggcctggcgcgcctgcgctttatctctaacgcctttacccgcatgcgctactgtttcccgaacggccagctggatatgtattcgaaggaagcgcccgaggacgccccggcgccgctgaagccgtggtttgccattcccggcccggtcagcaatgcctacagcattgcctttggccactgggcttcgctggagggacgcggcacgccggaggggatttacgccctggataccggctgctgctggggcggggaactcacctgcctgcgctgggaagataagcagtacttcaccgagccgtcaaaccggcagaaaagcctcgacgaaggcgaagccgtcgcgtcctgactcttcccggatagcggcgcgttgcgccttatccgggctacctgcggcgtcgttttgtccggtggcggctaacgccttacccgacctacatttccttgccatttgtagcccgggcagcactccaggaagacgaagcccgcgacgggaaacatgacgcagtcccgtaggcccgcgcaagcgcagcgccgccgggcaagaactgcgggcgcggagccacttttgtgtcgggggacggctaacgccttactcgacctacgtttaagtgctatttgtcgccccggggagcgcttcagaaagaagacgaagcccgcgatgggaaacacgacgcagtcccgtaggcccgcgcaagcgcagcgccgccgggcaagaactgcgggcgcggagccaattttgtgtcgggtgacggctaacgccttacccgacctacgtttaagtgctatttgtcgccccggggagcgcttcagaaagaagacgaagcccgcgacgggaaacatgacgagatactgagtgcgccatcgtcgcgcaattcatgcaaaagaaaaccccggtcacgccagacgcgaccggggtttttttatcgctatcctgcccgcttaacggcgttcgaggatctcaaagcagtagctatgggagttctgcgcgtcggcgtcatgaaactcgctgaacaccgactcccattcgtccggatcgtaatccgggaaatgggtatcgccttccacttccgcatcaatatgggtcaagtagagcttctgcgctttcggcaggaactgctcatacacccggccgccgccgatcaccataatctcttccacatcgccgcaggcggcaattgcttcttctacggaggagacccactgcacgcgatcgtcgctgccgggtttgctgctgatcacgatatttttacgccccggcaatgggcgcccaatggattcccaggtcagacgccccatcaccaccggcttatttaacgtgttgcgtttgaaccaggcgagatcggcaggcaggttccatggcatggcgttttccataccaatgacgcgatctaccgctaacgccgcaatcagactgatcattcattcattcccgagtgcaaaaaattgtcgccactatacggaaagcgtacaacttcgtcgactggccggagggtaaagaataagaaaattttctgatttgctggcaagcccacgttcacaccgtgggccgccagaagaggatccaaacgaaaacaaaatgttactggtcagcctcaggctgagggcttattttccggctcatcggcgatatccccggtgtgcctgccctcttccgtcccctgccagccatgacgctgcaccagcgacagatgatgacgatcttcgttgatgatgccggtcagcatatcgctggtccgcttgaagaccgccacccgcgacgcggcatcgttttccgccatcgccaccatctcttcgaccatctgcaggttgaatcgacggaacagatcggcccgctcgcgcgcttcataggcgccgagccccagcgcctccagcgtcattcggccggacttcagcgccgcctcgaaggtttcacgctccggggcctcgacgccagcctggcgcagctgaatgtaatgatcgacatcgcgggcgcgggagatgatctgcagatgcggaaaatgctcttttaccctcgccaccagctccaggctgacgtgcggatcgtcaatggcattgatcagcacttccgccttttcggccccggccgactccagcagatcgacccgggtggcatcgccgtagaaaaccttcatatcaaatttgcgcagggtatcgacatggtccgggtcatgatcgaggatcaccatcttcaccccgctcgagagcagcaatcgcccggcaatctgcccgaagcggccaaagccggcgacaatcacccgcggctgctcttcatcaatctcgtcagcatcacgcgcctggccgctggacgatttctccagacgggtcagcagcaccagcagaatgggggttgccgccatcgacagggccaccgccagggtcaacgcttttgcccattcgccgtccagtacatccgccatccgcgcggcgccaaacaccacaaacgcgaactcactcccctgccccagcagcaccgcaaaccagcggcgctgggcgcgcggtacgccaagcggcctggcgataagccacagcatcagcatttttatcgccaggaaaccgaccagcaaaatcacaatacgcagcggatgggtgaccagggtgccaaaatcaatcgacatgccgacgccgataaagaacagccccaacagcagtcctttaaacggctcaatatcactctccagcgcatgacgatattcggaactggccagcagcaccccggcgagaaacgcccccatcgccatcgacagccccacctcttccagcaataagccaaagccgaagaccaggaacagggccacggcgctgaacacttcgcgcaggccggaacgggcgacaaagcgcagcagcgggcgggtcagatagcgcccaaggaccaccaccagcgccagcgctgcggccactttcagcgcggagagggcaaaagccatcagcgaagtggcgccgccgctggccgccagcagcgggatcatcgccaccagcgggatcgcggcgatatcctggaacagcagcaccgcaaaggcgctgcgccccatctgcgacaccgtcagattgcgctcattcatcgcctgcatagcaatggctgtggaagaaagcgccagagtcataccaatcagctcggccacctgccagcgcaggcccagcagcatgcagaacaggccgatcaacaccccgcaggccaccatctgcagtgcgccgccgccaaacaccgaggcgcgcagcttccataagcgctgcggatcgagctccagaccaatgacgaacaacatcagcaccacgccaatctcggcaaagtgcagaatcgcctcggcatcggtcaccagccgcagcgcccacgggccgataatacagccggcgatgagatagcccagcactgaccccagccccagacggacggcgatgggcacaatcagcgccgcggcgccgaggtaaatcaacgcctgtatcagcgtatggctatccattctggtgtgcctcctgccagtcgattaagcgttgacgatagcggcgggcctgcgcctgcagcgtttcatcatcgcagataaaggtgcagtgcatagcgaacggcggcagccatttcatcccgcagtaaagcgcagttgcctgcagaggctgcgccagcaccgggaaaccgggaaacgaaccgatatcaaagtggctttcaccgccgccggtagtgaccgcccacatcagcgatttaccgcgcagggcaataccgttgtgaccataggcccagccgtgcgacagcaccttgtccatccacagcttgagcagcggcggtacgctataccactgcataggatgctgccagataaccagatcggcacgggccagcgccgcctgctcggcggcgacatcgatattaaagtcgggatagagttgatagagggagcgtatctctacgccttcaagcgtccctgcctgttcaagcattcgcttattcgcatgagaatgctgcggataaggatgcgcataaattatcagaatcattgattggcctgcgtttgctcttgtcgtaatcagcaagagtgtagacagttaagcgaaccgcttacaatgataactgtgatttatgtcgcgatggcttacgcaacgcgcgccctgagggttaacgtcaggccttagttatccagctcgtccatggacttcacctggtcgcggttaatctgctccacgcggccggtttcggcatttttgtatgagacgaggccggtgtcatcatccacctgcggtttaccgctggtgacaatggtcttgccgtcggtggttttgatcgactgattcgatgagcagccggccacgaacatgattgccgtcgctgccagtgcggatgccaccagaatattgttccgcattgtatcctcctgtcttttcatcaataggtatcgttatggtgctaactatagttagcctgacccgacagggggttaaaagcagaactctctgaagatggctgcggccaaaaaaaataggctgacgatgtcgtcagcccaggattgttgctatccggccaggccgggaagcttatttagtgatttgcgcgtgcatttcctgaaccgaaatcaccttctcggtggcgtcagcgttcagcgccatcgcggtggcaaagccgccgttcagggtggtgtcgtaatgcactttgtactgcagcgcgctgcggcgaatcagcttggagtcttcaatcgcctggcgacctgcggtggtgttgatgatgtaggtatattcgccattcttgatgcggtcctgaatgtgcggacgaccttcatgcaccttgttcaccagacgcgggttaatgcccgcttcacccagcacaatcgccgtaccgtgagtcgcatccagctcgaagccaaacttcagcagcttcgccgccaggtcaaccacgcgctctttatcgccttcgcggacggagagcagcgcgcgaccctgtttcttcatggtcgagttgctgcccagctgcgctttggcgaacgcttcggcaaaggtgcggccgacgcccatcacttccccggtggagcgcatttctggccctaacagcgggtcaacgcccgggaatttattgaacggcaggaccacctctttcaccgagtagtacggcgggatgatctctttggtcacgccctgctgcgccagcgtcttaccggccatcacgcgcgccgccactttcgccagcgggacgccggtggctttggagacgaacggtacggtacgcgccgcacgcgggttgacctcaatcagataaacttcgttatctttcaccgcgaactggacgttcatcaggccgcgaacctgcagctcgaaggccagcttctgcacctgctcgcgcatcacatcctgaatctctttgctcagggtgtaggccggcagggaacaggcggagtcgccggagtggacgcctgcctgctcgatatgctccatgatgccgccaatcagcaccatttcgccatcgcagatggcatcgacatccacttcaatcgcatcgtcgaggaagcgatccagcagcaccggcgcgtcgttggagacgctgaccgcggtctggaagtagcggcgcagatcctgctcgtcatagacgatctccatcgcccggccgccgagcacataagacggacgcactaccagcgggtagccaatctctttcgctttctctaccgcctgctcaatggcggtgacggtggcgttcgccggctgcttcagcttcagacggtcaaccgcgtgctggaagcgctcacggtcttccgcccggtcgatagcgtccggactggtaccgataaccggcacgccggcagcttccagggcacgagccagcttcagcggggtctggccgccgtactggacgataacgccttttggcttctcgatgcgcacgatttccagcccgtcttccagggtcaccggctcaaaatacagacggtcggaggtgtcgtagtcggtagagacggtttccgggttacagttgaccatgatggtctcgtaaccgtcctcgcgcagcgccagcgaggcgtgtacgcagcagtagtcgaattcgataccctgcccgatacggttcgggccgccgccgaggaccatgattttatcgcggtcaacggacgggttggactcacactcttcttcataagtggagtacatgtaggcggtatcggtagcaaattccgcagcgcaggtgtccacgcgcttgtagaccgggtgcaggtcatactggtcgcgcagcttgcggatttccgcttcccgcacgcccgccagcttcgccagacgcgcatcggcaaagcctttacgcttcagggtgcgcaggaagtcagcgtcgaggccgttgatgcccacttccgccactttctcttccagacggaccagctcttcaatctgtaccaggaaccagcggtcgatgttggtcaggttgaagacgccgtcaaccgagaggcccgcgcggaacgcgtcagcgatataccagatacgctcagcgccggcatctttcagctcgcggcggattttggtcagcgcttccgggtcgtcgaggctcactttcgggtcaaagccggtagcgcccacttccagaccgcgcagcgctttctgcaaagattcctgctgggtacggccaatcgccatcacttcgccgacagacttcatctgggtggtcagacggtcgttggcgccggcgaatttttcgaagttaaagcgtgggattttagtgaccacgtagtcgatggacggttcaaaggaagccggggtgcggccgccggtgatgtcgttcatcagctcgtcaagggtataacctaccgccagcttggctgccactttagcaatcgggaagccggtggccttagaggccagcgccgaggagcgggagacgcgcgggttcatttcgataacgatcaggcgaccgtttttcgggttgaccgcgaactgcacgttagagccgccggtttcgacgccgatttcacgcagcaccgccatcgaggcgttacgcatgatctggtactctttgtcggtcagggtctgcgccggggcaacggtgatggagtcaccggtgtggatccccatggcgtcgaagttttcgatggagcagacgatgatgcagttatcgttcttatcgcgcaccacttccatctcgtactctttccagccgatcagcgattcatcgatcagcagttcgttggtcggagagagatccaggccgcgttcgcaaatttcttcgaactcttcgcggttataggcgataccgccgccggtgccgcccatggtgaaggacggacggatgatgcacgggaaaccaacgtcggcggcaaccgccagcgcctcttccatcgtgtgggcgataccagagcgcgcggtgtcgaggccgatttttttcattgcgatatcgaaacggcgacggtcttcggctttatcaatcgcatcggcggtggcaccaatcatggtcacgccgaattcagccagtaccccctgacgctccagctcgagcgcgcagttcagcgccgtctggccgcccatggtcggcagcaccgcatccgggcgctctttttcgatgattttacgcaccacttcccagtgaatcggctcgatgtaggtggcatcggccatttccgggtcggtcatgatggtcgccgggttagagttcaccaggataacgcggtagccctcttcgcgcagcgctttacacgcctgggcgccggagtagtcaaactcacacgcctgaccgataacaatcgggcccgcgcccagaatcaggatactttttatgtctgtacgttttggcattgctcttttactcctgattatttcgcggactgacggtattgctcaattaactcgataaagtggtcgaacagcggcgcggcatcgtgcggccccgggctcgcttcagggtgcccctggaagctgaacgccggtttgtcggtacgatggatcccctgcagggtgccgtcgaacagcgacttatgggtcacgcgcaggttggccggcagcgtcgcctcatctacggcgaaaccgtggttctgggcagtgatcatcaccacgttgttatcaatatctttcaccgggtggttgccgccgtggtggccgaacttcatcttaatggtcttggcaccgctcgccagcgccagtagctgatggccaaggcagatgccgaataccggaatatcggtctcaaggaatttttcaatcgcctcgatagcgtaatcgcacggcgccgggtcgccagggccgttggagaggaagataccgtccggattgagcgccagcacgtccgcggcggaggtcttcgccggcaccaccgtcaggcggcagccgcggtcaaccagcatgcgcaggatgttgcgtttcgcgccgaagtcatatgccacaacgtggaacggcagctcgctttccgctttcgcttccggcaggtcgcccgccagggtccagctgccttgcgtccagctataggtttctgcggtggtcacttccttcgccaagtccatgccgttcaggcccgggaacgctttcgctttttccagcgccagctgggcatccgggctgtcgcccgcgatgatgcagccgttttgcgcccctttctcacgcagcagacgcgtcagcttgcgggtatcgatatcggcaatcgccacgatgttatggcgcttcagataagaagagaggtcttcagtactgcggaagttgctggcaatcagcggcaggtcgcgaataaccagaccctgcgcatgtacctgagaagattcttcatcggcggcgttggtgccgacattaccaatatgaggataagtaagagtgacgatttggcgggaataggaaggatcagtgaggatttcttgataaccggtcattgaagtattgaaaacgacttccccaaccgccgtgccggttgccccgatggcccgaccgtgaaactgggttccgtcttccagaaccaatagcgctgacttaatcaaaacatcctccagagaatatccactcactttatttgcatattaattcataaacacgatctgaatcaatgcaaatctgttgcccgcagatttttggcaaacggcggcattctggagagatgtcggataaaagtcaacttaaagcggagatttttaatgtcattttacgccactgatgcgtaacacgtgatttttacgccaaaaagatcaacaaacctggctgagaaaacgcttgcggatgtggaagagtgtaaaacagagcgatgctcggcaaaaaagtggaccagatggtcaaaatttacatttcattcactaaaaaacacgctaatactgtattttttacgcgttacactcaaaacatcaaccgtaatacgcaaaaataaaaaagggcaacaaaatattgccctctgcatcaataacttattgatagcaataaccacatcacgatgggtaataatcgttataaagcattcaaatcaagcacatcacgcatatcaaacaggccatttttcttgcctttcagccataatgctgaacgaacggcgccatttgcaaaggtcatgcggctggacgctttatgggtgatttcaatacgctcaccgatgtcagcaaacattgccgtatgctccccgacgatatcgcccgcgcgaacggtcgcgaagccgatggtgcccgggacgcgttcgccagtgtagccttcacgactgtagaccgcgcagtccttaagatctttgttcaatgccccggcgatcgcttcgcccatcgccagcgcggtgcctgacggcgcatccactttatgccggtggtgcgcttcgataatttcgatgtcggtatagtcgcccatcaccttcgccgccttctccagcagcttcaacaggacattgacgccaacgctaaagttagcggcgaagacaatggcaatgtcctgcgcggcatcgcgaatcgcctgtttgccagcgtcgtcaaaaccggtggtgccgatgaccatccctttgccgtgctcgcggcaaaacgccagatggttcagcgtgccttccgggcgggtaaaatcgatcaacacgtcgaaatcatcttttaccgccgccaggctgctctgcaccgcgacgcccgctttgccggcgcccgccagctcgccggcgtcgctgcccaccaggcttgacccttcgcgctccagcgccgcgcccagcgccacgccttccatctgcaatgcagcctgaattaactggcgtcccatccggccgcccgcgccggcgatggccacgcggatttgtgcatcatgcatagctattctcttttgttaacattacgtaaattgttttcagagtaaccagcccgtcagcgggccgctactcaaaaacgccgataattagaaatttatgacaaacggcggacgatatcagtaaaaactatacgattgtgctgaaatgcgggctttgcgggtgctctctctgagacgataatcgacgttttcgtcatcagttggtttcaagaaataagatgcactaaatctggcaaactcgaccgaccagcattgaaatgctagggaaacattatacttccggtagagcagaaagccttacgccagggtgtagctgaccaccagctgccccttcttcatcttaatctgactaatgacaatgtcgcccagctccgccagacgggcgacgtgggtgcctccgcagggataggctggcagctcgccgaatcccaccttgcgcatgccatcagcgaacgtcacctgacgcggtaagtcctgcgcctgccatgcctttactagcgccagtagcgcactggcgtccggcagcgcggcgctattcctgctggcaaaggttatccgcccttcgccgggccagtggtgcgctttcaccggttgccagccaagctgttcgcccgccaggccaagcaggtggccggcagaatgcagacgagcatgcagctgtctcgcggaggcatcaattttcatctccacttcaccgaggggaaggggttgcgacagaatatgcagcaccctttcgccgcgcacagccaccgtcccaaccacctgcccggcaatccatccacggtccgccggttgaccgcccccttgcgggtgaaacagcgtccgctccagttcgatggcgtaacggccatccgcttctgcagtgcaggcgatgatctgggcgcgcccgtcggtagcatcgctggtgtaataaacccgttcagtcatagtgattctcctctctgtccggccagtatattattaatgccgacagcgataatcccaccaccagccaatgcactcttgctccgggagcacaaatgaatctgaacctcctgcccgacctcgctcttttcgttcagatagtcgaccagggcagcttctctgccgtcgcccgccagaacggcattaccccttcagccgttagccgcagcgtgtcacggctggagcgagagatgggctgcaaactgctgcagcgtaccacccgcaagctgcgtcttagcgatgccggggaaacgatatatcagcatgcccagcagatgctggaagcggcgcgacaggcaatggattccgcaggcagtcgccaaacggtcgcccagggaaagctgacgctaagcgtcccgaaagccgtcggccgctttgtgatccacccgctgatgatggcgtttttccaccgctacccgcaggtggacgtctgcctgcggctggaagatcgccctctcgattttatcgatgacggtattgatctggcgctacgcatcaccgataccccctcccccggcctgcatggcaaaccgctgatgccaatcaggcacgttatctgcgccactgaggcctatttacagcagcacggtacgccgtacacgccgcaggatctgcgcgcgcatagctgcattagccttggcgaaacgcccgccgatgcgcgctggaagttccgtcgggaaggcaaaacagaaacggtgcaaacctacgggcggtacgccgccaaccataccgccgtacgcctcgacgcggtcagacagcatttagggatcggcagcctgccgctgttcaccgcccgtgaggcgctggcgaacggcgacatcgtgcaggtgctgcccgagtgggaatttatcagcagctactccggcgacctgtggctactgtgggcgggagataagcatatgcccgccaggatgcgggcgatgatcgattatctcagcgagacggtgccggcgctgaacgcaggcagcacagagccagcgaaataattgcaaaccacggaatgataactcccaacacaaaccagatcccggagcggccgatatcatgcattcgccggcagccaacagccagcagggggatcgccatcatcagcagccacagcgccgcaaagtatatgacaacaaaactgaggagcccgtagtgagggtcaacaagggtggccagactccaggcggccactggcgcggcggcgatcaatacattgatgagaaaaaacgtcaagacctgctgccggctggcgcggccactaaaattaaaggtctctttccagccgctcaaatacgcctgtccataggtcattgcttctctccttgaaaatcgagtgatatatcacggcgccagggcaatcacctccgccgcccagcgctgaaacccttcgacgtcgatatccagcgccacctgggcgttcgccggctggcccagtcgtccttcgatatccaccaccgtggtgccggcggtccaggtcccctgcgtctccaccgccacaaagcacggctggagagtgaacagttccgggcgggccagccacgcaatagcgcacaagtcgtgcatgcgcagaccgctgctcatgctgccgctgcgatagtggctaaacagcgcatggagcattttaccggtctggttcagcgtcggcagcgtcgccagataatccgccgccagcagcgcccggttggtgacgtccagcccgcacatcacaatctccagcccgctgtggaacactttcgcggcggcctccgggtcgatagcgatattgaattccgcattcggcgtgaagttgccgcggcccgccgagccgcccatgatcaccagccggcgaatattaaacacacattccgggtactgggtcagcagtagcgctatattggtcagcggaccaatcgccaccagggtgatcggctcggcagcatgcataagtgcatcacggatcgcctggaaggccggcttcgccagcggttgacgttgatgctcaacaaagtcatacccctccatgccggattcgccatgcaccgaggcggcgtcgcgcaacggacgcaccagcggcatcgacgcgccctgcgccagcggtacatcggcattccagaaatgcagcaattgcagcgcgttacgggtcgtcttctccaccgagacattgcccgctacggtggtcatcaactgcagatccagctcaggcgcgaacagcgccgcggcaatggcggcggcatcgtcgatgcccggatcggtatcaagaatgattggtaagcgcatggtttctccctaaaaaaatgccagacgttaagtctggcatcttctcatactgctggaggaaagaacttactctacttcacggacatccacacgcagctctttcggcacttcaaagacgatattctcttcccggccttccagcggcacggcttcgccgccgcccagctcctgcaggcgggtaatgacgttctgcaccagaatatccggcgccgacgcgcccgccgtcacgccgacgcaggccgcatccttgacccacgcttcctggatatcggaggcgtcgtcaatcagataagccgctttgcccatccgctgcgccagttcggcgaggcggttagagttggaggagtttttcgacccgaccaccagcactacgtcagcctgctccgccagcgcgcgcacggcttcctgacggttagtggtggcatagcaaatgtcgtctttgcgcgggccgacgattttcggaaaacgcgcgcgcagggcgtcaatcacatccgaggtatcgtcgacggagagcgtggtctgggtcataaacgacagccgggcgtcatttttcacttccagcttcagcacgtcttccggcgactcgaccaggtacatccccccttgcgggttgttgtactgtcccatggtgccttcgacttccgggtggccggcatggccaatcagaatcgactcttcgccgcggcggctggcgcgggcgacttccatatggactttggtcaccagcggacaggtagcatcgaacaccgtcaggtcgcggctcttcgcttcgttgcgtaccgcctgcgacacgccgtgggcggagaaaatcaggatcgcgccgtccggcacttcgctgatctgttcgataaaaatggcgccacgcttgcgcaggctatccaccacatagcggttgtgcaccacttcatgacgaacatagatcggtgcgccatacagcgtcagcgcgttttctacaatgctgatagcgcggtcaacgccagcgcaaaaaccgcgcgggttagccaacaggatctgcatgttactcctccagcgccggatcgatctccagcacttcaatatcaaaatgaacagtgcgcccggccagcggatggttgaagtcaacggtgatggaatcgccgttcacttcgcggatcacgccaggcatttcgctgccatccattgcggtaaagagcataatcgcgccgatctccggctcgccagcgtcgataaactcgcggcgagagaaatactgaatcaggtccgggctgggtacgccaaaggcggcgtcaggctccagcgaaaaggcctttttctccccctctttcaaaccgagaagctgttgctccagcccttcagacaaagaggtgtcgccgaggcgaaacagcgccggtttgccgttgctgcgggtggactcggcagtggagccgtcgtccagtttcagagtgaagtgcaccagtaccgcgctgttgctctgtacggatttagacatgcaaattgctcgcttgtttaggtcacctggtgcccggcggcattacgcttaccgggcctacgggagccaaaaattctgtaggccgggtaagcgtcacgtcacccggcattgagatttacgcctgctctttcacagtcggtttcggcaggaagccttccagcacaatcagcgctgcgccgatgcagatcgcgctatcggcgaggttgaaggtggcaaaatgccagtcgccgacgtagaagtcgatcatatcgaccacaaagccatgccacaggcgatcgaacaagttgcccagcgcgccgccgataatcagcgcgtaggcaatattgttcagcttttgcgtcgccttcgaacggtacatcagcatcgtcagcaccacgcaaatgccgatcgcgatcccggaaaagaaccagcgctgccagccgccgctgtcggcgaggaagctaaaggccgcgccatagttgcgggcataatgcagattaagcgacgggaacagcggaaccgtctcccccagagcgaagtactggaggatcaggaatttgctgcccagatcgataatcagcacggctacgaccacccacagccagcgtagccccgttgaacagatcgatttactcatcaggcgaatttacgttgctcgccgtcaccggcgacgttgctcacacagcgtccgcagatttccgcgtgttccgccaccttgccgatatcggtggtgtaatgccagcagcgcgggcatttctcaccttcagctttactcaatgcgactttcaaccctttgagcagttcgctttgctgcgcatcagcggacgcgctcgcatagtctgcgacgttcgccccggaggtcaacaggacaaatcgcaattcatcgcccagcgcattgagcttagccgccagatcggcatcagcatacagcgtgactgccgcttccagcgagccgccgactttcttatccgcacgcgcctgctcgatcaccttgttgacttcgccacgcaccttcagcagctcatcccagaaatcgtcgttcatcgcttcgtcgtcggccaggccgaacagaccttcataccactcgccggtgaagacatatttctcacgctcgcccggcagatagccccagatttcatctgcggtgaaggacatgatcggcgccatccagcgcaccagcgcttccacgatatggaacagcgcggtctggcagctgcgacgcgccacgctgtccgccttggcggtgtactggcggtctttgatgatgtcgaggtagaacgagcccatctcgatggagcagaagcgcatcaggcgctgcaccacttcatggaagtcgtaggattcgtaggctttcaggatatctttctgtgccgcctgcgcgcagccgaccgcccagcggtccagcaccaccatctcttccggtttaaccatgtctttcaccggatcgaaaccgttaaggttcgccagcaggaagcgcgcggtgttacggatacgacgatagctgtccgcagcgcgtttgaggatctcgtcagagaccgccatttcgccggtgtagtcggtggaagccacccacaggcgcaggatatcggcgccgagcttgttcatcacgtcctgcgggctaacggtgttgccgatagacttggacattttgcggccctgaccgtcgacggtgaagccgtgggtcagtacctgacgatatggcgctttgcctttcatcgccgtggaaatcatcagcgaggacatgaaccagccgcgatgctggtcagaaccttccagatacatatcggcggcgtgaccagcgaattccggacgcacgtcaaccacggaagagtgggtcgacccggagtcaaaccagacgtcgagggtatccggcactttctcgtagctgtcggcgtcatcgccaagaatgtcgcgggaatcgagatcccaccacgcctggatgccgtcaacttcaacgcgttttgccacttcttccatcagttcaagggtacgcgggtgcagttcgtgggtttctttatgcacgaacagcgacatcggcacgccccaggtgcgctgacgggagatacaccagtcagggcggttagcgaccatcgattcgatacgcgcctggccccagtccgggatccactgcacgcctttgatctctttcagcgactgcgcgcgcaggcctttctgatccatgctcacgaaccactgcggagtggcgcggaagatgatcggcgacttgtggcgccagcagcatggatagctgtgctgcagtttctcaacgtgtaacagcgcgccacgctcacgcagcatctcaacgatgatgtcattggctttgaaaacattaatgccgtccagggacggccaggtgccaggcaggtaagcgccgtccgggccaaccgggttggcgatttccagaccgtatttctggctgatggtgtagtcgtccggaccgtggccgccagcggtatgcaccgcaccggtaccggcatccagcgttacgtggtcgccaaggatcgccggcacgtcgaaatcgaggaacggatgcttaaagcgcatcagctcaagctcagaaccttgtaccgccgccagaatagtgtagtccgtcgcgccaacgcgcttcattacgctctcaaccaggtctttcgccaggatcagcgcctggccgtcaacctgcaccagcgcatagtcgaactcaggagacagagagatagcgcggttggccggcagggtccacggcgtggtggtccagataaccagcgacaccggaccgttgacgtcgactacgccgaatttcgccagtaccgcggctttgtctaccgcgtggaacgcgacatcgatagacggagaggttttgtcgtaatactccacttccgcttccgccagcgcggaacggcagtctacgcaccagtgcaccggtttggcgcctttatgcaggtggccattaccgatgattttgcccagcgcgcggatgatgttggcttcggttttgaagtccatggtcaggtacggatgcgaccagtcgcccagcacgccgagacggataaagtctttacgctggccatcgatctgctcggcggcatattcgcggcacttagcgcggaattcggcagcggtaaatttctcacccggcttgccgtattcctgctccactttcagctcgatcggcagaccgtggcagtcccagcccggaacgtaaggcgagtcatagcccgtcagtcctttggacttaacgataatatctttcagaatcttgtttaccgagtgaccaatatgaatgctgccattcgcataaggagggccatcatgcagaatgaaggtttttttgccttttttggctgcacgaatgatgccgtacaggtcatcatcggtccaacgcgccagcattcccggttcgcgtttggcgaggtcgccacgcatagggaaccctgtttccggcaaattcagggtcgatttatagtcactcatcagattctcggttccgtatttcggtttgataaacaccagtggctcaggcctggctggtcagcccaaataattcgcgggccgttaactcatcacgtgcgatttgcgccttcagctcgtccagcgacgcaaaccgctgctcgttacgtatctttttacgcagtattacattgatatggcgaccgtagaggtccattacaacgtccaacagatgtacttcgagctgctgacgcacgcccgcaaccgttggacgggtgccaatattggcgacgcccgctatcggtttgtcgcccagccctgtcacttctaccgcatagacccctttaaccggggaaacctgacgacgcagcggtaagttcgccgtcggaaaacctatggttcggcctagttcatcaccatgcacgacgcgtccggagatgctaaacggatggccgagcagcgtctccgccagcaggagatcgtcatcggccagcgcctggcgtaccgccgtgctgctgattcgcaccccgccttcgcagaaggtctgggtgctggtgacgtcgaagccatattccgcccccgctttttgtaataacaagaaatccccctggcgaccagcgccaaagcggaaatcgtcaccaacggcgaggaactgcacgcccaggcgacgcaccagcagttcactgataaaatcctgcgcggttagcgcggcgaaccggcggtcaaagcgaacgcacaatacatagtcaaccccgctttcagccagatagcccagcttttcacgcaggcgggtcaatcgcgccggggctttatcagcggcaaagagctccagcggctggggttcaaaaatcatcaccacgaccggtaaaccgcgctggcggccctcttcgcgcaaccgctgcagcagcgcctgatgcccacgatgcacgccgtcgaaattaccaatggtcagcacgcacccgtgcggggcctgactgagattatgtatgccgcgtatcagcttcatgtctggctcaaaacagtgaaaatcgtccgagtataccttgtacaactgtcaacgttaaccagcgattgcacctcggcaacgaaagttctcaggaattcattcactcagcgcgagaaagcgtgaaaactggccgcgcccggcgatttttatggtggaaaagctgtattcgcctgcaacaagctggtagaatcttgcgccatcactacgtaatgaagcgctgtggtgttaaacggcgcttatttgcacaaatccattgacaaaagaaggctaaacgggcatattcctcggcctttgaattgtccatatagaacacatttgggagttggaccttggctaatatcaaatcagctaagaagcgcgccgttcagtctgaaaaggctcgcaagcacaacgcaagccgtcgctctatgatgcgtactttcatcaagaaagtatacgcagctatcgaagctggcgacaaagctgctgcacagaaagcatttaacgaaatgcaaccgatcgtggaccgtcaggctgctaaaggtctgatccacaaaaacaaagctgcgcgtcataaagcaaacctgactgcacagatcaacaaactggcttaatcgcctgcttgctgaactttgttaaagaaacccgcgaaagcgggtttttttatgcctaccatcttcccccggtagcgcacgctggcgcgatctgagccacgccagcccacgccttccggctatcggggttcggtgaacagcgacgaataatcgcgattacagatacgctgtaccgccgggtgctgaatcattctttcagcgaaaatagcgtgatactcctccatcacgctatccatacggccaatttcgacaatcgattcatcatggtagaaatcatgcgcgtagagcgtcggcgcgacaaatatcgcattatgtgcggcgccgaaggctttcatgagcgccgcgtcgtcaaactcgccgaggatctccaccttcaggccctgcacgttaatccagttcaacagcttacgtcccagcatcgatcgccggccggggatcagcagccgccgctcttcgaggcaggccgggaacggcttcgtcggcgccggattcatgcaccagaagctgacgctgcactcgccgatcttcaccgaaaatagcccttcctgctgcgtcgagtcgatcgggcagtcagagataatcatgtcgagcttatgctggctcagctgctccagcagcagctcatgagtggattcaaaacagcgcagatgaatctgctcgctctcaacgacggcggcatccagcacgccgctgaccagccgtttcgagagcgcatcggccacgccgacgtcaaacagcaggttcgactctttgcgatagttgacgatgtcgagcatctcctggctgagggtaaacatccggtcggcatagcgaaaaaccagctcccccagctcgctcggctcaagccccctcccctttcgcttaaataatttcccctgcaggcgctcctccagggctttgatctgcccggtaatggtctgcggcgtcagaaacagcgcctccgccgcgcccacgacggacccttctttatacacgtgccagaagtagtacagatgattgtagttaatatgtgacatgcttctctccctgataatgtccaggagagcctgacgggctctcctgcagaaaggttataccgcgaggcgagtatccgtcacgcgctgacgcagtatgaggtagccgacgaccgctgatagcactgagccgatcagaatgccaagcttggcccagttgatcaacgcgggatccacgctgccaaaggccagggtggcgatgaaaatcgacatcgtaaagccaatcccgcacaggatccccaccgccataatttgcttgcaggtggttccctccggcagcgaagcccacttcagcttcagggccagccagcagaacaggctaatccccagcggcttaccgataaacaggccagccataatgcccagcggcaggagcgacgtcagcccggcaagggtgaccccctgcagtgagacccccgcgttcgcgaaggcaaacagcggcaggatcataaacgccacccacgggtgcaggacatgctcaagcgctttggccggcgacttgccatgcttttcttcgagcgggatcataaagccgacaatcaccccggcaagggtcgcgtgaacgccagacttcagcaccgccgtccacagcaccgcgccaaccagaatatagatcccggtacgccgcacgccgctcagattcagggccaccagcaccgcgatcgccgccgccgccacgcccagcgagagcatggacaggtcgtgggtataaaacagcgcgataatcacgatagccccgaggtcatcaataatcgccagcgccatcaggaaaatcttcagcgccgtcgggacccggctacctaacagcgccagcacgccgagggcaaaggcaatatccgtcgccgccgggatcgcccatccctctctggcgacaggatcctgggcgttaaaagccaggtagaccagcgccgggacgatcatcccgcccagcgcggctatcaccgggaagaccgcctgacggcggctcgccagcgacccctgaatcagctcacgcttgacctccaggccaatcagcaaaaagaacaccgccatcagggcatcattgatccataacagcatgttcttgttgatctccagcgtgcccacacgcagctgtactggcgtctcaaggaaggagtgatacagaccgctggtcacgctggtattggccatcaccatcgccagcgcggcggcgataattaagacaatgccgccggaagcatcgctactaaagaatcgttgcagatgtttcacttttactttcatcctgttggtgaataactcgataaaagcataatacacacactgataactcgaaaaaatcagatttaagttgcgctaatattcgctttttacgagttaaaggggagttctaaggcgaaaaaaagcccgggcagcaaaggcccgggccggatatcaacaaaggcggaattagcgggtcaggtcgtcgaagaacttcttcacgccgtcaaagaagcttttcgaacgcgggctgttgttttccccggtcggaccgccgaagctctcctgcaactctttcagcagctgcttctgcttctcattcagccccaccggcgtccccaccaccacgcggcacagcagatcgccctgcgcgccgccgcgaacggatttcacgccttttccacgcatgcggaacagcttgccggtctgggtttcacctggaattttcaggttcacgcggccgtcgagcgttgggacctcgatctcaccgcccagcgccgccatggtgaagttgatcggaacttcgcagtacaggttattgccttcacgctcaaagatagcgtgctgcttcacctgaacctgaacgtacagatcgcctgccggcgcgccatgttcgccggcctcgccttcgcccgccagacggatccggtcaccggtatccacgcccgccggaattttaaccgacagggttttgatcttttctacgcggccatggccatgacatttattgcacggatctttaatcagcgtaccgcgtccctggcagtgcggacaggtctgctgtaccgcaaaaaagccctggcgcatctgcacctggcctgcgccatgacaggtcggacaggtctgcggtttgctgccggccttggcgccgctgccgtggcagacgtcgcactcttccagcgtcggaatacggatctctttagtgacgccgcgcaccgcttcttccagcgtcagctccatgttgtaacggagatcggcgccgcgtgccgcgcgctgacgaccacgtccgccgccaaagatatcgccgaaaacatcgccaaagatatcgctgaagtcggcaccgccgccaaaaccgccgccgccgcccatgccgccctgttcgaaggccgcgtggccgtactgatcgtaggccgcacgcttctgggcatcagtcaggatttcatacgcttctttgatttctttaaatttggcttcagcctctttatcaccctggttgcggtccgggtgatatttcatggccaggcgcttataagcctttttgatttcacgctcttccgctgttttggaaacgcctaaaatctcgtagtaatcttgctttgccatcggtgtttttcagccccttaacatgcgtgcacgggcggagaggaaacctcttcgcccgtgccagtgttttacccgttcaaagggcgattattttttatctttcacttcttcgaactcagcgtcgacaacatcgtcgtctttcgcgttgctcgcctgagcgtcagcggaacccgcctgctgctgagcgtgctgctgctgagcaatttccatcagcttctgagaagcctgcgccagcgcctgcattttcgcttcgatatccgctttgtcttcgcctttcagagaagattccagcgcggtcagcgcagactcaatggcagttttgtcgtcagccggcagtttatcgcctgcttcttcaacctgcttacgagtgctgtgcagcagatggtcgccctggttgcgggtctggaccagctcttcgaacttacggtcagattcggcgttagcttctgcttcgcgaaccattttctgaatttcttcttcattcagaccggaagacgctttgatggtgatcttctgctctttaccgctgtttttgtctttcgcggagacgtgcaggataccgtcagcatcgatgtcgaaggtcacttcgatctgcggcatgccgcgcggcgccgggttaataccatccaggttgaactgacccagagatttgttatcagacgcgcgtttacgctcaccctgcagcacatggatggttaccgcagactggttgtcttcagcggtagagaacacctggctgtgcttggtcgggatggtggtgtttttgctgataagcgcagtcatcacgccgcccatggtttcgatacccagcgacagcggggttacgtcgagcagcagaacgtctttcacatcgccagtcagtacaccgccctgaacggcagcaccgatcgccacggcttcatccgggttaacgtctttacgcggttctttaccaaagaactcggccactttcttctgcaccatcggcatacgagtctgaccaccaacgaggatcacgtcgttgatatcggaaacggacagaccggcatcctgcagagcgactttcagcggctcgatggaacggttaaccaggtcttctaccaggctttccagtttcgcgcgagtcactttgatgttcatgtgtttcggaccggtcgcgtctgcagtgatgtacggcaggttaacgtcggtctgctgagcagaagacagttcaatcttcgctttctcagcggcttctttcaggcgctgcatggccagcgggtcgttgcgcaggtcaatgccctgatctttcttgaactcatcaacgaggtagttgatcagacgagtatcgaagtcttcgccgcccaggtgggtatcaccgttggtcgccagaacttcaaaggttttttcgccatcaacttcgtcgatttcgataatcgagatatcgaaagtaccaccaccgaggtcgtaaaccgcgatagtacggttgcccacttctttatccagaccgtaagccagcgcggccgcggttggttcgttgatgatacgtttgacttccagaccggcgatacggccggcatctttggttgcctgacgctgcgcatcgttgaagtaagccggtacggtgataaccgcttcagttaccggttcacccaggtaatcttcagccgttttcttcattttcttcagcacttcagcagagatctgcggcggtgcagttttggtgcctttcacatccagccatgcgtcgccattgtctgcggcaacaattttgtatggcatgatagaaacgtcacgctgaacttcttcgtcctggaagcggcggccaatcaggcgtttaatcgcaaacagggtgttttgcgggtttgtcactgcctgacgtttagccggctgaccaaccagagtttcaccatcctgggtataggcaatgatagaaggcgtggtgcgatcgccttcggcgttctccagcacgcgtgcagtagtgccatccataatcgctacacaagagttggtagtacccaggtcgataccaataattttacccatctaaacgtctccactaaaaattcgatcaacatgtggttgtgaacctgtaataagggcgaaacgtgcggtttcaactgcccagacatcattttttttcaggttcttcactgcggttgactacaagatggggtcgcccactccggcatcaaggggcaagcataaaaattttttgcctcggattcgcacagggttacggatgacttgccgaacaaggttgttggatggcaaaaacgacggcgaaatatacatacaaaaaacggattaaaataggaaatacattcataatatcattgacataacccgcaatacttgcgcgctaaaagccccgttttcgcagtgataaactcccccgccatcgcacttcgcttattcaggggacaaattaatgaaatcgctataccggctttccgtagggcttatcctcggcgtgtcatttatcacctcggcggccgctaacgaccataaaattctcggcgtgatagctatgccgcgcaatgaaaccaacgacctgacgctgacgcttcccgtctgccgggtggtcaaacgcattcagctcagcgccgaccgcggcgatgtacaactctccggggcgacggtctactttaagaccagccgcggcgccagccacacgctgaacgtccccgccgggatcaaagagggcagcaccaccggctggatcaaaatcaatagcgataacgacaacaaacgttgcgtgaagaagatcgccttctccggccacacggtgcactcctcagatatggcatcactgaaaattatcggcgatgactaatgtcgcccctgcccgagagaaaacgttatgcatattaattacctggaggatgacgatctcgcctttctgcctgagtgcagcgaggcgcatctggaagcctttacccgcattctgacccacggggaaaatggcaaaccccgtctctccagcacgctcctgcgcaacgagacatttttagcgatggagggtcacccggagcgttatcgccgcaactggcagctaatcgccggtgagctacagcattttggcggcgatagcatcgccaacacgctgcgccgccatggcaaattttatcgcgcgatcctgctggatgtatgtaaacgactgaaagcgaaggtcgacaaacagctgtcgacgccgcagatcgagcagcagttgctggcgcattttctgcagcacagctggaataaactgaacgcggagcaaaaagcgcactttctcgccgcggtggagtgccggagccatgagctggacagcctgatggctcatctgctgaggcatcgcaagctaagcgaaggcgtcactttgttgctggacgaacgcttaaccgccatcctgcgcacgcacgccgcggtgagcgtcatcggtcatggcctggtgcgcggcgccgggctgggcggaccgctcggcgccgcgctgaacagcgtgaaagcggtgagcggcagcgcctaccgggtcaccatccccgcggtcctgcatattgcctgtttacggcaaatgctccagccgccgtcagacaccgcggaaattggtgaaaaataccccgccagatcatagacagcccatcagcgcctcattattatgccgcgccccgccgccaagtcgcggggtaatgcttcccttttaatgataattttgaggaattatgggcaacactaagttggctaatccggcaccgctgggccttatgggcttcggcatgaccactattctgcttaacctggcgaatagcggcctgttcgcattcgatgtagctatcctggcgatgggcattttttacggcggcattgcgcaaatttttgccggcctgctggaatacaaaaaaggcaacacttttggcttaaccgcttttacctcctacggcagcttctggctgacgctggtggcgattcttctgatgccgaaaatgggcctggcagacgcgccaaacgcgcacttcctcggtatgtacctcggcctgtggggcgtctttaccctgtttatgttctttggcaccctgaaggcagcccgcatgctgcagtttgtcttcctgagcctgaccgtactgttcgcgctgctggcgattggccatttggccgataacgaaggcattgtgaaggtagccggctgggtcggcctggtttgtggcgccagcgctatttacctggcgatgggtgaagtgctgaacgaacagttcggccgcaccgtgctgccgatcggcgaaccgcgctaatcttccgccgccgtccggtcacagggcggcggcaggtcattatcagcatcagctagccatcgttaccgctgcagccccccttccggcatccccgccggcgccgtcagctcctgacgcagccagatacctaatcccagccccatcagcgacagggccagcacataccaggccggcgccatcggcgacacccccatcagcatggtgaccgcaatcggcgtcaggccgccaaagatcgcgtacgacaggttgtaggagaaagagatgccggtgaagcgtacttccgccgggaaggcccgcaccatcacatagggcaccgcccccaccacgccgacgcaaagccccaccgtaccgtagagcagaaacagccgctgcgggctggcgccggcaagatggtaaaatgcccagctggcaaccgccagcagcaggctgccgacgataaaagtgcggctggcgccgaagcggtccgccgccagcccggcgagcagacagccgatgcacaacataatggtggcgatgctgttggcctgcagggtaatggccggcgcaaaaccatagtgcttctgcagccagaccggcgacatcaggatcaccaccaccacgccagccgacagcagccaggtcagcagcatagagatcaccaccgccttctggtgcttgagcgccaccgcttttaccggcagctcctgcgccagcgctttgcgctgctgcatctcaagaaaaatcggcgtctcctgcagccagcggcgcagatacatcgctatcagaccaaatacgccgcccagcaggaaggggatccgccagccgccgtcgtggatcccctgcggcgtcagactggtattgataagcgtggccaccaccgaccccagcagaatgccaaccgtcaggccggccgtcagcgtgccgcaggcgataccaatgcgtttttccgggacatgctcagcgacaaacacccaggcgcctggaacttcaccgccgatcgccgctccctgcagaatacgcatcagcagcaatagcagcggggcgatgatacctaccgagctataggtcggtagcagaccgatcgccagggttggcagcgccatcagcaggatgctgagggtgaacattttcttgcgccccaccagatcgccaaagtgggccatgatgatgccccccagcggacgcgccaggtaaccggcggcgaaaatgccaaaagtttgcacctggcgcagccattcgggaatatctgcgggaaagaagagctcgccgacgacggcggcgaagaaaacgaaaatgataaagtcataaaactccagcgcgccgcccagggcggccagcgtcagcgttttataatcctggcggttgagcggtcggtttgcatatgacataacgcaatttcatcctgaggtgtgcagcgtgttttatagtgtgtaaagtaaaaatcactatatcgtaaataaaacggcacaccattagcgatgcaggttatatcaaaaatgcatcaaattcaggataaagtttcgcgtctggcactcttgggacgaaaagcttctactatacggccatcggtttccacataaggcccttcaagcaactgtacacaataaggtacacttgcgaaaataccgtgcaccagcacgttgccgtcagcatctttcaccccttccagagtctcctgaattgctttcggttgcccgggaaggttgaggatcagcgcctgcttgcggatcacaccgacctgccgggaaaggatagccgtcggcacaaagtgtaggctaacctggcgcatttgctcgccgaagcccggcatctcgcgatcggcgatcgccagcgttgcgtcgggcgtcccatcgcgacgcgcagggccggttccgccggtggtcagcaccagatggcaccccatttcgtcaaccagttcgcacagcgtttgctcaatgatggcctgctcatccggaatcagacgggtttgcagctcgaaaggggtggtcagggcacgtgccagccactcttccagtgccgggatgcctttgtcctgatagacgccgctggaggcgcgatcggaaatggaaactaagccgattcgtaaggtattcatggttattccgttcaaactgtggcgttaaacgaaatgatacactgccggaggcgggacagacagtgtaatgtggccgacgggcgtcggccacctgcgcgattacagcagttcgtcgatcattttttccagtttttcctggtcgatcgcaaacttacggataccttccgccagtttgtctaccgccatcggatcctggttatgctgccacaggaactcagattcggtaatacgctccggacgcgctttcacttcaccggtatataccagcttacgctcaacggcgccttcgctttcggacagctctttcagcagcgccggggcgatggtcaggcggtcacagccagccagttccagaatttcgccaacgttacggaagcttgcgcccatcacgacggtttcatagccgtgctgcttgtaatactcgtagatttcgctgacggaaaccacgcccggatcttctgccggtgcgtactctttcttgtcggtgttggctttgtaccagtcgaggatacggccaacgaacggcgaaatcaggaagacgcccgcttcggcgcaagcgcgagcctgagcgaaggagaacagcagcgtcaggttacagttaatgccttctttttccagctgttcagcggcgcgaatgccctgccaggtggaggccagtttgatcagaatgcgatcgttgctgatgcccgcgtcgttgtacagcttgatgatgcgcttggctttcgcgatagacgcttcggtgtcataggagagacgtgcgtccacttcggtggagatacggcccgggatcagtttcagaatttcgagaccgatgttcaccgccagcttatcggaagcatcgaggatctgctgcgcgcgatcgctgctctggctacgagcccaggcgacagcgtcgtcaatcagcttacggtactcagggatctgagccgcgccgagaatcagggaagggttagtggtggcatcctgaggctgatacagcttcattgccgcaatatctccggtgtcagcgacgacagtggtgtactgacgcagagaagttaatttatccgtcatgatatatttctcttaaacagcagttaaggggatgtaaccggtctgcccagatgataacacgctgccgggtcagcgcaaccgccgacgagagaagagcgcagagtgtgataaactatgcagattaatttgctgaaagcgaaaggattgtcacttaattggtaacgcttacactggcgtaccggcatggacaagaggatgtttaatgcctgattttctctcatttatcaatgaaatactctggggctcagtgatgatttatctgctactgggcgccggtatctggtttagctggcaaacccggggtattcagtttcgttacgtgcgcaaattcggccgcagtctaaaaaaaagcctgcacccgcagccgggtggtttaacgtcctttcaggcgctctgtaccagccttgccgcccgggtcggcagcggcaatcttgccggggtgacgctggcgatcgacgccggtgggcccggcgccgtattctggatgtgggtttccgccctgctcggcatggccagcagctttgctgaatgttcccttgctcagctgtataaagaacgcgatagccgcggacagtttcgcggtggccctgcctggtacatggcgcgcgggctcggcatgcgttggatgggcgtcctgttttcgatcctcctcctgctggcctatggttttatcttcaataccgtgcaggctaactccgtggcccatgccttgcgctatgcgttcgatctgccggcggcggtcagcggcggcgtgctggccgttgtcgttttgctggcgatcctccgtggtttacgcggcgtggcgcgtctgatgcaatggatcgttccctttatggcgctgttgtggatcgccaccagcctgctcatcggcctgtggcacatcaccgccctgccgacgattttcgccaccatctttcgctgcgccttcggctggcaggaggccgccgccggcgcggtgggctacaccatcagccaggcgctgaccagcggcttccagcgcggcatgttctccaatgaagcagggatgggctcttcgcctaacgccgccgcggccgccgcctcctggccgccgcacccggcggcgcaggggatcgtgcagatgattggcgtgtttatcgatactatcgtgatctgtaccgcaagcgcgattatcgtcatgctggcgccgcggcccgacaatgaatatacgctcaacggtattcaggacttgcaacacgcgatgagcgtgctggtcggcggctggggagcgggttttatcgccctcatcgtgctgctgttcgcctttagctctatcgtagccaattacgtgtacgcggaaaataatctggtcttcctgcgcctggataagccccgctatatctgggggctgcgaatactcaccgtcctgatggtgctgttggggaccatggttagcctgcctgtcgtctggcagagcgcggatatcatcatggcgctgatggcgatgaccaacctgacggccattctgctgctctccccgacggtgcggattatcgccagcgattatctgcgtcagcggcggctgggtatccagccgactttcgatgccactcgttacccggatattgaccaacagctggccccgggcgcctggaatgaattgccgcgcgaatagcgcggcaattgcagctatcgatcccaccatgcactttttttgttaaaattcgtcgaaattacctgcaaggactggatatgctgattctgatttcacctgctaaaacgctcgattatcaaagcccgctggcaacgactcgctatacccagcccgaactcctcgagtattctcagcagcttatcggcatcgcccgtaagctgagcgcaccgcaaatcggcaagctgatgagcattagtgacaagctggcggatctaaacgccacccgcttccacgactggcaccctgactttacgccgcaaaacgcccgccaggcgatcctcgcctttaaaggcgatgtctacactggcctgcaggcagagacgctcaccgaggacgactttgacttcgcccagcagcatctgcgcatgctctccgggctgtatggcgtgctgcgcccgttagacctgatgcagccctaccgcctggagatggggatccgtctggaaaatccgcgcggcaaagatctgtaccagttctggggggataccattaccgagaagctgaatcaggcgctgcgcgaccagggcgacgatatcgtcatcaacctggcttccgatgaatattttaaatcggtgaaaacgccaaaattgcagggtcagctgatcaagccggtattcctcgatgagaagaacggcaaattcaaagtgatcagtttttatgcgaagaaagcccgcggcctgatgagtcgctacattattgaaaaccgcttaacccagccggagcagctcaaagcctttaatagcgaaggctatttctttgatgcggatgcctcagagaaaggcgaactggtgtttaaacgccacgagcagtaacacgttacggtaataaaaaaggggagttattccccttttcaatataattaagcagattattacttattttaacgcacccagttttccaccacgcctttttcatcgaagaaaatcatcagcgagttcgaatctttttggctggacttatcgaccgcatcggcagcttgcgatgccccggttaccgggatcatggaacccgcgaggctgaccaggttgatccctttatctactgaataataccagctctctttacccgacgccgtcaccgtcgtatgaccagaatccggagcaccaaaatactgacgaacctcggccttggtggtttttccgacaatgagatgttgtttcagataggctggcgttaatttatcttcattaccgccaatcgttgtcccggagcagcctgttaaagcgaacaccaccaaaaaaagagataaaatacgcatgtttcctccttgaaaaccttgtgcattaacaatgcatctataacaaatgatatctatagctgcttcataataaaatcagcagcataaatataagcagcatgaaataataaataaaaaagataatccagtggaattatccggcaaagaggacaatccgtaaaagagtttgcaataaaagcagtgcgctgacaataaaatagtgtggggaattttatggagagaaattttactgatatggaaaagtgcgttaaatataaaaaccgggcaatagctgcccggtttggtcgatcatgttgccgatattattgcctggcttagcccatcatcagcttacgcagcgcggcgaaatccgccggcaggttgtgagacagcagcggcaggtcggcgcggtcggccagctccttcggcagcggcagagtctcctgcaggatctcctccacgctctctttgaacttcgccggatgggcggtgccgaggaacaggccgtactctcccggctgcagctgatcgcgcagcgcgcgccaggcaatcgccgcatgcggttcagagatgtagccgatggccttcagctcgcgcatcgctgctttggtggtctcatcatcgaccgcggcatagcccagctcgctgagacgccagattttacggcggaacagctcttcaacgcgcggccagttgttcggctggctgacgtccatggcgttggacagcgtcgcctgggtggcttttggcgcccactcgccgccctgcagatagcgcggaacggtgtcgttggcgttggtggcggcgataaagcgcttgatcggcagccccagcgacttggccagcagaccggcggtcagatcgccgaagttgccgctcggcacggaaatcaccagctgattgcgggcttcctgcggcagctgcgccgccgcttcgaaatagtaacagatctgcgccagcaggcggctgatgttgatggagttagccgagttgagacccagcgtcgccttcagctcttcatcgtcaaacgcctgcttcaccagcgcctggcaggcatcaaagtcgccatcaatcgccacggtttcaatattgccgccgagggtacagaacagcttctcctgcagcggactgatcttgccgcgcggatagaggatcactaccttgacgttcggcaggccgtagaaagcatgcgccaccgccgccccggtgtcgccagaggtcgcggtgaggatggtgaccggcttatcgcctgcgatgtgggtcagcatctgcgccataaagcggccgccgaaatccttgaacgccagcgtagggccatggaacaactccagacagccgacatcttcctgaaccttgcttaccggcgccggaaacgcaaacgccgcgcgcacccgctgctgcaggacatcctgcgggatctcatcgccgataaaggcggatagaattttggcgctacgggtgacaaagtcctgcgccagcatgtcgtcgatttcagtcaggctgaattccggcagatcgtgcggaaagaacaggccctgatgcttgccaagtccctgggtgacggcctgcgcaaagctgacctgctcgttatgatcttttaagttatacagtttcattggttatcccactacgcgtgcgcccgccgtgtccagccggcaaatatgaacaaagccttcctgattctgcagatagtgcgcgccaagccagtcggcgacgcgctgcgcggtatccggtttatcacacaacgcgaacagcgttgggccagagccggagatgccgcaagcctgggcgcccatctccatggccgcctgacgcgcttcgctaaagcccggcagcagtttggttcggtacggttcggcaatcacatctttcatcaattttgccgccagctgcggctggcgggtgtagcaggcgtgaataaagcccgcgaggtggcgaccatgggcgatacaatcctggcggcgatactgcgccggcagaatcgcccgcgcttcagcagtagagactttaatccccggataggccagcacccacagccactcatcaaacccgggcacctgctgactgataatcccattctcttcgatcatcaactgcatgccgccaagatagcacggcgccacgttgtcgtagtgaatgctgccggagatacgcccttccatctctcccatcagcgccagcatgcgcgtctcgttcagcggcttgccgcagaactcgttcatggccaccagcgcagcgaccaccgagcaggcgctggaacccagcccggagccaatcggcatgtttttttccagcgtcatcgccaccggcaccgtcttgccgatctcccggcaaaagctttcccagcactggtaaacaatgttctcctgcggcgccgtcggcagtttgctggcgaagcgtccaagattctgcaggctaaattgctccgccgcttcgacagtgacgttgtcgccaagcagcgtgccatcgaccggcgtgaccgccgcgcccaacacatcaaacccgacgctcatattggccctggaagccggggcatatactttgaccatcttaaactcctaacttccaggacagggtgcgcagcaggtcggcgaatacgccggccgccgtgacgtcgttcccggcgccatagccgcgcagcaccagcggcaatggctgataataatggctataaaaagccagcgcgttctcaccattcttaactttgaacagcggatcgttgccgtcaaccgcggctatttttacccggcaggtaccatcctcttcgatgttaccgacgtagcgcaagactttaccttcatcgcgcgccttagcaacccgcgaggcaaaaccatcatccagcgacggcaggcgggccataaaggtctcgacatcgccgctggcgtcgaagtccggcggcagcgccgactcgacgataatgtccgccagctccagttcacgcccggtctcgcgggccagaatcagcagtttacgcgccacatccaccccggataaatcgtcgcgcggatccggctcggtataccccatctcacgggccatcgccgtcgccgcggagaaactcaccccctcgtccagcttgccgaagataaacgacagggagccggacaggatcccggagaaatggcgcagctcatcgccggcgttgagcaggttctgcaggttctcaatcaccggcaggcccgcgccaacgttagtgtcatagaggaacttacgccgcgagctgctggccgcatggcgcagctggtgatagtaatccagcgaagaggtattggcctttttgttcggcgtcacaacatggaaaccttcgcgcaggaagtcggcatactgatcggcgaccgcctggctggaggtacagtcgacgatcaccggattgagcaggtggtactctttcaccaggcggatcaggcggccaagattaaacggctctttcgcctccgccagttccgcactccagttttccagattcaggccatgcacgctggtcagcagcgcctgagaattggctacaccgcagacgcgcagatcgatatgtttgttcttcagccacccctgctggcgcttgatctgctctagcagcgcgccgccgacgccgccgacgccgatgacaaacacttcaatcacctggtcggtgttgaacagcatctgatgggtcacgcgcacgccggtggtggcgtcgtcattgctgaccactaccgaaattgagcgctcggaagagccctgggcaatcgccacgatattgatattggcgcgggccagtgccgcaaagaatttcgccgagataccgcgcagggtacgcattccgtcgcccaccacggagatgatcgccagacgctccataatcgccagcggctccagcagcccctctttcagctccagataaaactcatcttccatcgcccgtttggcacgtgcgcagtcgctctgcggcacgcagaaactgatgctgtactccgaagaagattgagtgatcaacaccaccgagatgccagcgcgggacatggtggcgaagacgcgggccgccatgccgaccatccctttcatccccggcccggagacgttgaacatcgccatgttgttgaggttagagatgcctttcaccggcaaatcgtcctcgtcgcggctggcgccgataagcgttcccggcgcctgtgggttgccggtatttttaatcaggcatgggatttggaactgggcgataggggcgatggtgcgcgggtgcagcactttcgcgccaaagtaggagagctccatcgcctcctgataagacatcgatttcagcaggcgcgcatccggcacctgacgcggatcgcaggtgtacactccgtcgacatcggtccagatttcgcagcagtcagcgcgcaggcaggcggccagtaccgcagccgagtagtcggagccgttacgccccagcaccaccagctcgcctttctcattgccggcggtaaacccggccatcaggatcatatggtctgccgggatctggctggcggcaatgcggcgggtggattcggcgatatcgacggtggattccagatagtggcccacggcgagcagtttttcgaccgggttaatgacactgactttatgtccacgggcttccagcagacccgccatgatggcgatggagagcttttcgccgcggcagatcagcgcggcattgacgctgtccgggcactgacccagcaggctgatgccgtgcagaacatgcttaatctgagcaaattcctgctccatgaaggcttttaactgggcaagcgggaaagcgggctgggcgtcggcaaggccctgaagaagttcggcaaaaatgcgttcggcgtcggcaatattggggagggcatcctggccgccaatggtcttttcaatcatcgctaccaggtggttagtgatcttcgccggggcagacaggaccgtcgctacctgcccctgcctggcattactctccagaatatcggcaacccgcagaaaccgttccgcatttgccactgatgtaccgccgaacttcaacactcgcatggttcttaccccttgatctcttgtcaaaaaaaaagcccgcactgttcaggtgcgggcttttttctgtgtttcctgtacgcgtcagcccgcaccgttacctgtggtaatggtggtggtgataatggtggtaatcatgccgatgcgattcatggatgttgtgtactctgtatttttatctgtctgtatgtcctgcctatattggttaaagtatctgccgtcttaagtcaatgaatttctcaatttgccccatttcagcaggcttacgtattttcccgctgccgtgagaaaaaacatccagatcggcggaaaaccagcccatagaacagcatacacatccataaataaaaaatatgacagagttttattctggcaggtttttttcaatatcatgcagcaaacgatgcaacattgccgtgtcgcgctgctgcagcaggcccagccgttgcgacaaccagtcggccagtttggcatcatcctccacgcccaaacgcgaaagtaacgccagggtacgagtacgtaaggcctgcagctgatgatggtctgccgcagcggcggcgggcgccgtttgttgcattagcgatgctaattgataacagtagaccatcaccgactggccgagattcagcgacggataatccgcagccatcggcacaccggtcaacacatcagccaacgccagctcctcattggtcaatccggcgtcctcacgaccaaataccagggcagtatggttcatccactgcgccttctcctccagcagcggcaacagctgctgcggcgtggcgtaatagtgaaaacgcgcgcggctgcgggcggtggtggcgacggtaaaatcaacgtcatgcagcgcctcggcaagggtgggataggtggtgataccatcgaggatgtcgcctgagccatgcgccacccagcgtgccggaggcgccaggtgggcttcgctatcgacgatccgtagttcgcgaaatcccatggttttcatcgccctggcggcagcgccgacgttctcggcccgggcaggaccgactaaaataatcgttaaacgcattgcggtttctttctctctctcaggcgttatcgaggcgcagcgccccccattttacgcggtgaaaatttacaaatttgcaacaaaaatcactaaaattgcgttttcttacccataaaaaaatctaaactgttctcaggaggccgtgacaaggagtatgttaacagaacccatttatccatatgatgggcaatgcaatttcatctgatgcatcgtttcaggctttggattcactgtatttattaatttatccacgcaactagttgagccgggtaaagattgtgactataaagagcatggcgatgcaatgatttcacaagactgttaacgtgctacaattgaacttgatatatgtcaacgaagcgtagttttattgggtgttcggcctctcttagcctgttatgttgctgttaaaatggttaggatgtcagccgtttttgacaccgtcgggtccagagggaaagtacccacgaccaagctaatgatgttgttgacgttgatggaaagtgcatcaagaacgcaattacgtactttagtcatgttacgccgcgcatgttaatttgcgacatgcagcaggcaggtcagggactttggtacttcctgtttcgatttagttggcaatttaggtagcaaacatgcagaccccgcacattcttatcgttgaagacgagttggtaacacgcaacacgttaaaaagtattttcgaagcagaaggttacgatgtattcgaagcgaccgatggcgcggaaatgcatcagatcctgtctgaaaatgatatcaacctggtgatcatggatatcaacctgccgggtaaaaatggtcttctgctggcgcgcgagctgcgcgagcaggctgacgtcgcgctgatgttcttaaccggccgcgacaacgaagtggataagatccttggcctcgaaatcggcgctgacgactatatcactaaaccgtttaacccgcgtgaactgactatccgcgcgcgcaacctgctctcccgtaccatgaacctcggtaccgtgagcgaagagcgtcgcagcgtggaaagctacaagttcaacggctgggaactcgatatcaacagccgttccctggttagcccgaacggcgaacagtacaagctgccgcgcagtgaattccgcgcgatgctgcacttctgcgaaaacccaggcaaaattcagtctcgtgccgagctgctgaaaaaaatgaccggtcgcgagctgaagccgcatgaccgtaccgttgacgtgaccattcgtcggattcgtaaacacttcgaatccactccggataccccggaaatcatcgctaccattcacggtgaaggctaccgtttctgtggcgatctgcaggaataatacgatttattccgcagccatgatgcgaaaacggcgccccaggggcgccgttttttatgccgtcactctttccagagacgcagcttatcgtcatcggcagccggtgtcggaggcactgtgcctttcggcagcgataacgcataccagtccacgcgacgggtcaaaaacatcaggacgctcagcgccagcgccagcaccccggtacccagcagcagcgcgctatcctcagaatgcaacagaaaccacatcacgccatccagcagcagtagcgcggcgacaaacagcaggctgttacgccatcctctgagcactgcctgaaggtagatcccattcatcaccgcgccagacaggctggccgccagccaggcggcggtaaaaccaatgtgctctgagagcgccagcagcaccaggtaaaacagcaccagcgataagcccaccagcagatattgcatcggatgcaggggacgacaggtcaggctctcgaacacgaaaaaagccataaaggtcagcccgattaacaggatggcatattttgtcgcccgatcggttagctggtactggtcggcaagggacatcacatcggcactgaacgccggcagtcgcgaccacgggatctccatatcatccttgaaatagctccccatatcgttggcgaaccagctgctttgccagtgggcgcgatagccggcagcactcacttcccgttgcgttggcaggaagctgccgagaaaaccgggatgcggccagttactggtcagctgcagctcgctgttacgcccgagcggcaccagtgaaaactctcccgtcccgttcagatcgagtgaaaaggcaatctcaagcggcttgttgtcctccgccagcgcaggcattggcatatgaatacctgcgccatcgccgcttatccccagccccggctccacgcttaatacgttaccgttgacctccggggcatggatggcgccaatgccgcgggcatcgccgacgctcaccaccagccgcggctggcctaagacgatattcgtttttctcagcgccgccagacgcagcggatcaaacgaggccttaatctgcaaggcgttatgccagacctggccgctgtagatacccaccctcctcgactccacggtctgtttgccggcgaccgccagcgactccggcagccagtaatacacccagctccgctgatagttgacctctttttggttctccatgcgggtcagggtctcggttatcggaatagcgatcagcggtccggcgagtttttgcgagccgctggtgctttgctcaatggcgtccaccacttcgctacgataatccgctcgctcattaataagctccctgaccatcattaacggcaaagatagcagcacaatacagcctattaacgtggtgattttccagaataacggtgatttcaacatagcctttctccctatcgtgatggcctcacaataggacggctgtgtggggagaatttgaagctatgtgaagggacggtgaagtcgcagcgtggcgaccacgccgccttcgggccgattgtgcagattgatatcgccgtgatgcaggcgcgcgacttcacgaacgaacgccagcccaaggccgctgctcttatggccgtcttcgcgcggcagcgaatagaatcgctcaaagattcgttccagggcatagtccggaataccgcacccgttgtcgataacgctcaattgcacctcttcatttcgcttctccgcagccagggcgatctcaccgccctggggggtaaagtcaatcgcgttgtcgagcagattacccagcgcctgggccagcagctcgccatcgccattgaccagcatcccactctcccgccagcgcagggtgatagctttcgccgccagagcgatgttgcgctcctccgtcagccgttggtatagcgcatctatcgacaccggctgctgctttatctccagccggctttccagtctcgcctgctggagcagccgctccaccagcagttgcatccgggtgttttgcgcgaggatattatcagtaaaccgcgccgccacctcaggcggcggcccttcgcgcaggatctccgccgcgccgcggatggccgccagcgggcttttcagttcatgggtcaggtcatagacatagttttcgatggcattcttaccttcgagctttacccgcatgctctccagagcctgggccagcttgcgcaattcgctgctgccaacctccggcagcggcagcgggcgctcagcggtcaccgagtccgcatagcgcaccagcttgccgatagagaaattgatccaccagacgacgccgccgccaatcaacagcgcaatgcccagcagggcgccgccggcccagaggatccgccgctcgctgcgcttaatgaccggcgtcatcgccaggttgggtttaccgacgctcagcacgccgataatccgccccttatccatcaccggcgcggcgatatacatcaccgagctggcttcatcatgcggatcgctgcgcgtactgcgcgcgccgtactggccgcgcagggtgagccagacatcgttccagcgcgaatagtcctgccctgtcgcctgcccgctggagtcaaacaccaccttgccccgggcatcggtcagatagacgcggtactcattacgtacctttttaattccgccaatattggcgttgagcggctgctggttgagctggtgaaaggcctgcgccagcctgccctgctgcgggtttgccgccagcagatcctcacgcgccagcgccgccaacagggtagcggtatcattgagggtcccctctgtcgcccggcgcacgcccggcttcacttcctggacaaagatcgacagcacaaaccacgcggcgatcgcgacgataagaaaatagcccagcagcaggcgcatgccgatgcgcatcagccgcgccccaggctgtagcccataccgcgatgggtattgattggcgccttttcaggattcacagcccgcagcttagcgcgcagggttttgatatgggtatcgacggtacggtcgaggctttcccaggcatcgctccacaccagctccatcagctgctgacgggagaagacgcgaccgggcgcgtgaagcagggttttcaacagcagaaattcgtagcgcgtcagattcagcggctggccgaaccagctgatcgccgccgcctgctcatcgagcacaaactcgccgacgcgtaccaccggcgatggcgcggcaaacttctgcagccgccgcagcacggttcgcacccgcgcgcagacttcgcgtggtgaaaacggcttggcgatataatcgtcagcgccgatttccagccccagcagcttatcgacctcgtcgctacgcgccgtcaaaaacagcaccggcagcgccggataacgcgtcagcagacgccgacagagctcgaagccgctgatatccggcaagccgacgtcgaggatggcgacatctggcgcctgatgcgccgccgcctccagcgcgggcaaaccgcggccaaagacgctgacctggaagccctcctgctgcagcatgtaaaccagggtatcagcgatactctgttcatcctcaactaaccaaatccgtggctgctgcatgcgcgctcccgtttatttattccatggcatgatcggcacggcgctgatggcgttcttcggcgagccatcaaccactttatccgagtaggtcagatagaccagcgcattgcgcttcgcatcatagaaacgcacgacctgcagttttttaaacaccagcgaggtgcgcttctggaacaccacgtcgccctggcttttgccgtttttgattttgtccgttagctcaatcggcccgacctgctggcaggaaatcgccgcgtcagaggtatcttccgccagccccagcccgcctttgataccaccggtttttgcccggctgatatagcaggtcacgttctgtacatccggatcgtcaaaggcttcgacgacgattttgtgatccggccctaaccatttgaagaccgtatccacggaaccaatctgctccgcctgagccagctggctaccggccagcaggagcagccccatcgcaaacttcttgtatttcatattgttaccattattaaaaaatatagctgagtgattatcacgcacttagcagaaaaggtttatagatcacagctttacaaaattatcgttcaaatcccctgacctaccgcatttaaaagcaaaaaaaacactgaatgctaaaacatcaaaaaatgctattatccgctactttaatatcaggcacctgtgtttaaggatggggacattttatggatcaagcagggattattcgcgatctccttagctggctggaaggtcacctggatcagccgctttctctggataatgtggcggcgaaggcaggttattccaagtggcatttgcagcgaatgtttaaggatgtcaccggccatgccatcggtgcctatattcgcgcgcgccgcttgtcgaaatctgctgtcgcattacgcctgcccgcccgtccaatcgttgatattgcgctgcagtaccgtttcgcctcccagcagaccttcacccgagcgtttaagaaacaattctcgctgacgccggcgctctaccgccgctcgccggactggagctcgttcggtatgcgcccgccgctgcgtcttggcgaatttaccctgccgaaacatgagtttatcactctgccccctactcagctgcttggcgtgacccagagctatacctgtaagctcgaggaaatctccgattttcgtaaccagatgcgggtccagttctggcgagacttcctcggcaactcaccgtcaatccccccggtgctctacgggctgcatgagccgcgtccgagcctggaaaaagacgatgagcaggaagtattctataccaccgcgctgacgccggagatggctaacggccacctgcagcatgcccatccagtgaccctggagggcggcgagtatgtcatgtttacgtatgaagggctgggtaccggtctgcaggaattcatcctgaccgtctacggcacctgcatgccgatgctgaacctgacgcgtcgcaaggggctggatattgaacgcttctaccctgaagatgaaagccgggatcaggccacgccgattcagttgcgctgcgagtatctgatcccgatccgccgttaacgctgcagctcgtccattgcgggggcgtcaagatgcgagacgtcgcccgccgtttccaccacccagccggaagccagccacgggctttgctgatagtcgacgcgcgaaatagagcagttgcgcagccgcagacgacgctcagcgtacgccggcagccctaatatcgtgctcaccaggcagcccagcgcgatcccatgactcaccagcagcggccggctaccggcgggtaattccagacaggatgccagcgccgcatgcatacgctcgctgagctcctgcatcgattcgccctgcggaatacgaccgtccggtgtgccgttgaccagctggcgacgccagccttcttcttcttcgctgagcgagtcgatatggcgcttctccagcacccccatatccagttcgcgcaggcgcgcatcggcgatcacgctgcagccgcaggcttcggcgataatttctgctgtgcggcgggttcgccccagatcgctggtaatgatatgggtgatccccagcgttctggcgcgctcgcccacctgccaggcctggcgctcaccatgggcggtcagcgggctgtcggactgaccctgaatacgtcgctcggcgttccactgcgtttcaccgtggcgaacaaggtatacttgtaacatgctttttttccgttctggactcgttatcaaccgctttcgggcattaccgcctgccctcggggtgatttagagtatactgcgatgacgttagtttattctgagttgttttgattatgcaccatgttgtctcagcgaccactaatcccgccaaaattcaggcaattctgcaggcttttgacgagattttcggcgaaggatcctgccacattgagtccgtcgccgtcgagagcggcgtgccggaacagcccttcggcagcgaggaaacgcgcgctggcgcacgaaatcgcgtcgccaatgcgcgccttgcccagccaaatgccgatttctgggtagccatcgaagccggtatcgacgatgacagcacctttagctgggtggtcatcgaaagcgccggccagcgcggagaagcgcgctcagccacgctgccgttgcctgacgttattcttgagcaggttcgcgctggcgaagccctcggcccggtcatgtcgcagtataccggcatcgatcagatcggtcgtaaagagggggcgattggggttttcaccggcggcagattaacccgcagcagcgtttaccaccaggcggtcgtgctggcgctaagcccgttccataacgctatttatcgctagccagcagcgtctgctccagccactggcgcagctctaccggcgccgatttcaggctgttggacccgcgggtaatggtcgcaattccggcgccgagctcatttttcagctcacgctggctcatctcgccgcgcagcaactcttcgataatgcgcacccgggtacccagggcttcgcgctcgtcgggcgtcagcatcagctgcagcaacggcagatgcagatcctcagcataggcctgctgaagcagggcaacaaagcgcagccactcctgatgacgttgttcggcaacggccgcggaatagggagattgttgggtcatatcgcgccaccatattgagacgggcagcttacgctgcccgtcgaatgtactcttcaacgagtacaaagcataacatacttcccggcgatcagtaacgctggcgccactccgcatcgctgaggatcttatcctgctgccccataaagtagcggtagtaggcgtcataggagaggacattcttcacgtagccgcgggtttccgaaaacggaatactctcgacaaacgccacggcgtcgatccgtccggcgctgttcccctgccagctgcgtacccggcccggcccggcgttataggccgctgaggcgtagatacggttattgccgaactgctgataaacgtactgcagatagctggtgccgatgttgatgttggtttccggatccaacagctgcgacgggccgctgtagccgggaatgctgaacatactgacggtatgcgtcgcggtgcccggcataatctgcatcagtccgctggcgccgaccggcgagcgcactttcgggttccaggcgctctcctgacgggcaatcgccatcgcgtagctctgcggaatatctttgccgctaacatagcgggcaaacaggtcgttataggccagcgggaaacgttcttccagctgatcccacagcttaccggcgatcgtcgcctgcacgctcagatcccaccagtgctgatcgaaggcatagcgcgccagctgcgcctgctgggatttggtgcgactagtgaccaggttggcccattcggtgcgcgcggtgttatccatattccagtacatcagctcacgtacccgcgccatctccggcccggaggccagcgccggatcgatggtgcccgaggctttatcgatgcggaaggtatactcctcgccaagacgctgcgcggcgaccatcgggtagaagcctcgctgttgcatcaacgagcgaaggatcgcctgcgcctcctcatccctgccgcgctccagcagcagatccgcctgccagtagcgccattcgtctttctctttcgcctccatcggcaggcgcgccagccaggtgttgaggccatggcgatcgcccgtccccaacgccatccgtacccgccgctccaccagcggcgtggactgcgaacgcatgattgcgtcatcgcgccagatggcctgctcttcggttacatcgctacccatcaggcgccaggcgacaatatcgcgcagttcctgggtctgatcctcattgagctgctgagcctgtaccagcgaagggatcatcaggcgggcattttccacgtcctggcgggcgacgctggcgaaggcgacggcggccatctgacgggtaaagtccgtcgccccggtggtgcgggcgaaggtgaggacgctgtttggatcgttagccagggcgaccacggcgctggcgatgctctggtagttggcgggcatttgctgggccagcgatttcaccagcccgatattgccggccttcatcgccaggcggatccgttcgagataggccagcggatcctgctgaccggagtcgcgccaggcgctgaacagcggttcacaggcgccgggctgattcttgcccgtcagccacagctctttcgccccgctccaggcctcctgcgactgccccacgctcagcttggcgtagtaatagttgcactgcgcctcggtgctggtcggcttatccgggctaaacgccagcaagccgcgccagtcgctgcgccgggccagttcattcacgaagcgcgaacgtaatgaacgcgcagggggcagcgtcggattggcgtcaataaagtttttcaccaccagcgccggctggttcatcagatcgtcggtgatctgtcggtactgcaaatagggatacaggggataggtgcttaacgtgggcatcagctggtcgactacatccatctgccggttatcccacgcctgcttaatttgtgcgtagcggctgcgctgttcatccagtgaatccgcatgcgccagctgactcaacgtcaacaaaccaacgctggcagccaaaagatgccacgccatttttttggctttttccacaagctcttcctctttccggtgcattttcgcagcatcgtgccgcttaaaaacccctgccggttcggcaggcggctttacttatgctaatcagacaacgctaaacgcgccatgtcctggacatttttttacgcttctgtgaatcctgtcgcctcgctgggattagcgcgcgaaaaaggctacacttcggctttgaactatctatcaaaatagaaagaggcgaagtccaacgtggctgaattcgtttataccatgcatcgtgtcggcaaagtggttccgccgaaacgtcatattttgaaaaatatctccctcagctttttccctggcgcgaaaatcggtgtgctcggtctgaacggcgccggtaaatctaccctgctgcgcatcatggccggtatcgacaccgagatcgaaggtgaagcgcgtccgcagcccggcatcaaaatcggctacctgccgcaggagccgcagctcaacccggaacacaccgtgcgcgagtccgtggaagaagcggtcgccgaagtggttaacgcgctgaaggggctggacgaagtctatgccaaatacgccgagccggatgcggacttcgataagcttgccgcacagcaaggcaagttcgaagagattatccaggcgcacgacggccacaacctgaacgtccagctggagcgcgcggccgacgccctgcgcctgccggactgggatgcgaaaatcgctaatctttccggtggtgaacgccgccgcgtcgcgctgtgccgtctgctgctggaaaaaccggatatgctgctgctcgacgaaccgaccaaccacctcgacgccgagtccgtcgcctggctggaacgcttcctgcacgacttcgaaggcaccgtggtggcgattacccacgaccgttacttccttgataacgtcgccggctggatcctcgagcttgaccgcggcgaaggtattccgtgggaaggcaactactcctcctggctggagcagaaagaccagcgtctggcgcaggaagcttctcaggaagccgcacgccgcaaatctatcgagaaagaactcgagtgggttcgccagggcgcgaaaggccgtcagtctaagggcaaagcccgcctggcgcgctttgaagagcttaacaacgttgaatatcagaaacgtaacgagactaacgaactgttcattccgccaggcccgcgtctgggcgataaagttctggaagtcagccatctgcgcaaatcctacggcgaccgcgttctgattgacgatctgagcttctcggtaccgaaaggcgctatcgtcggcatcatcggtccgaacggcgcgggtaaatccaccctcttccgcatgatgtccggccaggaacagcctgattccggcaccatcaccctgggtgaaaccgttaagctggcttccgtcgatcagttccgcgacgcgatggacaacagtaagaccgtgtgggaagaagtgtctggcggcctggatatcatgaagatcggcaacaccgagatgccgagccgcgcctacgtgggccgttttaacttcaaaggcgtcgaccagggtaaacgcgttggcgagctgtccggcggtgaacgtggtcgtctgcacctggcgaaactgctgcaggtcggcggtaacgtcctgctgctcgatgaaccaaccaacgacctggatatcgaaaccctgcgcgcgctggaaaacgccctgctggagttcccgggctgcgcgatggttatctcgcacgaccgctggttccttgaccgtattgccacccacattctggattaccaggatgaaggtaaggttgagttcttcgaaggtaactttaccgagtacgaagagtacaagaaacgcactctcggcgccgacgcgctggagccgaagcgaatcaagtacaaacgtatcgcgaaataaaacgcaaaaaggcaacgcaagttgccttttttaatgtttgctccctctcccattgggagagggttggggtgagggcaacagcccgcagagcccctacccctgctcgcccatcagctgtttcaccagctcgacgcagcgcaggaaccgggcatcgtagtccgactccttcacatgaacgaattcgatctcgttctctttcagcagcgataccagcaacgactgaaactctttacgatccaccgagctcccaagactgcgcagtccatcggccacccacggggtattgttctccagcaggatcaccaggtcgaagcggtattcatcaatcagcgcctgcacaaacgggtgctcacgtccctcgtacttcagacagaaggcctgagtgctgacgaagtcggtatcgatgaacgccaccttgttggcatatttcaccgcaaaatcaatatactgcgcatgcccaagggcaattttatcgtaatccgaatactggagcgccatctcatcgccgccgagatgcgaaaaaacataatcccggccatattcccaggcgctggtggtattgaagatattggcgagtttattgaccagcgtcgatttaccgctcgactcgccgccgaggatcgccaccgtccgcacaaagaacggtttcacttccgtcggaatatattcccagtagcggaacgggttctcgcggatctgcccgccgctaatattcataaaggtccgcttaggatcgataagcaccgtctcgatccccagatgctcaaggtactgcggcgcatcggcctcttccgaggtatagatccggttcggctcgatccctttttcgctcataaaagcgcggatcccatggctccacacgtcccagccgtgcggatagggctccatcccctcttcattgaaggcgtggatgcgaatattcttctgatatttaaaggtttgcagcagccagcgcaggcggtcaggcaccgtcggctgttgcgacatggcgctctcttcaaacagctcgcggtcacgggtgtcgtcatagcccataatgatatgcagctcatcgacctggctacaggcgcgctgtatcaggtagatatgcccggtatgcagtgggtaaaacttaccaaacaccaccccgacgcttttctgtcggcggggaaactccagcccgaggaaacgatgcagcgcttcaagcttctgcgcactcgggcttttgattttggcattcagcagctggctaagataccccttggtcattccgctggcttccgccacctgctgcagggtacagcctttctgcttaatggcgctttttaaatagtcaaatgacgacatcgctaatctccttttaacttattataagtcgtcaaaaacgcttagcgcgtctgaaagctttttcacgccaaagatttgcatgccttccggcacttttttcggcacattggccgccgggacgatggcgcggcggaagccgtgcttcgccgcttcggagatacgctcctgaccgctcggtaccgggcgaatttccccggccagccccacttcgccaaagaccaccagatcctgcggcagaggacggtcgcgcaggctggagaccatcgccagcagcagcgccaggtcggcgctggtttccgtgaccttcaccccgccgaccacattgacgaagacgtcctgatcggccatctgtaggccgccgtgacggtgcagcaccgccagcaggatcgccagacggttctgttccagccccaccgccacgcggcgcgggttggacatcattgagtgatcgaccagcgcctggatctccaccagcagcgggcgggtcccttcccagaccaccatcaccgagctaccggaggtgatttcatctccccggctgaggaagatagcggacgggttgctcacttcgcgcaggccctgctcggtcatggcgaagacgcccagctcgttcaccgcgccaaagcggtttttatggctgcgcaacgtgcggaagcgggagtcggcatccccgtccagcagcaccgagcagtcgatacagtgctccagcaccttcggaccggccagcgagccgtctttggtgacgtggccgaccatcacaatcgccacgccgcgagttttagcaaagcgcgtcaaataggccgcggtttcccgtacctgggcgacgctgcccggcgacgactgcacgtcggccatatgcatcacctggatggagtcgatcaccatcagctgcggcttttcttcatcggcgatctgacagatctgctcaatgctggtttccgagagcatgttcaggttggccgttggcaacccgagacgatgggcgcgcatcgccacctgctgcagggactcctccccggtgacgtacagggttttcatcccttccgccagtttgcagagggtttgcagcagcagcgtcgatttgcccgcgccggggttgccgccaatcaggatcgcgctgcccggcaccacgccgccgcccagcacgcggtcaaattctttaaagccggtggagaaacgcggcagcgcctccaggctgatatctgacagcttctgcaccttcgacacgccggcgttaccggcatagcctgaaagacgctcgtttctcgccacctgcggcgacgcggcgatgcgcatctcggtgatggtgttccaggcatggcaggcgctgcactgcccctgccagcgcggataatccgcaccacattcattacagacaaatgcgcgttttggagctttcgccacgtttacctcttacttttggttcatgctgcccgagagaatacagaatacccccatcaggtcagcggggcggatagtcacttccgcctgttcattcactttgggcttcgcgtgataggcgatgccaagccctgctgccttaatcatcggcaggtcgttggcgccatcgccgatagccacggtttgcgccgttgggatctcatacttttccgccagcttgcgcaacgtattggctttatatttcgcatcgacgatatcgccgagcacgttgccggtgagcttgccgtcgcggatctccagctcattggcgaataccgcgtcgagatgcagtttgtcgcgcagatactcggcaaagaaggtgaaaccgccggaggcgatcgccactttccagcccagcgtttccagcttgagcaccagctgcgccaggcccggcatcagcggcagcgcgtcgcgaacctgcagcaaaatactggcatcggcgtctttcagcgtcgccacgcgctggcgcaggctggcggtgaagtccagctcgccacgcatcgcccgctcggtcacttccgagaccagctcgccggtgccggccagtttcgcgatctcatcgatgcattcgatctgaatcgccgtggagtccatgtccatcaccagcaggcccggggtgcgcaaatggggaattttacccaatggcgcgacgtccagccccgcctcatgcgccagtcgcgtcgcacggggagtcagcgaaccggccaggcggatcacctggtaatcctcgaccacccaggaggcaacgatcactaacgcggcgcccagctcaagctgccacgccgtcagccgacgtttatccagaccgcgaccatacagcagccagccgctgcgcccggcgtgataatccagcggcatgacctcgtcgccgctcagggaaagcggcaacccaggccacagggaaacgtcttcaggcaggtcgcaccaggtcaaactgttaggcattacggctccacatctcttcattcaggcgaggaaaataacgcatgaggctaccttgtaaccagcgcttctggcaacattaagctgcaaattttcaaaggtggaatatggttcgcgcaaaactgaaattccggctgcatcgtgcggtcattgttcttatctgtctcgccctgctcgtcgcgctgatgcagggcgcttcgtggttcagtcagaacagtcagaaacaacgcaatccgcagctggaagagctggcccgcacgctggcgcagcaggtggtgctgaatctcgcgccgctgatgcgcagcgagacgcctgacgagaagcgcatcaatcagctgttgacccagctaacccataacagccgcgtcctggacgccggcgtatatgacgaacagggcgacctggtggcgcgctctggcgaaagcgtcgaggttcgcgaccggctggcgctggatggtaaaaaagccggcggctacttcaaccagcagattgtcgaaccggtgccaggaaaaaacggcccgctgggctacctgcgtctgaccctcgatactcataccctggcgaccgaggcgaagcaggtggataataccaccaatatcttacgcctgatgctgttgctgtccctggctagcggcgtggtgctgacccgcacgctgctgcagggcaaacgcacccgctggcagcaatcgcccttcctgctcaccgccaacaagccggttgaggatgaagacgatgaaaagaaaggaaatctataatgtccacattgcgcctcctgctctctgactcttacgatccgtggttcaacctggcggtcgaggagtgcattttccgccagatgcccgccacccagcgggtgctgttcctgtggcgcaatgccgataccgtggtcatcggccgcgcgcagaacccgtggaaggagtgtaatacccgccgcatggaggaagaccatgtgcggctggcccgtcgcagcagcggcggcggcgcggtgttccacgacctcggcaatacctgctttacctttatggcaggcaaaccggagtacgacaaaaccgtctccaccgctattgtgctggcggcgcttaattcactcggcgtaaccgccgaagcctccgggcgcaacgatctggtggtcaaaaccgacagcggcgaccgcaaagtctccggctccgcctatcgtgaaaccatggaccgcggttttcatcacggcaccctgctgctcaacgccgatttaagccgtctcgccaactacctcaacccggaccagaaaaagctgcaggctaaaggcattacctcggtgcgcggacgggtggcgaacctggttgagctgctgccgggcattacccatcagcaagtttgcgaggcgatccaggaagcattcttcagccattacggcgaacgggtggacgccgaggtgatctccccggacaacacgccagatctaccaaattttgctgagaccttcgcccgtcagagcagctgggagtggaacttcggccaggcgccggccttctctcatcttctggacgagcgctttcgctggggcggcgttgagctgcattttgacgtcgaaaaaggccatatcacccgcgcgcaggcctttaccgatagcctgaacccggcgccgctggaggccctggcggcacgcttagtcggctgtcagtatcgggcagaagtattacagcagcagtgcgaggcgctggtcggcgatttcccggagcaggaagcggaactgaaagaactgtcggcgtggattgccggcgcagtgcgctgataaaaaaagcccgctgcgcttagcgggcctggaaaaccgtaggccgggtcagacgaagccgccacccggcacaacagctcttactctttatcgcccagcagcacggattccagcgcgattttgatcatgtcgttgaaggtcgtctgacgttcagcggcagtggtctgctcgtgggtacggatgtggtcggagacggtgcagatggtcagcgctttcgcgccgaactccgccgccacgccgtagatacccgccgcttccatttccacgcccagaatgccgtatttttccatcacgtcgaacatggacgggtccggcgtatagaacaggtctgcggagaagatgttgccgacgcgcgcgtcaacgcccagcgctttcgccgcgtctaccgcattacgcaccatgccgaaatcggcaatcgccgcaaaatcatggtctttgaaacgcagacggttcactttagagtcggtgcacgcgcccatgccgatcaccacgtcacgcagtttgacatcttcacgcaccgcgccgcaggagcccacgcggatgattttcttcacgccgaaatcggtgatcagctctttggtgtagatagagcaggacgggatacccatcccgtggcccatcacggagattttgcggcctttataggtaccggtgaagcccagcatgccgcgcacgttgttcacttcacgcacgtcttcgaggaaggtttctgcaatgtgcttcgcgcgcagcgggtcgcccggcatcaaaacgacgtcagcgaaatcgcccatttctgcgttaatgtgaggagttgccatcttcagttccttttacattgttgtttttgccgggtggcggctacgccttacccggcctacaaatcgtaggcccggatcgctgtgcgccaccgggcaatgacctcagaacatggctttgccatattccatgtcagacgtaccaaagtatttcgcaatagtctggccgatgtccgcgaaggtttcacggtgaccgagcgaacccggtttcactttcgggccgtacaccagcaccgggatatgctcgcgggtgtggtcggtaccggtccaggtcgggtcgcagccgtggtcggcggtgaggatcaggatgtcgtcctcaccaaccagctccatcagctccggcagacggcggtcgaacagctccagacccgccgcgtagccagcgacgtcacgacggtggccccaggaggagtcaaaatcgacgaagttagtgaagacgatagtctcgtcgcccgcttccttcatctctttgatggtcgcgtcgaacagcgcgtccagcccggtggctttcactttcttagtgataccgcagttggcgtagatatcggcgattttacccacggacaccacgtggccgtttttctcatcgaccagcttctgcagcacggtcggcgccggcggctctaccgccaggtcgtgacggttaccggtacgctggaagttaccggctttgtcgcccacgaaaggacgagcaatcacgcgaccaatgttatagccgccttcggtcagctcttcacgcgcgatttcgcacagctcatacagcttgtcgaggccaaaggtctcttcgtggcaggcgatctggaacaccgagtcagcggaggtatagaagatcggtttcccggttttcatatgctcttcgccgagctgatcgaggatcaccgtcccggaggagtggcagttgccgagatagcccggcaggttggcgcgtttcaccagcttatccagcagctcctgcgggaagctgttttcctggtcgctgaagtagccccagtcaaacagcaccggcacgccggcgatttcccagtggccggacggggtatctttaccggaagaaagttcatgcgcccaggcataggcgccaatcacttcggcattgccatccatacccgcggcaattttaccggtggagccttcatgcgctttcaccagacccagacgggtcaggttcggtaaattcagcgggcctttgcggccgtggtcagcctcgcctttggcgcaggcttctgcaatgtggcccagcgtatcggcgccgacgtcgccaaagcggtctgcgtcttccgttgcgccaatcccaaaggagtccagcaccatgataaatgcacgtttcatcttgttctccatacatcttgcgctgcaaaaaagcgatcagatcagtatatcgctattcagtgatacggcgatagactgtcggcgtaatttccggggctttatcgtccagtttaatggccgctttgaccgctttcgcggcctcctgccagctgttctcgtctttggcatggatcaccgccagcggacgctgtccgtcgacgcggtcacccagacgcgccatctcggtaaagccaacgctatagtcaatggtgtccgatgcctgacggcggccgccgcccatagaaaccactgccatgcccagcgcgcgagtatccatcgcgctgataaaaccttcggtatcagcatagactgctttgctcagcatcgccgtcggcagataattagcataattctcgacaaagtcgctcggccctttctgcgccgcgaccatgcggccaaacacttccgccgctttaccgttatccagcaccgcctgcagcttcgcgcgcgcctcggcatcgtccgccgccagcttgccggagatcagcatttccacacacagcgccattgtcacgtcgaacaggcgcgggttgcggtattcgccggtcaggaactgcaccgcttcgcgaacttcaacggcgttgccggcgctggaggccagtacctgattcatatcggtcagcagcgcggtggtgcgcacgccggcgccgttggcgacacccacgatcgcttcggccagcgcggcagagagttcataagtcggcataaacgcgccgctgccgactttgacgtccatcaccagcgcatccagcccttccgccagcttcttcgccagaatcgaggcggtaatcagcgggatggagtccaccgtcgcggtaatatcgcgggtggcatagaaacgtttgtcggccggggcaagggagctggtctgcccgataattgccacgccaacatcttttataatctcgcggaagcggttgtcgtccgggaagatatcgaagcccgggatcgcttccagtttgtccagcgtaccgccggtatggccgaggccgcggccggagatcatcggtacgtaaccaccgcaggcggccaccatcggccccagcatcagcgaagtgacatccccgacgccgccggtagagtgtttatcgacgatcggaccgttaaggttgaggcttttccagtccagaacggtaccggaatcccgcatcgccatggtcagcgaaacgcgctccggcatagacatatcgtggaagaagatggtcatcgccagcgcggcgatctgcccttcagagatagtattgtcgcggatgccgttgatgaaaaagcggatctcttcatcgcttaatgcctgaccatcacgttttttacgaataatttcttgtgcgagaaacacggtaacctcccaaagagaataaattgccggatgacggcgcgagcgccttatccggcctacaggcatcaattcgtaggccggataagcgcagcgccatccggcaaatcaagggattagtagctgctggcgctcttgccgtcgccgtgacccagggctttcaacaggctagccagcaggctggatgcgccaaaacgatagtgacgagaatcggcccagtcggcgccgaacagttcatcagcgatcgccaggaactgctgcgcgtcttccgcgctgcgcacgccgcccgccggtttgaagccaacggttttctcaacgcccatatcgcggatcacttccatcatgatgcgcgcgctttccggcgtggcattcaccggcactttaccggtcgaggttttgatgaaatcggccccggctttgatagagatttcagacgctttacggatcagcgcttcttctttcagctcaccggtttcgatgatcactttcagcagcacgttagccgccgcacaggcatccttacaggctttcaccagctcgaaaccgacctgctcgttgccggcgatcagcgcgcggtacgggaagaccacgtccacttcatctgctccataagcgatcgccgcgcgggtttccgccagcgcaatgtcgatatcgtcattcccgtgcgggaagttggtgaccgtggcgatgcgaatatccggcgtcccctgctcattcagcgtcttacgggcgatcgggatgaagcgcgggtagatgcagaccgccgcggtgttacccaccggcgttttcgcctgatgacacagggcaatgactttctcattggtgtcgtcgtcattcagggtggtcaggtccatcagttttaacgcgcgcaggctgcttgcttttaaatcagtcatttcatactccgccggcgtcatgccggatcaatagtttgttcaccttgcgagtctgttactattgtaacattcgctcgtcgttacacttcgacattcatcacagttaatgaaaactacttactaatttgcattactgtaacgtgattaagatcacaaattaccactcaataccgcagcaattatcgttagtcccctcttaagcataatcgatactataccgccgatgagaatgtgataattctaacacacaataacagatgtactcgatagcgtggcgcacattttgcccaatttacgggaaataaaaacgctacaaattgaaatataaatcttttttcaaaaaagagagtggtgatggaattatcacatttacagcaacaccagcggcacggtggccgctggttcaggagacaggcttacagggcgagaaaaaccccggcgatggtggcgctcatcaggttggacagcgtccccgccgctaccgcacgtagcccaagctgagcgatatcctgccgccggttgggcgccattcccccgagtccgccaatcagaatggcgatcgatgacaggttggcaaagccgcacagcgcgaaagagataatggctttggtgtgatctgaaatgacctgcagcccggccgccgccacttcggcatccgcctttaaatattcgccaaagttcatgtaggccacgaactcgttaatgatcagcttctggccgataaacgaccccgccaccgtcgcttcgtgccacggcacgccaatcacccacgccagcggtgagaagatccagccgaggatcatctgcagcgacagctcaggatggttaaaccagccgccgacgccggagagtatgccgttcagcagggcgatcagcgcaataaacgccagcagcatcgcgccgacgttgagcgccagttgcataccagacgcggcgccggaggcggcagcatccagcacgttggccggtttatccgcgtcagcgctttggctgtcatgagccgggttatcgtccggtttgtccgtttccggtacgataattttggcaaacagcagacctcccggcgccgccataaacgacgcggcaataaggtactccagcggaacgcccatctgcgcatagcccgccagtaccgagcccgccaccgaggccaggccgccgcacatgaccgcaaacagctccgagcgagtcatggtggcgatataaggacgcaccaccagcggcgcttcggtctggccaacaaagatgttcgccgtggccgacagcgattcggtacgtgaggtcttcagcactgcccgcagcgcgccgccgagaatgcgaatgaccagctgcataatgcccaggtagtaaagcacggcaatcagcgacgagaagaagacgatcaccggcagcacgcgcagggcaaagacgaagccgccgccgccaaacacctcgaacattttatcggagaccagcccgccgaagatgaaactaatcccttcattgccgtaggcaataacgctggcgacgccattcgacatcgctaatagcgccgcgcgcccggccggtacatacaatattaacgcgccgatacccacctggattatccaggcgccgagcacggtgcgcaggttaatggcttttcggttattggagagcagcacagcaatggccaatagcgccaccatgccgataagtcccatgaggatttgcatacagattccctgtgtttttgatagtccagtactaaccgcgtgattatatcggcctgaaactatcctgcccgtctggcttcacacattttaagcaaatcaatgatatggatggacaattatgagaaatcgatcaccatacagagaccgggggaagggaaaacaaggcgagcgtattgtgcatgatcccttcttctatggctgccggcgactccgaacgcagttcacacagcgcctcaaatacccgtgcagcttgttccggtcgattgggctgtccctgaaagccatttagcggcatatccggcgcatcggtctccagcagcagagcggaaagcggcagacgcgccatcacttcacgggttttactggcgcggggataggtaatggtgccgccaacgccgatcttatagccaagctgaacgaagcgctcggcctgctgcaggctgccggcaaagccatggatgactccggtacgcggcagggcatgttttttcagcagcatcgccagcttatcgtgggtgcgtctggagtggaggatcaccggcagatcgtaacgcttcgccagcctcagctgcgcttccagcagcgcctgctgacgatcaaactgcggatcgtcgcgataaagatcgaggccaatctctcccaccgccaccagtttaggcggccgctgcgccatcaaggcttccagctgcgccagtccctcatcagtatgctcttcgatgacgatcggatgcatacccagcgcggcgtacagcgcttcgtgctgagctgccagcgccagcacgcggctaaaacgctcagcagagatggctggaacgataattcgcccgacgccggcctgcgccgcacgcgccaggctggcgacctcatctgccgcaaaggggggaaaatcaaagtgacagtgggtatcgataaaacggtgcgtcacgccagatcctcatgatcaaaactggggtcattcgcctggggcgcaggaatgatggtcgcctggggcgcttcattggccaccggcaccggcggcaccaccaccggcgcgggccgggcaatacgcggcgcgtggcgcagcagcggcggctggtcggccagtagtttacccaccgttgccaggaaataacggccgcactggcgcccggttttgtagtcctccagcagcgccggtagtcggctgccaagcgccatgctgcgcagcggccgctgcggatagatttcgaagatccgcaacttacccggcggtttctcgatgaactgctggatggcgcggtaggtggtttcgtgatgatgcaccaaattgaccagcggttgcagactactctctcccagccagcgctccatccgcttgaaccactgcggggtataaaacatctgcgaagggacggtacggatcaccacgatggtctgggcgccgcggcgggccgcctcctgcaccgggatagcatcgctgacgccgccgtccaggtagctaacgccgtcgagcaacacgccgctgcgataaaagccggggatggcgctggaggcgcggatcagatccagccacgtttgcggcgtcggcgaaaaatagctggcggagtaatcgtcaccgcggcaagcgcatagccacagctctttccccaacgcgaactgcgcttcggcatagttcatggcaagcggcatttgctgcgaagtggcctcaaccagccagtcgagatcgataaggttgccgccgcgcacaaagcgcatcggatcgaaaaactggcgtgaagtggtgtagcgggtgataactttgcgggcatagccttgctgattacacatgtaggcggagaggttttgcgcgccggctgaagtacccagcatcaggtcaaaggggttaaatccggcgcgcataaattcgtccagcaccccggcagtaaaaatccctcgctgtcctccgccttcgcataccagcgccagcttgcctggtcggaagggtttaaccgccagcggggcgatattgcccagcgtgacgggaatgcgttgccccaccctgctttcctgttcgattgatcttctcctgacaaggtaacgcaatttgcccgccgcttaaaccgcgaaagccagtcctcaggactggctttgtgtaagatgacgtgtcagtaaaaatgcttaggcttcagtatcgcccgcatcgcgggccgcctaaggacgtctgcgtcctgtaaacaggctcaccaggaacaggataatcccgacgacaaagacgattttcgcagcgccagcggccgtacccgccagaccaccaaagcccagagccgcagcaattaatgcaatgaccagaaaaataattccccatcgaaacatacttttctccttaccataatggacggtgaacagcggtttgcgcaccctttctgtatagctcatcgctcagtggatgctgctattcgttcggcaaccttggccagacaacacttttgttaataactcggtttacttaacgctaagatcgttgcgcacgcttttcacaccggagaccgctttcgcaatctctgcggcacgctccgcctgcgccgcggaagccaccgtaccggtcagatgtaccgcgccggcgttggtttcgactttcacattgcgcgaagggacaatgtcatccgccagcagcttggctttcacttcgctggtaatggcggtatccccggcatagcctttcagcgtcgccgtctcgctcgatgatttatgatggaccgtcagcttgtcgttaacgtgtgagacgcctttgacctctttcgctacgctcagtgcctgacttttctgttcagcactggtgacgtcgccgctgagggtgaccactttattctccgttttcaccgaaatatcgccggagttaatatctttatgatcgatcagcgccgcttttacccgtgcggtaatggtactgtcgtccataaaatcgccgactttgttaatcgaattatctaccgcctctcccgcattgctggcagccgacttcgcactgtctaccgttgttttttccgtctctgccgaggcgttcaacgcggctaagcctaagaagagcgccagcaacatattggcattctttagtctggtcatcgttatgtcctcgttttttcaccagcgctggcgtcttatcgcagtgaattacgccagcatttttaaaaacacgaattaaatatagtagacagacgaaggggttgcggaggatatggataaaaaacagacgaattagcggtgttttaagaactttccagaaggaagggaacgggggcgtaaccagaaaaaagcgcggcctgagccgcgcttcgtcagggattagtgctcgcgcgttttgcggaacaccacgtcagggtaacgctcctgcgtcaggttcaggttgaccattgtcggggcgatgtaggtcaggttatcgccgccatccagcgccagctgaacttcatttttccgcttgaactcttcgaacttcttcacgtcagtagattcaacccagcgcgcggtggccacgttgaccgattcgtaaatcgcttccacgttgtattcgcttttcagacgcgctaccaccacgtcaaactgcagcacgccgacggcgccaacgatcagatcgttattagcgatcgggcggaagacctggaccgcgccctcttcagagagctgaaccagccctttcagcagctgtttctgcttcagcggatccttcaggcgaatacgacggaacagttccggcgcgaagttcggaataccggtgaacttcatcatctcgccctgggtaaaggtatcgccaatctgaatggtgccgtggttatgcaggccgatgatatcgcctgggtacgcttcttcaacgtgcgagcgatcgcccgccataaaggtcagcgcgtcggaaatcactacgtccttgccgatacgcacctgacgcagcttcatgcctttttcatatttgccggacaccacccgcatgaaagccacgcggtcgcggtgtttcggatccatgttggcctgaattttaaacacgaagccggtgaatttctcttccgtggcggtgacttcacgcgtgtcggtgttgcgcggcatcggcgccggggcccactccaccaggccatccagcatatggtcaacgccgaagttacctaacgcggttccgaagaagaccggggtgatttccccggccaggaacagatctttgtcgaactcattcgacgccccctgcaccagctccagctcgtcacgcagctgctgcgccaggtcttcccccaccgccgcgtcgagatccgggttgttgagccccttcacgatacgcacttcctggatggtgtggcctttaccggtctgatacaggtaggtttcgtctttgtagagatgataaacgcctttgaacagcttgccgcagccgataggccaggtaatcggcgcgcagccgattttcagctcgttctcgacttcatccagcagctccatcggatcgcggatatcacggtcgagtttgttcataaaggtgaggatcggcgtatcgcgcagacgggtgacttccatcagcttacgggtccgatcttcgacgccttttgccgcgtcaatcaccatcaggcagcagtccaccgccgtcagggtacggtaggtatcttcggagaagtcttcgtgccccggggtatccagcaggttcaccaggcagtcatgatacgggaactgcattaccgaggtggtgatcgagataccacgctgcttttccatctccatccagtcggatttcgcgtgctggctggaaccacgaccttttactgtaccggcggtctgaatcgcctgtccgaacagcagcaccttttcggtgatggtggtcttaccggcatccgggtgagaaataatggcaaaagtgcggcgtttggccacctcttgcagataaggagacaacgtcataattaatcttctaagtaaacgcggccatgggccacgcatgtggaatacgaaaaattgcggctattttacccatcaacgggggggaggcaatcagtgtttacacaggagctgctccagttcgcttaacgaggtcaccgtccagtccggctcgagatccgccggcagctcgcgctgatgcgcattgagccagcaggtcgccagtccggcgttcacgccgccgcgaatatccgactcggcggtatcaccgaccatcagcacccgcgagcgcggtgggttacccgcctgcgccagcgcataatcgaaaatacgcgcgtccggcttggcgacacccacctgttcagaaataatcagcaaatcaaagtgatcgcgtaaacctgtccgctccagacgagtctgctgcagcgaggtaaagccgttggtgatgatgcccattctgaccttgccctgcagcgcgttgagcagcgagaccgcgcccggcaacggggcacagatttccgccatcgcattcataaacgcgtcgttgagttccccgggcggcacattcaaacgttccgcccagctgtcaaaacgctggtgctgcagctgcagcgaggtgatggcgccgttttggtaatccacccatagcggcttgttcacggcctgatagtcctgaaaatcttcggcggtaaaggtcacgctgtagtcgagaaacatccgctgcaagccactgaaagaatcaaacgtaaacagcgtttcatcggcatcaaagaaaatccagtcccatttcatcgtatcaccttgtgttacatactgattggcagagccataataatggcgtcttcgcgtccgtcggccgtaggatagtagttgcggcggatggttgcctcattgaaacctacgctctcatacagcgcgatggcggcaacgttggatgctcgcacctccagccacagcgtgacgacgccgagtttttcgacttcatcaatgacatgctccagcagcgctcgccccaggccgcggcgctggtacgcgggatcgacggcgatattgaacagcgtcgcctcatccagtaccacttgcgtaatggcgaaagctgccatttcgccatctaccgacagctgatagttgcaatagcgctccccctggttactggccagagtctgttcgctccacgggaaagcgtgggcgcgtttttcgatgtgccaggctttggttaaatcagccgtgctgagggtagaaatcgtgttcatgtgcgcagatttgttgccagagcgccctgcgagccggcgcgctggtctggagttcatcaaaagcgggggtggacatctgggcgcccgccagcggcagcgacgcctctgtgcccaaccgccagctgttgcagcggctgtcctgcggcagcatcgccacccgctccggagtcagctgcaggacctgatctggcgtcacggccagcgcgcgtaatatgtcgccaatcagcggctctgtcagcgacggcggggtttccgccaccatcaccagacgaatatgttcaggaagcgagatagcgatttcgccctgcaacgcccccggtcggcgcagcgaccactgggtaatgcccagctgctgtaattgccagtctcgtcgggatgtcatagcgaaacactcctgttaaacaagcgcgcaatatagcaaatccgtcgtatctgcgccaacaaactactataatcggcgccagtcttaatgaaggagtgtttcatgtccgcttttaccccggcaagtgaagtcttgctgcgccacagtgatgatttcgagtccgcccgcgttctgtttgccggtgacctgcaggatgacctgcctgcgcgtctggataccgcggccagccgcgcccacacccaacagttccaccactggcaggtcctcaaccgccagatgggtgacaccgtccgttttagcttagtggctgaggccgctgacgtcgccgaatgcgacaccctgatctactactggccaaagaacaaaccagaggcgcagttccagctgatgaacctgctctctctgctgccggtgggaagcgacattttcgtcgtcggtgaaaaccgcagcggcgtccgcagcgcggagcagatgctggctgaatacgcgccattaaacaaagtggatagcgcccgccgctgtggcctctatcatggccgtctggaaaagcagccgaccttcgacgccgacgcattctggggcgaatacacactggataatctgacgataaaaaccctgccgggcgtcttcagccgcgacggtctggacgtcggcagccagctgctgctctccaccctcgagccgcataccaaagggaaagtgctcgacgtcggctgcggcgcgggcgtgctggccgccgcgctggccagccattcgccgaaagtgcgcctcaccctgtgcgacgtcagcgccccggcggttgaagccagccgcgcgacgcttgccgccaacggcctggctggcgatgtgtttgccagcaacgtcttctccgaggtcaatggtcgcttcgacatgatcatctccaacccgccattccatgacggcctgcagaccagtctcgaagccgcccaggcgctgatccgcggcgcggttcgccatctgaacagcggcggcgagctgcgcattgtcgccaacgccttcctgccgtatccgcaggtgctggatgagacgttcggcttccatgaggtgatcgctcagaccgggcgctttaaggtctatcgcaccattatgacccgtcaggcgaaaaaataatcgtcttttcacgccggcggcccgctcctggtaccgctggcgcttcccgcgggcaaatccgcccatttttgcagcaatcgatacaacctgcataattaactattgacgtgtcgccgaaaaccactagaatgcgcctccgtggtaacgatactttcagagtatcgatggtatgcgaaggtggcggaattggtagacgcgctagcttcaggtgttagtgtccttacggacgtgggggttcaagtcccccccctcgcaccataatccacgaagatattgctcgcactgggcgaaggtggcggaattggtagacgcgctagcttcaggtgttagtgtccttacggacgtgggggttcaagtcccccccctcgcaccaacgaggcaatatcccaaagaaagaatactgtgcgaaggtggcggaattggtagacgcgctagcttcaggtgttagtgtccttacggacgtgggggttcaagtcccccccctcgcaccaatattcttccctctcccggcattatcctctcagtttaatatccacaatcatcagcattattccgccaatcaatgcgacgcacgatggcagcaggataaaatggcgcaattgacgatgccagatcatcgccgcggacatcagcatgcccaccgcgaccagtacccgccatacgtcagccgacactccggcatacccgagagcgacaattagcgcgccgggaatcatcactccccagccgcttcctaatgctcgctgcagcatggtttcacctctcacaacgataatgataaccaatatcatatgataatctttatcatttgtcatttgcgacgtgctctgcccctttttctttacgttcgcggtaatgacatacattcatgaaggtgataaattaagcggattatcgatatatattaaatattttgcttattttgcaaataacctttttttgcacattgttatcagactcttcatttttggctttcatcattttgaaatttaacgactaataatgattcttccgatatgactgcacaaacctggcgagcacactacgcacaaaaatatcaatattccttacggctttttttactgcttaatttcatttcttcctcgctgtcgctggtcacccccctatttacggtagttcgttttacgctgccctgcgccctgatcgtcgtctgcagcgggctgctgctgctctggcactggaaatggccgcaatcgaaaataaatattcccactatctcgttgttatttggcatgctatgggcatggcacgtagtgacaaaagcgatgctattgacaccgccgcattttaactatctggtgatcgccctattaagcattctgtttatcggcaccatcgctttttccaataatatcactgcctttaccctccactctttaccaactttccttgcctgcctgataatggcggagggggaacaatggttgcgtatgacttactgctttatgctgcctatagccggtattaccctgcaaaatattatccagaagcgcagcgatgcctttacgcagggtttaatggataaactgatgcatgaacgcaatacgctcaacgatctcagtatgctcgatcccctgaccggtttgtataatcgccgcggactgcagaaccgcctcgataccctgctggcgctggacggcgacaaccactacgtgctgctcctcgatatcgatcacttcaaggcctataacgatcactatggtcatatgatgggtgaccaggcgcttattcgcgtctctgctgccattcgcaacgctgtacgctcacgcgatattgtcgcccgctttggtggagaggagtttatggtgctgctgaccaatagcagcgaagaaacggcctggaagacagccgagcgtatacgtcagcgggtctatgacctgaagatcccgcatatgtttaatgaaagcgtcgccaccaacgtcaccatcagtattggcctgacgccgctcattaatgacaacattgaacaagcgctggcgcgcgccgacggcgcactctatgaggccaaaaataaaggccgcaacattattcttgccagttgacctgcgcgcgctgcgacatcgcggcgccgataaaagccttgccatgccgcctgcaagcaactaatatcagtaatcattatcatttagatttgtatctggaaatcgaatggcctggcgttcccttcctctcagcgatgaacttatctggcgggctcctttgccgacggctgagcatgccctggcggagagtattcgggaaaaaatcgccaccctgcgcccacacctgcttgatttcctgcgacttgacgaacccgccccacggcacgcgttaacgcttgccgaatggtcgcaacccatcgccttgcgctccctgctggccacctggtccgatcatatctatcgtcatcagccgacgctgcctcgggaacagaagcctctgctctcgctctgggcacaatggtatatcggcctgctggtgccgccgctgatgctggcgctgctcaatgaaccgcaaggcctcagcctggcgccagaacatttccatgtcgagtttcatgaaagcggccgggcggcctgcttctggattgatgtgcatagcgatgccgacatcgagaggctttcaccgcaggcgcgaatggatgccctggtaacgcgcaccctgcagccggttgttgaggcgctggcagcgacgggcgaaatcaatagcaaacttatctggagcaataccggctatctgattaactggtatcttggggaaatgcgcgcgctgctgggtgatgagcggcttgccgcgctacgtcagcactgtttttttgaaaaacaactcgccgatggccaggataacccgctgtggcgaacggtgatgctgcgtgaagggcagttagtccgacgcacctgctgtcagcgctatcgcctgccggatgtccaacagtgcggcgactgtacgcttaaataattaccacttacctgaaaagtaacgggcggcctttaccgcccgttgctatttatgcggtctgttgactctcctgctccgcccgctcggcctcttccgcttcctgagcaagcagttgtttctcatataccttaaagaatgggaagtagatgattgccgacacgcaggccagaacaatgaccagaatcgccgcccggaaatcccagcccaacgcccaggcgccgccaattggcgctggcgccgtccatggtacgacggagatgacgcggccaatcagatccagcttcattgccgcccaggccagcaccgcgttcaccatcggcgccagcaggaacggaataaagaacactgggttcatgacgataggcgtcccgaagatcaccggctcgttgatattgaacaggcttggcaccacgctcaaacgaccaatggagcgcaaatgcgctgaacggctgcgcagataacagaacaccagtcccatggtcgccccggaacctccgaccacgataaagaaggtccagaacgcctccataaagatatgcggcagaggcgcgccctgggccagcgcctgctggttcataccgaggttagtcagccagaacatctgcagcatcccggacacgatcgccgcaccgtggatcccggcaaaccacagcaggtggccgatcagcaccgccaacagaattgccggcagagagtcggctgccgaaaccagcggcttgaaaatggccataatggcctgcgggatcagcatgtcaaaatggtgctggataaacaggctcagcggatagagcgtcagcacgaccaccagcaccgggatcaacagatcaaacgagtttttgatcatcggcggaacctggtccggcaagcggatcccaatgttgtgcgctttcaagaaacgcatcatctccacgcagtagatcgccaccaggatggcggtaaagatcccggtccccccgaggctatccaccggcagcgtgccattggtcttcggcgcggcaatcagcaaaaaggccatgatcgacagcattgcgcacataaagggatcgagctgattggatttctcgtaatgcttaccgaggttataggagattgccgcgcagatgtagatcgacatgatccccatcgtcatatcaaagggggtcagaatacgcccctcaaactctttcgccagatccagccaggcgcgggcaaaaccccaggtggtatccggtgagaacggtggataagcaaacactaacaggaacgatccgacgatcataaacggcatcgctgagataaatccgtcacggatagccatgacgtggcgctgcgacgagatccgccctgctatggggcttatgtaattttctacaaagcgaaatatcaaattaaacgcagcatggttagcagacatagtagccctcctgacaggctattgatactggcccaacaacgattaccctgccgttacgatgaccgctttttgacgcagcaggccgctggcggatgtgcaaccggctatactgctcatgaggcaacgattcatacacggctcttttgttataaataaaaggagaagtgactgttccagtattcatctcaatgcagataaccgcaaccggttacagtaaccggttacggcgattgtgaaggagatcgacaaaatagaaagaatctggattgtccgcgctgatatttacactccgccaggcttgtgacagatttaaccaggcttaaatcaggagaatccaatgagtctgcagtctgtacggcagttttttgccgaacacgcccccgatatcgaaattattgagttaaatcagagtaccgccaccgtcgcacttgccgctgccgcacacaacgttgagccggggcaaattgccaaaacgctgtcgctcaagatcaaagataagattgtactgatcgtcgccaggggcgatgcgcggctggataataaaaagctgaaagagacctttggcgcgaaagcacgcatgctaagcagcgatgaagtggttacctggaccggtcatccggtcggcggcgtttgcccgtttggcctggaaaatccgctggcagtctactgcgacgtctctctcagacattatcaggaagtactacccgcagcgggagccatccatagcgcggttcgcattgaaccagaacgcatggcgcagctcaccgatgcaacatgggtagatgtgtgtttatagccgcattacgctacctgtttaacggcgctggtcgtactattgagcggtaaatgcaacaggatatccgccgcgtttaataaaccaatgtctgagcgaactccgagcttggtcatggcgttaaacttatgcgcgcggatcgttttaatattccggttgagctgtatcgcaatatcagaaagcgaatatccccacgacatataccgaaggatggcgtgctccgtcgggcttagcggatcgttgcacgcctctctgtcgcaaaattgttcgctgccgctgagatgatgattgtccagtagctgcagcaaacgctcctgtagcccgcgtcgcggcgcggatttattcagtatgccgtgcaaacaggccggcataagatggccgatcaggtgcatttcactttcattattagccagaataatcgtttggacttccggccggcaccgcgccatttcatgaacaaagagcagactctcggctcgtgaagaacgacttcccgaaagagaaaaaataatggttgaccagggaaacggtatttccgccgccctgagcatactgacatttttaaacagatgaatatgataacggcgattatcttcacgactaaagatatagcgccatgccatttccgtcatcacgcatttttctacgatggcgacatggcgggttgtactatttttttccattccatttgctccccgtaagctgaattgatattcagctcttgcattccctgcgcgctgttgatccaggcatacatttcagcgttgctgcgtagcgataagcgacgcattgcgctgtttttctgcgcgctgatcgtcttattactctttttcaacagcgcggcgatctggtttattccccaccccttcgccagaaggcgcagaactttacgctctgaaagagtgagcatcgccgcagagtggtagcttgcgaaatcgctgtcctcatccccggcaaacagcgtacggctaatctgttcagccgcacggctaccggcgcaaatcacctcaatcagccggttaaccggctcgctctcggagatcaacgagctttcaggacgaattaatagctcaacggccaacggatagaggctgtcgctgaccataaaaacccagtgaatatcacggtactgggtcatgagggagtaataacgctcgcagacggctcgggggtgcgcaatctcgccggagatatccgcgacaaccagcaccgcccgccgcagttgtaaaagggtgagctcatcatgagaacgacaaaaactcagttcgtaatcagggaggttctcattgaagatcacctttaaccctgattgcatgacgggaattttactaataacgacgccaaacttaccttgtcctggtaacataacacctccgcttcctgtcgaagttccttcgcttgcctgcaaacgatcggcgagcgactttatcgccatatcatttcctggatgaatattaaaatcatattcatggcctgcgcacacgatatacgtaacgaccgaaccgtggtcataccgtgtaaaatattattgccgtgtatacttgcgattaatattaacacagacattcctgcgctaataaattagaaaagataaaaacattatttagcaaaaataatttcagtactgaacattatgaagcattatctttaattgtttctctaaatgctttgggtgacataccgctatagcgacggaaaaaacgcgaaaaataggctgcatcgctaaaccccaaataatcagagagttgtgtaatcgtcatgcgggtgtactgcagattgcgtcgcgcttcaagcatcaaccgctgatgcaatactccaagagcgctacagccataaaactcacgacataaataatttaagtgcgtaaccgacagtccaatcagcttcgcatactccgccaacgggagatgctgtcggtagtggctctcgataaggcgggcgaagtgacgcatcatgctgcgcttccgctccgctttatcttccgcgggggacgcgggatggcactgtcggttcagccagaccaacagcgtccccagcagcgaatagagcatcatttctcgcgcatcgtgctcttcgcagtactcctcgcgaagcgctgaaaacagcgtatgcatgcgcccgcgagaacggcccaccggcacacactgcggcacgctaagcacatccagagggcgaccgaactgattttcaaaccggctcagcagcggcagcgccagagagagcacaaacccttgcgtcccgggtgaaaaattaaacccgtgaatacagagggcgggaaccacctggatgcaggactccgtcatcaccgcggtggcgccttcaatttcgatctccgcccgcccctgatgcagatagagaagctggaccatttccgcatgctgatggacgcgaatatgccactgatacaggctgctgcgctgtaaaatcgactcacagtgcagcaggtccggcgtcggccagccgcactcttcgccatacagcttaaatacgggcacggtttgaacgaacggcatgatgactcctcttaattcaggcgacacgctccatgggcaagcccacgtagttttccgcgatggtggtcagcccggcgcgcgagcccagatagtagcggcggtcggcggcctgcattttagcgtcgaacgcgttctgatccggaaaatcatgcagcaggcgggtcataaaccagctaaagcgttcccctttccagacccgatccagcgccagttgcgagtaggccgccagcagatcgctgcggccacgatggtagtattcgcgcagaatccgccacagatagttcacgtccgatgccgccagatttaatcctttcgccccggttggcggaacgatatgcgccgcatcccctaccaggaacaaccgcccatattgcattggctccacgacgaagctacgcaggggggcaatgctcttctcaagtgagtgaccagtcactaacctggatgccagctcctccggcaagcggcttttcagctcctgccagaagcgctcgtccgaccatgcttcaaccttatcgctcagcggaacctgcagataatagcggctgcgggtcagtgagcgttgactgcacaatacaaacccccgctgatggtgcgcataaataagctccggattgaccggcggcgtatccgccagcaggcctagccagccaaacggccacacgctctcgtaggtctgcaaaatgccagctggaatactttgccgcgatacgccgtggaaaccgtcgcaaccggcaataaaatcgcactccagacggcaggtttccccttcgctgaggtaggtgatcgtcggccggtcgcttttcgcgtcatggatagccacctcgctcacgccatagacgatcggcgcgccgctggcggcccgggcagccatcagatcgcgggtgacttcggtctggccataaaccattacgctcttaccgtcggttagctcgctcagtgcgacgggcacccgctggccgtcaaatagaaactccaccccatgatgcaccaggccttcggcatccatccgctgcgccacgcccgcttcgcgcagcagatcaacggtaccgctttccagaattcccgcgcggatgcgccccagcacatactgcggcgtttgacgctcaaggatcacggtatggatcccggcgttgtgcagcaactgccccagcagcagcccggaggggcccgcgccaataatcgcgacctgtgtcttcatagggatgtctcactcttgcagggttaattatttgtataatttttgtttaataaaagtgcttttctgcatttttgataagtcagtggggaaaaagaagggatgaatggcgacaaaaattgcacttttcaccaaactggcaaaagtgtgggatgcttcaaattctgccgccccgcagaccgggaatttttgcacattatttgatcccacccccctcagccgccactgcgcttcaggttaaagtatcggcagataccaggcgtcgtggacaatagaggaagtatgcaggttgatcggacacagcagcgggcaatcacacgtttatgcatccagtgtggtctttttctgttacagcacggcgccgagagtgcgctggtggaggaactgtcaacacgtctcgggctggcgttggggatggacagcgttgaaagcgccatctcttcgaatgccatcgtcctgaccaccattaaaaatggcgaatgtcttacctctacgcgcaaaaatgtcgatcgcggcattaatatgcatgtggtgacggaagtgcagcacattgtgatcctcgccgagcataagctgctggactatcgcgacgtcgagaagcgttttgcgcagatcgttcccctgcgctatccgcgctggctgctggtgctgatggtgggtctttcctgcgcctgtttctgcaaactgaataacggcggttgggatggggcgctggtcagcttctgcgccagcacggtagccatgtacattcgccaggtgctgacccatcgctccatgcatccgcagatcaacttctgcatcaccgcctttgtcgccaccaccatctccgggctgctgctgcgcctcccggcgtttgccagcacgccgaccattgccatggccgccagcgtcctgctgctggtcccgggttttccattaatcaatgccgtcgccgatatgtttaaagggcatatcaataccggactcgcccgctgggcgatcgccagcctgctaaccctcgccacctgcattggcgtggtgatggccatgaccgtatgggggctgcgcggatgggcataatctcatttatttttgcgctggcggaagacatgctgctggcggcgatccccgccgtcgggtttgcgatggtctttaatgtccctcagcgcgctctgcgctggtgcgcgctgctgggggcgattggccatggctcgcgtatgatcatgatgagcgccggttttaacattgaatgggccacctttctcgccgctctgctggtgggcagcattggcattcaatggtcgcgctggtatctggcgcatccgaagatttttaccgtcgccgccgtgatcccgatgtttcctggcatctcagcctacacggcgatgatttccgcggtaaaaatcagtcattttggttattcagaagagatgatgattttgctgctgagcaattttttaaaggcctcttcgattgtgggcgccctttcgattggcctgtcgatacccggcctgtggctgtatcgtaagcgtcctcgcgtctaaccccgacgtcgcggttaatccgcgacgctccttccgcgatagcctctgtgctactatgtgcagatcaccccactctttgcagttcagagttgagatagagttatgtcttcgcgaattttaacctcccattttagcggcctggaagagttcctccagcagcacgcggcgctgctggcaaaatcgactgacggcaccgttgccgtttttgccaataccgcgccggcattctatgcgctgacgccagcgcggctggcgcaactgctggagctggaagccaggctggcgcgccccggcagcgacatcgcgcttgacccgcagtttttcgaggagcccgccgcggcgccggttgcggtgccgatgggcaaatttgctatgtacgccgggtggcggcccgacgccgattttcagcgcctggccgcgctgtggggcattgccctgagccagccggttacccccgaagagctggccgctttcgtcgcttactggcaggcggaaggtaaagtctttcaccacgtgcagtggcagcagaagctggcgcgtagcgtgcaaatcagccgcgccagcaacggcggacagccgaagcgcgatgtgaacagcgttagcgaacccgacagccatattccgcgaggtttccgaggatgagcatgaaaaacgttggcgacctgatgaaacgcctgcagaaaatgatgccggcacatattgaaccggcgtttaaaaccggcgaagagctgctggcctggcaaaaagagcaaggccggctgcgttccgaagcgctggagcgagagaatcgcgcgatgaaaatgcagcgcaccttcaaccgctcggggatccgcccgctgcatcagaactgctcctttgataactatcgcgtcgagtgcgaggggcagatgaatgcgctcgcccgggcgcgccagtacgtggaagagttcgatggcaatatcgccagctttatcttctccggtaaaccgggcactggcaaaaaccacctggcggcagccatttgcaacgagctgctgctgcgcgggaagtcggtcttaatcatcaccgtggccgatattatgtcggcgatgaaagataccttcggcaaccgggaaacgagcgaagaacagttgcttaacgacctcagcatggtcgacctgctggtgatcgatgaaattggtatgcagacagagtctcgctatgaaaaggtcattatcaatcagatagttgaccggcgctcatcctccaaacgacctaccgggatgctcaccaacagcaatatggaagagatgaacaaactgctcggcgagcgggtgatggaccgtatgcggctcggcaacagcctgtgggttatcttcaattgggaaagttaccggcaccgcgttacaggcaaggagtattaagagatttccgggcgacgacggcgttatactaaagcgattattcagtcacgcttatgagtccgtctatgaaatcgtttaaaaatagcgttgttgccgcgcttgccgttagcgcgtttaccctctctggcgcccacgccgcctcctggcaggattcccttaacagcgctgccagccagctcagcggcagtaacgcccaggccagcggcggcatgtccgtctcctcgctaaccagcctgcttaacggcagcagccaatccctgaccgccagcagcatgaataatgcggccgggatcctgtcatattgcgcgaaacagaagctggcctccgtgaccagcgccgataacgtcaaaaatcaggtgctggataaactggggcttagcacgccggaaaaacaaaaacaggacaccagctatctggatggcctgcaggggctgctcaacagcaaaaacggccagcagttggacctgaatacgctcggcaatagctcgctggcgaaacaggtaaaaaccaaagcctgcgatctggtcttaaaacagggtgttaatttcctctcctgatcctgactgacaaggccgcatttgttgccttcgcggcggcgccgcggcctgaaacgcttttttttgcagttttcctgttccgttttcccattccacccgatgcgatgccgatcaaaaaaggcaacttctaaaccaattctgaataactgcacactttcatgacgctagaattgcagcaagatggcgctgcaattacagtggggcttgaaaagtaatctgttctgccagccgataactggcattaatgaggatgagctgtgtcagagttgttatccatcgccttatttttagcttcggtggtgctgtatgcctggaaagcgggtcgtaacacctggtggtttgccgccacgctcacggtgttaggcctgttcgtggtgctgaatatcaccctctacgccagtgactacttcaccggcgacggcatcaacgacgcggtactctacactctgaccaacagcctgaccggcgccgggatcggcaaatatatactgccgggggtcggcgtggccgtcgcactggtcgccgtctttggcgccctcggctgggtgctgcgccgccgtcggcatcatcctcatcacgtcggttacagcctggcggcgctactgctggcgctggcctccgttgatgccagcccggccttccatcagatcagcgagctggtgaaatcccagtcacgcgagggcgatccagactttgccgcgtactataaagagccgtcgaagcaaatcgacaatccgcagctgaacctggtctatatctatggcgaaagtctcgagcgcacctattttgataacgacgccttccccaacctcacccctgagcttggcagaattaaagctgaggccattgatttcagcaataccatgcagctgccggggaccgattacactatcgccggcatggtcgcctcacagtgcggcattccgctgttcgcgccgttcgaaggtaatgcctcagcctcagtctccagcttctttccacagaatatttgccttggcgatattctgaagaactccggttacgagaattactttgtgcagggggctaacctgcgctttgccggcaaagacgtgtttcttaaatcccacggcttcgatcacctgtacggggcggaagagctaaaaactacggtggcggatcctacctaccgcaacgactggggcttctatgacgacactgtgctcgacgagacctggaaaaaattcgaagagctgtcgcagtccgggaaacgcttctcgctcttcgccctgacggtggatacccaccatcccgacggttttatctcacgcacctgcgagcgtaaacgctatgatgtggacggcaagaaaaacctctctttcagcgccgttagctgcagtcaggaacatatcgccgcgctgatagagaagattaaagcctcaccctatttcaaaaacacggtcatcgtggtctcttccgatcacctggccatgaagaacagcgcctgggattatctcaacaagcacgatcgcagcaatctattcttcgtcctgcgcggcgataaaccgcagcaggagaccctggcggtgaaacgcaacaccatggataacggcgcgacggtgctggatattctcggcggcgataactatatcggcctcgggcgtagcagcctctccggccagtcgctctccggtattttcatgaatatgaaagagaaagtcctggcatggaagcctgacgtgatccgcctgtggaatttccccaaagaaatgaagaatttcaccatcgactcgcagaaaaatatgatcgctttctccggcagccatttccgtctgccgctgctgctgcgggtatctgaccagcgcgtagaaccgctgccagagagtgaatactctgcgccgctgcgcttccagctggccgatttcgcgccacgggataatttcgtgtgggtcgatcgctgctataaaatgggccagctgtggtcgcctgagctggcgctctccaccgactggtgcgtctcgcagggacagctggggggtgagcagaaggtccagcacgttgataagccgcagtggcaaggcaagaccgccttcagggacacccttatcgatatggagcgctataagggcaacgtcgatacgctgaaaattgtcgacaacgatattcgctataaggccgacagcttcgtgtttaacgtcgctggcgccccggaagaggttaaacagttcagcggtatttcgcgtcccgagtcgtgggggcggtggtccaatgctcagttgggcagcgacgtgaagattgaatataaagagccgttgccggagaaatttgatctggtgatcaccgccaaagcttatggcccaaacgccaataagccgattccggtgccagttggagaaagtgagcaagtgctcactctggataatgacgtgactaccacgacgctgcattttgacaacccaacgcgcagcaacacgctgatcatcaccccgccggacccgcaaaccactaacgagggcaatatcctcggccactccccgcgtcagttggggatcggcatggtggagatcaaagtggtgaaaagcgaaggctaacgcaatcctgcccggcggattttcgcgccgggcagcggttgtcgtggcaggacgttaaccacacagcggctgtagttcatcagccgacagtccggtgatcttctgtaccatctctttgtcgaggccattctgtaacatactgccggcaatgcgcagcgcctcgcgtcggctgccttcctgcaagccctccaggtgcccttcttcccggccttcttcccgaccttcctgcttaagcttttgcgcgatagacatcaatgtctcctcatactgtggcagacggcgggccagccggcggagaaacacgcccggctcggccgtattaccgtactgcagcatatagtgaaacagcattctcaactgccgacggttagtgtatcccagcatcacaacggccgccaacgactccgttatgccgctgagatcgcgctggcgaatatgtttttgcatcagctccagcaaggcgactcgccgatgttgcacgatgtcatcgtccggcatcaccgtcacgtcgatcaatggaaacggacagccatacagcgtcttcgccagctgcgggtcggcaaattcatccagccagttgagggaaaaaggatacggactggttgcaccgtgataaaaaagcatcggcaccaccagcggcagcgttttgtgcccggcatccaggtggcgctgcattgcggcaatcgcatagcgcatcaggcgaaaggccatatggctatccggtgagctctggtgctctatcaccacgtaaacataccccgtgccgcaggtggtctgcaccgaccagaggacatctgaataccaggcgcgcagatcctcatcgataaagctcgccgattgcagcctcagggtagagaaatcgcaccgctgaaggatcgcttcgggaaggtagagggtgaggaaatcagtcgctgtctccgggtgacgaagaaatcgcttaaagaccgcatcgtgcggcgtcgaggtcatccgttttttcatggccatccgcttgcctgaaagagaaggtaagccggactctatcaccggtttttacccggttgggtttgacgacaattttctgggaagcgcctcggagaatagcatggcggccagcccggctggccgccatcaacacggcttagtaatcaaactgccggtagtaacggcggatattgaggtcgtggccggtatggtgttcaaagtgggccgccagccggtccaccagcagggtggacaccacgcacggcgccataatccagcggaacgcgtcatcaatgccgttcagcggatagtcgcgcgggtcgataaccaccagatggtcagttattttttcggcaaaacgctcgacgcgttcgtccagcgcccggcatctcccctcgcctttcaccagaaacagcggaacctctttttccagcagctccagggtgccgtggaaaaattcagcggagctcaccgacttcgtccgcttccactgcatctcttcgagaatacacattgagaacagatagacctcgccccacatttccgcgccgccaatccacatcatatagtcgcagtcatggtattgcgcggcaatgctatccgctcggggatcgaactggcgtttcgcctgcaggagattttccggcagtaactcgagctggctggcaaatcgcgcataatcagcaaactcgccgtgacgaaaaatgacgcggaagaataaccagtacagcagcatatattcatattccacgccatttttgtggcacatcggaatatgccagctggcggcggcagccaatggcgagtcggcgtgacgagtaatagccaccacgcggatcccctgtgccttgcaccattcggcaatggcgaccgactctttggtatcgccggatttagataacgtaacgacaaccgcatctttatttaattttttatgtccgcgatggattaactccgcggcctgttcaagatataccggcacgctggttaattctttggcaaattcattaattgccatcatcggcgccagggaaccacctaccgaagcaaaaaataatgcgctacagccgctgtcataaatatcgtcggctacggtttcagcctgtttacgcgcagcgatgatctcgcgagcactggtcaggtactcgtcctgattaaaacccaacatagttttctcctgaattttcagattttactttttaagacgcggtcaaaatcgtcgaaaatacgtttagccagatcgatgcctttcagtcctgcggtatgccaggcgagcatctgcactgggacaatcagcagcagaggcgccaggtgatgctcgcacggacagtttagcgccagcgtttgagcatcctcttcgtcacccagcgtcagggtaaaggcccggccaatggacggcgccagatagtcgcgcagcgcccgggttcgcgcgtccggcgtatcttcaataaacagcatcacatggcgggcattggcttccagataggggccatgcatataggcttccagctcaaagccgctggaaggcacgcgcaccgtctcggtaaatttggtttcgaactccttcgccacgccaaccagcgcgccgtagccggtggcgacaaagcgctcgccgctgcgcagcgtttcgctatggcggtcaataaagcgcgaggtgcggacgataacctccgggatcgccgctaccagccgctgcaattcagcgagatagtgctgctcctcgacctcgctggctttctcctgcttacgagcaatgatcagcgctatcagcaacaggttgagcaccgtcgcgctaaagccgcgggtcacaaaccctacgctctcgatcccggtattaatatccagaacgccatcgctggcgcctcctatcgggctttgcggatctgaggtcagggcgaaaaccgacttgccggaagcctgtaccttacgcatcgcctccagcgtcgacgcgctttttccgctctgtgaaatcgccaccaccagatcggcatgcgggtcgatcgcgtcgtaatgggtgaagttgtacggctctttaatgtcaagcagcacaccgaagcgttgctcaaagaaatagcgcgcgcacagagcggcattcagcgacgatccggtcgcgagcaataatatccgccgtaccgggtgctggcgggcgaaggtttcaatcggcgctagcttttgtcggtagtcgcgcaggatctgcgccaggcaggctggctcttcactgatatatgtcatcattgttggtcgcatagctcactcccgttaaaacaatccgatccacgaacccagaatgcccaccagcgccatgccgccaataattgagagcggtttaactttccgtcccagtagccagtagacgatgccaaaactcaccaacggcagcatgcagggcagaatgtcgttgataatgtcctgtacctgggttttggcctccccggcgccgaaggagagaggaatggtgatatcgatcattgaagcggtcatcgccccgactaccatcagaccgataatcgacgccccgtaggtcaggctctccatcattccgctcttctggatccgctgcaggaccccggtgcccagtacgtagccccagcgggtaaaacaccagcgcaccagaatgtgcggcacgttaaacaccagcagaaacaggatcggcccgaggatgttgcccttcagcgccaggctggtgccgatcccggtggcgatgaggcgcagcgtcccccagaagaaagagtcacccagcccggctaacggtcccatcagtgaggctttgacgttatcaatcgcagtggcatccatgtttttctgctgactgtttttctcttccatcgccgtggtgatccccagcagcagggtgacgatatgcggcgtggtattgaaaaaaaccagatgccgcttcagcgctgcggccagctcctctctgcgcggatagagcttcttcagcaccgggatcaacgcgtaaacaaaggcgagattcatctgccgctcatagttccacgagaactccatctggaaagagcgccagaacacccggcgtaaatcgcgcggcgtaatccgggtttcttcctgcgcctgcggctgcagggtctcttcagaaatcatcttcgtcgtcatcgctgactccttgttctgtcgtgatacgaggtgaattcaacgcggtgacgttaaccatgactaccgccacgatggcgccgagaatggcgataccggtcaccgggattttcaaataggccatcagcacaaaaccgaggaaaaaatacggcgccactttcttgttaatcagcagcctggcgagcatcgcgaagccgagggccgggatgatgccggtggcgacgctgagcccatgtttgataaattccgggatcgtatcgagcagggatttcaccgcgttgctgcccaccaggaatgagacggtgaccaccgcggcaagcatcagcgacaggccgaatccggcaatcaaatgcatccgctcaatgccgcggagatccgcccgttccgcatacccgtccgccttttggctaagcattggaatgaacatccccagatagatatttttcaggatcaaagtcagcgtggcgataggcaggccaagcagcaacgccgtttctgtgcctgcgccagaggtaatggcgaacgccacgccgagaataccgccggtcacgacgtcgggcgggatcgaggcgccaacggagaaagagccgataaacgccagctccagcgtcgcgcccataatgacgccggtctgtacatcccccagcaccagcccggtcaacagcccggtgacgataggccgtgaaattagcgacgtccctaaggcatattccgattgcgcgataaacgccaccagacccagtaagagagcctctaccataatctgtcctccggaattacacgcattccgcaaaaagctgtttgcgatcgttcgggacctggcgaatctccacttcgacgcccttgcccaccagttgttgtagctgttctatttctgtcggcagtaaattaatcgccttagagatatttttactgccctctttagcctttattccgccaagatttatgctttttatttcgtcgatggcgctggcaatacgccaggcgtcattaaccgactccacaacaataaataaattatatttatcggtaaccccgctttttattgcctcaatagaatcatttacatttttaatcaccagcttcaccgagggcggtttggcaagcttaatggtggttttccgcagctcatcaccagggacgctatcgttggcgattaaaatacaatcggcgccgacatattgggtccaggaaaaggccacctggccgtgaagtaatcgatgctctacccttaataatgtaatcatcatgcttcctcatttcagaagtctttatccatagtcatcgcgctggcaatcgtttgattgcagtactgaatgctctctttggcgtttgttaatgcctcggtaattaatttttcggtatcgtcttcggctgcggaaatcagcaagtcaataattaacggcagatttaaaccggataataaatggaaatgtgggcgagataaaaaacgaacaaactcgttattcacgctaccggcaaaaatatccgtaatcacgatcagctcatcctgcgccgggaaacgcgccattagcgcttccacctgctgcgtcagatcggcctcttcttccacgtaggcacacaaggtatgtatatcgggttgtttaccgaggatcagttccacggagttcaacaaaccgttagcaaagctgccatggctggcaaaaatatagtgtcgtttcatccttacctcgaaagcgcattccactgctttcttaattgcaaccgacgtgccagaaacagtggcgcgtcggctaacgcaaggataaaaaagaagagatgtgttaaaagtcttgatcttcctgaataaattctgtttcccgcgtcaggatatcgtgaatgtagcagagctctacaacgggaattttgacactatacccgctctctatgacactaaaggcctcgcgtagcgtagccagctcgcgatccggacactgccctccagtgtattgggctggggaagcgtgacgaattaatcgctctatcagacagctgatatgcacatacagcgcgaccttacgatcgttaggtacatcgcgcccggccagatgctcatagcgcagcaaaaactgctcaacctggttgatcaccttagccgtatcgaggatcgtcaccgactcgatcaaccggcgcagcgaaaagtttttcaggatcaggttgttgatctcgctgacctgctccgccgtcgccagttcgccaaaaatgcgcatcagcggacgactcccttcgccagagatcagcgaatccagcgagatccagggtagatcggcaagatgcggatccagggtgccgacgatcgccagcacctcatagcggcttagcatcggctcccgtcgcgcgtgatcggcaagggtctccacatcacaggccacaatatcaatgccaagcgcttcaggaatgctggcttttaacagcgccgacagattcgccgccgcgcccagaccggtcgcgcaggtggttaaaatcgcccgcggcttatcggtttgcgggtaatagagctggtgctcaaccgcaaggtcatcgccgatctcgcggacgatatcttccagcataacgccctgcaaaatgcgctccccgacgtacatcgccataccggtggagacattgttgatgatcgccatcggcgtactcaggcgacgattaaaatggcggtgaatggcgttcagcgatcccatgtcgaccaggattatcaatcctgatgccagggcatggctctctatgtaggccatcacctggttagcgatagcctccggcgtcacgtccagcggcatatcgaatgactcaaagagctggcttttcagcaagcggtttgccacgttggcgatgctgctggcggtagcgtaaccgtgagcgagaattatcgcccgggtcacctgctgctggctgatggcgccattcttgtggaaccacagcactaacagcagcaggtcgatacgctggggttcaatatccagcttcagcgtcaacgcaccgaggatcgcttcgcaaaagcgatacagcagcggaaacttctgtaccaggaagtcctccagctggcgggctttttcattgtttatcgtggactgcggctgtcgggatcggtggatcaggtagtggctcagcgcgtagaggcagttgccgttacactggatattgaagcgcttttccaggcgataatactcctcccgaacctgatgagcgatcagcagcagcatctgcgagctactggagtcatgattatcaaagatcagccgatcgaagagggtttcaatctcttcccccatgctcctttgcgcctcttcccagaccgtttttttattcagcaccgcttcatactgcgccagaacccgacactgaacgtcatagatcagcccctgtaccgggtcgcgcgcacgcagcagccagaccaggctggtctgcggctcgataagcagcggctcctgcaggcccatcgcttcgctgagcgctggcgtcgcggccatgacattctccggcagatcgtgcagcctcacggtcagcatttcgcggcccggagacctggcccaggctgacgccacggcgtatttcaccacattcttcagctcgccgacgttgccccgataaacatactgcgtcaggacctgcaacagtcgcggcgttagttgcagccgggcggcaagcgtgcgcgcctcctgccagaaaaactgtagcgttagcgcctccttctcctcgcggctacggtgttgaagatcgggcaagctaaccaggatcggaattcggcgcaggaaggtggtgagaaaagtgctgtgaatatcttcggtggtggcaaacaccaaccgcagcgaaatcggcaagccttgcgcggtctcccccacccggtagatctccttacgatccagccaggtgaacagcttctcctgcccctgagcatccaggcgatggacctcatcgagaaacagcatcccgccgtttgccgcctcaaacgcccccgctttatcgctctgcgcaccggtaaacgcgcctttgacgtagccaaacaggttggcggccagcagctccggattactcgcatactgcgcgcagttaaagctcacaaagggggcatcgggcgccagcagcccctgggcgatggcgaactcatgcatcagctcagccatatagcttttgccggtcccgctgtcgccagtgatcagcagcggtagcccgccgttaggataaaacagcgcggttttcatctgctcaatcggtttacgcaggctgccgtcatgcccggtcagcaacgaaaaatggtccgcctgctccggctggcggtcgctctccgcgagtaactccgccatgctggcatactcactgcgagaaagcgggtagaactgctggcaaaaggcttttttatgcagaaaatagaccggccgggtgttgattttcaccagcacgtcctgagcgaccagctgattgagataatggctggcggtatttctttgcatcgcgaaacgccgggccagccagctggcggtaaagacctcgctcaggttatccggatcgaaaaaatcggtctgattttgcaaaaaagccaacagttccgttttacgcatcgcatccccctcttcgccattacgaagggatatgatgcgggaaaagagaggcttatcgacggcccgtgctgtttttttgcggtccagcgcacactcctggctaagccgacttcgcgtcggccagatccatcgtcatttcatactgctgcagcgagagcggcgtataaccggccgcggcaaacagcggcgtaaaagtttccgggaccgtcaccgaagtaccaatgcccgggaactgctgcgccagcgccatcagcagctcacgcgccagcccctggcggcgggcggcgggctccacccacaaaaacgacagtacagggcgcgagcccgccgtcgttagaaccgcgaaggcgcgctgttccagcgtcacgacctgacatggcagagtggcgaaggtaagcggatccagcagccagggaagctggctgttactctcctcaatggcgcgccgaagcagggacagggtgggataaagctgtaatacgcccggcaccgggggcagaagttctgtactcaggtagccgcagagcccatagcgtcgcgtaaagcccagcgactgatacagcgcgacggccgcatggttatcgcggatcacctccaggaataccgtctcgatcccctgctgttgcaaaagcatcagcagctcctgcatcagtttccggcccaggcctttgccgcgccaggacgggcgcagggcaaaggccgccaggcgagcggcactcccccggcgcgcgacgatcgcgatcgccgccggttcatctccggccagccagacgcgggaatcgaccaagctcatcccctcggcgctaaaacgctgaacaaatccctctaccgactgggtaacaggcaccaggtaggcttcaaaacaggcgttgagaatatccgttaactgcacgctgctgaactgcgtggcgggaacggcggtcagctccatacttttctcccgaaggctgctatgctgaggtgatgaaaactaacactataactgccggtgccgtattacgcctgactcaggagagcgatatcgcccttctgcccgccattgaacgttctgccgcccaggcatttcgccagatcccttctctcgcctggctggcggacagcgaggtgattagcgttgcgcgccatcatgattatctggaaacggagcatagcctgctggcggtagccgccgggcaacccgttggctttattctgaccgaaccgctcgacgatgcgttatttatcgtcgaagtcgccgtccaccaggcctggcagcaacagggcatcggccggatgctgctggagcgggttatcgagagcgcacggcagatgggctacccggcggtaaccctcaccaccttccgcgaggtgccgtggaatgcgccgttttatacccgtctgggattcgccatgctcgatgagctgaccctgcccgccgggctggcggcaaaaagggaacaggagacccggcacggcctgccgcccgagtcgcgctgcgccatgcgcctggcgttgtagacttcagcactgatttcagcggcgcaatatggtacaaagtaccattcaaaacttacccgttgttaccgtatgtcctggtcaatcgatattatttcctgcataaccgatcgctttgtggaactcacggcgaccgaaaaacgcattgcgcagtttattctcgatgatgtcgcggcggcggcggagctgcccatcgccgagatagcgcgtctgacgcaaaccagccaggcttcggtcacccgttttgcccgggcgctcggctgtaaagacgtccgcgagctgaagatgaagcttgcgcaatctcttgcggtcggccagcggtttatcctcgatgttccggatctcgaaggcgtccaggggatctatgagtcaatcatcagcgtactggagaccaaccggcgggcgctggatatcgaggcgctgaagcgcgcggtgagctggctgagcgatgcgcggcagatcctcgccctagggatgggcggcggttcgaccatctgcgctcaggaaattcagtatcgcctgtttcgcctcggtctgccggtagtcagccagagcgatggtctgctggtacgcatgatgagctcggcggtgacgccgcaggatgtggtgatcgtgctgtctctgggcggctatacccgggaaatcatcgagagcgcggcgattgccagccagtacggcgcgaaggttattgcgattacccccgccggaacaccgctggctgaacaggcggatctggtgctaccgctgctggtacgggaaaacgactatatctttaagcccagcacttcccgttacgcgatgctggcgatggtcgatgtgctggccaccgaactggcgatggccaacaaaacccaggcaaaaggcaaattacgccgtattaagctggcgctcgacagccaccgcggcggcgtcgatcggcagccgctgggggactaacttttactggcggagataaacctctccgcctgctcgcgggtacgttccacggcctgtccagcgcgataaagatcgctgcccagaccggcaccggcgcaccccgcctgtatccaggtcgccagattttccggcgtcacgccgccgaccgccagcaccggcacctccggcggcaacaccgcttttagcgcgcgaatatagtccgcgccgaatgctgatgacggaaagattttcagccattgcgccccggcatccagcgcactaaacgcctcggaggccgtcgcgcagccggcgcacaccagcatccccttatctaccgcgcggcggatcaccgccggggccgtattgggcgtcacgataagtttcgccccagcttcagcgagaaaatcaacctgttcaaccttcagcaccgttcccgcgccaatcatcgcccgctcgccaaactgacgcaccatcgccggaatactttgctgccagtccggcgaattgagcgggatttcgatatagcgaaagcctgcatttattagcgtctcaatatgatctgccgcctcagcgggttgaatgccgcgtaaaatcgccaccagcttaatcttgtccatcaatcatcctcgctatacccgaaagaaacgccgcctcgccggagcaacaggaaacggctaacccacgcgccgccatcgcctgctgataacgggcgttgagcgagtgctcaccaaccagcaccacgcggctggcgcgatagcgttcgctgaatgtcgccacctccgcgccaatcaacagcccggagagataatcgctcaccgaagtcgccgccagcgcgcctaacacccgcgcggcgcgggcgctaaaaagcccggacaataacgccggctgatttaaccctttttccataccgagggcgaaagcggcttcatccggcaactgcgcaggcagttgctggccgagcagcgaatggttaagcagcaggtgatgcagttcgccggtcatcgccgtggcgaactggcgcaccacgccgttttgcacctgcacccatttgcagtgggtgccgggcatcacgtaacactccgcgggcatcagttgccaggcgcccagcagctgcgtttcttcaccgcgcattacgtcgtaatctgcagcctgcgccactttcagccccggcacgatccacactttttccgccacctcatataactgaccgttgagcgcctccagcgccagcgggcaggccagataaggcaccggttgccaaccggcatcgctgccgatcatgcccgccatcaccaccggcagcgcggggtcaccgcgccacggcgccatctgctgctgaaataccgcttcggcgcgctgcccgttcagacgcgtgacgccgcagggcagtttcagcttgtcgatgcattcgccatcacgcatccgccatgcccgcagctgggtggagccccaatcgacggcaatatactcgttcatgattaccccttacccgcgtgaggtatgacgtttgccaatcggcagcggcggcggcgttgggcggctttcacgctcgcgggtaatcatctccagagcctgctcgcggctcatgctgctggccggggtcagtaacgtcaccacaaccgaagccaccaggctcgtcagcaccgccggaatacacgggttgccccagaacgccagccagtcgctatccaccagcaccgcaaccgatgccccggcgccgccggccagcgcggcgaccgcgccctgccagttaaagcgtgtccagaaacggccaagcatggtgcagataaacatcccggacataatcattgagatcattttggtgatgtagctgatgatgtcgttggaggtcagggcaaacagcagcgccagcgcaatcaccagaaccaggaagatccgcgacaggcgaatcgctttctccggcgcgggcatatggccggtcaccagggtgtagaggtcgcgcagcatgatggacaccgcggcgatggcatcagagctaccggaagacatattggccgacatcccggcaatcaggatcgccatcgccagcaccggcggcagcacctgggtggcaaacaagaaggcgaagccgctgttttccagctgcgggttcatggtccataccgccataccgatgatcgccggcaggaaggagaagcccagatacagcaggccggtaatggtaaaggactggcgcaccgaggagacggtcttcgccgagtaaatacgctggcgataagaaggcgtcgccagcacgccgacgccaatcaccatcgcaaatgatagcgccggcagcacgcctaatttatcgaccgcgaacaggctttgcgccgccggatcgacggcctgctgaatatggctccagccgccaacgtgatgaaccgccagtatcgccattaaaataaagcccacgaacagcacgatcgattgaatggtatcgatccacaccaccgcggaatagccgccgataccgacataaaccacaaaagccagcgcgataataattttcgcgacattaatatcaatgccgctggcccacgccagatataatccgccgcctaatatatgcgcccccagccagccgatagaggcaataaaaataagtatcgcgacgaggtttttaataattttactgccgccggtgtaatacgacatttcttcactcatggtcatgaagcgaagtttacgtaccggtgcgaataaccatgccaccagcaggatccccaccgcgccgccgaggccgtaaagcatcccggcccagccgttgctgtagccaaagccgacggcgccgacgctggagccggtccccaccatggtgccgaccgtcgaaccgagagtgaggatcatcggcagcgaacgaccgccaagtaaaaagtcttcgccggttttctgtttgcgcgaaacgtaccagcctaaggtaatcatcgcgcaggcataaacggaaaaccaaatcataaatgacatattattcatggctcacatccagacgtaataaataatattcgtgccgctgaatattatgagttaacaggaaccatgcctgaaaaaaggcatagcgaacccagtggcaccgatttatttattcactctggtgccgatatcacacttttttgatgctccctcccgcaaagggagggatttattttaggtttcgagcgttattgtcgcgcagcgttaaaacaggtcacatccacttcgactttacaatccaccaccaggtccgctacgcagcagatgcgggcaggcgggttgtcgccaaagaactcgcgaaataccttattgaacgactgaaaatagcgcgcatcggtgaggatcactttaacatgcaccacgtcggccagggtgtagcccgcttcggtcatgatatctacgcagttctgaatcgccagacgcgactggtcgacaatcccgccttccacgacttcgccatttttcatcggcgtctggccggaaacgtacagccagcctcccgcttccaccgcccgcgcgaacggcaggtgctgcccgccggtaccggtaccaccttctacgccataacgcttgatactcatactcaactccttagtccatccgacgacgcaggaaacgccctgcccgtccggtaattttcttatcactgccgtagctcatcacgccgttgaccatcaccgcctcaatgccgtccgccggtcgtttcgggtcggagaaactggcgacatcgcgcaccgtctgcgggtcaaacagcaccaggtcggcaaagtagccaattttcaccagcccgcgatccgccagctggaagcgcgccgccgacagcccggtcatcttgtgtaccgcggtagtcagcgggaatagctgctcgtcgcggctatagtggccgagcacccgcgggaaggcgccccacaggcgcggatgcggcatcggatcgttcggcagtccgtcagagccaatcatggtgaccggatagcgcatcacccgccgtacgtcctgctcatccatgttgtgataaatagcgcccgccggcatcagccgcgccgcggcgtcgtgcaggctcacctgccactcatcggcgatctgctgcagcgttttccccgccagctccggctgcgcttcggaccaggtgatcacgatatcaaactcatcggtcacctgtttcatatccagcgtcgacgagctggcggaatagggataacagtcgcaggcgatatcctgctgctggcgcatctcatcaaaaaaggccagcgtctctttggtacgcccccagttttttgccccggcgcacttgtggtgcgaaaccaccaccggcacgttgccgtggcgaccaatacggaaggcttcgtccagcgcctcgagaatcggctcaaactctgaacgtaaatgggtggtatagacgcccttcccggccgccagctcttccgccagcgccatcacctcctcggtggtcgactggaaggcgctggcgtaggccagcccggtactgagccctaatgctccctggcgcagcgcatcgcgtagctgtacgcgcatgccggcgatttccgtctcgttcgccggacgaaacagatcgtccatatggttattacgcagcgcggtgtgaccgattaacgtgccgacattcagcgatggtcgcgccgcctccaccgcatgggcataagcctccacggtgggatagataaagtgctgctgctcgccgaggagattcattgggtccggcacttccccccgcatggtggcggtcgccgcactgatcccgcagttgccgacgatcaccgtcgtcaccccctggctgagcttcggcaagtactccggcatgcggatcacgttgatatcatcatgggtatgcacatcaataaagcccggcgccagtacccgcccctggccatcaatcacctgctccgccgcaacgtccagcgccggggcgatagccataattcgatcgcccttcaccgccacatcagcacggtattgcggcccgccgctcccgtcgaccaccgtgacgcttttgaaaagccagtcaactttcatagcaattactccctttcgacatgccgataagttaaccatttacaagcgcaaaaaacagtggaaaactacgcaaaactcagatcgttttgtgatacttttattcaaaacgaataacatttttatgttaaaaatatatttatcaaatagttataaatgatacccagcgactaaccgattataaaccctgaaaggatagtgttatgaaataccattcagcaccgatcatcccgcacaaatccgccttcatgtccgcgccggctaatctgctggcggaagaggtctgtctacccgccgcgctgctaaaaaagtcggcactggaaaataatatttcatggatgcagcgctacgccgacgcccgcggcgtatcgctggcaccgcatggtaaaacgacaatgacgccatggatatttcaggcgcagcagcgagcgggggcgtgggggatcggcgtgggcagcgcctggcaggctagcgcggcaatggccagcggcatccaacgcgtcctgatggtcaatcagctggtcggcaaagccaatatgcaggtggtcgcgcagctaaaagcccactatcgggcggtggattttatctgctgcgtcgatagcgaggtcaacgtgcacgccctctccgcattcttcgcagaccagggacaaacgctggatgtgctgattgaacttggcgtgcctggcgggcgctgcggctgtcgtagcgttgatgacgcgctggcgctggcgcagcgggtaagcgacctgccggggctacggctacgcggtctggaactgtatgaaggggtgctgcacggcgacgatccgcagccgcaggtggaagcgctgttacagcaggccgcggcgcttgcctgccgcatggagccgctggttgacggcgaatttattctcaccggcgcgggcaccgtctggtatgacgtggtgtgcaacatctggctggcggcggcaaaaccgcgccgctgccgtatcgttattcgccctggctgttatatcacccacgatcgcgggatctacgatctcgcccaacaagagctgatcgcccgcgatccgattgcctgcgatctcgccggcgatctcacttcagcgctggagctgatggcgatggtgcaatcggtgccggaggcggatcgcgcggtagtgaatttcggcaagcgcgactgcgctttcgacgccgggctgccgcagccgatcgcccattatcgtaatggccagcagttagcgctgcgcgcggagtcgatcgtcagcaccggcatcatggatcagcactgtatgctgcgcctggcgccgggcagcgatgtgcaggtcggcgatattctgctgttcggcacctcgcacccgtgtctgacctttgataagtggaagacgttgctgctggtcgatgacgactacaacgtgctggacgagctcgacacgctgttttgacaggcatccgggtagcggcgcttcgcgccttacccgccccggcgcaaggcgcaaatctcatcatgcaatgaacgactgataatgaccccctgccgttcactctgctggcggcaggcaaaacgccgctcgcccggtagacgcgccccttgttcctgcatacccatgaacagcgtttcggcgcgcgccagctgctctggtgcctgcgcgccgagaaagcgctgcggatccagcgccagaatcagctcgccgccgtaggggagaccgcccgcgccgttatcccacgccagcgattcggcgctggtcatatcgccgataagcggcccggccaacagctcaaccattgccgccagcgccgagcccttatggccgccaaaggttaacatcgcgccgttcagcacctctgcggcatcggtcgttggctgtccctgactgtcgattccccagccttccggtagcgctttgccggcgcgctgatgcagctggatctcgccgcgcgccgcggcgctggtcgccatatcaacaataaacggcggcttatcccgccgcggccagccgaaggcgatggggttggtgccgaacagcggacgtgtgccgcccgccggggcgacccaggcgtggcttggcgtacaggccagccctaccagccctgcctcggtcaacggctcaatatcggcaaacagcgcggaaaaatgaacgcagcgattgattgccagcgccgcaatgccattgtggcgcgccttctccagcagcagcggcagcgcgcgctcgtaggccagcagtgaaaaagcgcccccggcgtccgcccgcgcaatccccggcgcctagtcatggatctgcggctcggcatcgggcgataccttacctttgcgcagggtatcgacaatgcccaacagccgccacaggccgtgggaagcgcagccgtcgcgctccccggcggtcacattgcgggcaatcgccgccgcgtggtcggcgctaaatccattggcgctgagtacctccagcgccaggtcataagcttcaggtaacgatagagttaccgactccatactgttctcctttactcttcttcgtctccgctaaagttagcctgcggcaggcagctgcgcgcgccccagtagtaaatccccaacgacatcgccgccatccgggaggtgaacggcgcgcggctgaatgcccgcccctccgcgcacagcgtgctgtttgaaaccgccgacggcggcggcgtggtttactggcagaaactgatcctctgctgcagcgcgggcggcctgcaggcggtggcggatacgatgaaccaggccggaggcgacgtgacgaatatcattgagcaagcgctgctcccggcgctggcagcgcttcgccgacgccataaaccgcaccttccggctggcggagtcgttgaaaaacgcggcgacgccggagagcctgctgtgccgttgcgaagatgtgcgctgcggcgacgtagctgccgccgacgactggctgcaggccaaactgacccagcgcccgctggttgtacggctggccgctgccgcagccgagagagccgctgtcccccgcccgcgcggaaacgcttattgccctcgcccggccgagcgccgagccgtaaccgctactcttcttcatcaccgcgcccggcagggacgccaagcgcaataaactcctccagcagggaggtcagttgctgcagcttttccgtggtgaactgggcctccagcaggcgataggtctcttccacctccgcctgggcgctttcgtacagcgcagttccggcaggcgtcagcgagacgtacagcttgcgctgatcgttaactggctttaagcgcagcaccagcccatcccgctccatgcgcgtcaaaataccggtcagactggggcgcaggatacaggcgcgaaaggccagatcgtgaaagtccatcgacggacgttcggcgagaattcgcacgatccgccactgctgttcggtgagattgtgccgtttgacgatcggtcgaaagtaggccatcgccgcttcacgcgcctgcaacaaggcaatggttaatgaatcatgcatagtatcccctcaacagcctcaccaaaaacttattaataacttaataattagcgttaatcctgccatgtacaaccggtttctgcacctgaaaagtaccagtcttttcctgaaaaatattcaacttattgattgacaacaaataagtaattgttatgtaaatattgtgttaatccgatcacaaaacattcacttccagttgctaaacctcagcgcaaagcataaaagatgatcattaacatattaatgaaatccctttgaaccgaaatctgtcccagaggagtggtgaatgaaaggtaccatcttcgccgttgcgctcaatcatcgcagccagctcgacgcctggcgcgaggcgtttcaacaggccccctacaagacgccgccgaaaaccgcggtctggtttatcaagccgcgcaataccgtaattggcgatggcgaagcgatcccgtatccgcagggcgagaccgtacaaagcggcgcaacggtggcgctgattgtcggcaaaaccgcgcgtaaagtggcggcggaagaggcggcgaactatatcgctggctacgcgctggctaacgatgtgagtctgccggaagagagtttttatcgcccggcgatcaaagccaagtgccgcgatggcttctgccccatcggcacgctatcggcggtacgcaacgtcgacgatctgaccatcatcaccgaaattaacggccgcgaggcggatagctggcataccggcgatctgcagcgtaatgcggcgcagctgctgagcgccttgagcgagttcgccaccctcaatcccggcgacgcgatccttatcggcacgccccactcccgcgtcacgctgcgccccggcgaccgggtacgtattctcgccgacggtttcccggcgctcgaaaacccggttgtcgcagaaggagagctggcatgaaacaggcacgcattgaatggcaaggacaggtacgcgacgtgctggtcaatgaacgcgaccaggtgcgcctggacgatggcacggtattaaaagaaggtgaattccgctggctgccgcccgccgacggcacgctgttcgcgctggggctgaattacgccgatcacgccagcgagctggaatttaaaccgccaaccgagccgttggtgtttatcaaagcgccgaacacctttactggccaccagcagcagtcggtacgcccggataacgtcgaatacatgcactacgaagccgaactggtggtggtgattgggaaaaccgcgcgccgcgtcagcgaagccgaggctatggattatgtcgccggctataccctgtgcaatgactacgcgatccgcgactatctggaaaactactaccgcccgaacctgcgggtgaaaagccgcgacaccctgacgccgatcggcccgtggatcgtcagcaaagaggcgatcccggatccgcataatctggccctgcgcacctgggtcaacggcgagctacgccagcagggcaccaccgccgatctgatcttcagcatcccgttcctcatcgcttatttaagcgaatttatgaccctgcaaccgggcgacatgatcgccaccggcacgccgaaagggctatccgacgtggtaccgggcgacgaggtgatcgttgaagtcgagggcgtgggccgcctggtcaaccatatcatcagccagcaagcgtatgaggagacactgtcatgaaaaagattaaccattggatcaacggtaaaaacgttgccggcgcagactattttcataccaccaacccggccaccggcgaggtactggcggaagtcgcctccggcggtgaagccgaaataaaccaggcggtggcggcggcgaaagaggccttcccgaagtgggctaacctgccgatgaaagagcgcgcgcgcctgatgcgccgcctgggggatctgatcgatcagaacgtcccggagatcgcggcgatggaaaccgccgataccggcctgccgatccaccagaccaaaaacgtgttgatcccgcgcgcctcacacaatttcgaatttttcgccgaagtatgccagcagatgaacggcaagacctatccggtcaacgacaagatgctgaactacaccctcgtgcagccggttggcgtctgcgcgctggtgtcgccgtggaacgtgccgtttatgaccgccacctggaaggtggcgccgtgcctggcgctggggaataccgcggtgctgaaaatgtccgagctgtcgccgctgaccgccgatcgtctgggcgagctggcgctggaagccgggatcccggctggcgtgctcaacgtggtgcagggctacggcgccaccgctggcgacgcgctggtgcgccatcatgatgtgcgcgccgtctccttcaccggcggcaccgccaccggccgcaacatcatgaaaaacgccggcctgaaaaagtactccatggagcttggcggaaaatcgccggtgctgatttttgaagatgccgatatcgagcgcgcgcttgacgccgcgctgttcaccatcttctcgatcaacggcgaacgctgcaccgccggctcgcgcatctttattcagcagagtatctaccccgagttcgttaaacgcttcgccgagcgcgccaatcgcctgcgcgtaggcgatccgaccgatccgaacacccagatcggcgcgctgattagccagcagcactgggagaaagtgtccggctacattcgcctcggcatcgaagagggggccaccctgctggctggcggcgcggataaaccgtccgacctgccggcgcatctgaaagccggcaacttcctgcgcccgacggtgctggcggatgtcgacaaccgtatgcgcgtcgcccaggaagagatttttggcccggtcgcctgcctgctgccgttcaaagacgaagcggaagggctgcgcctggcgaacgatgtagaatacggcctggcgtcgtatatctggactcaggacgtcagcaaagtgctgcgtctggcgcgcggtattgaagccgggatggtgttcgtcaacacccagaacgtgcgcgacctgcgtcagccgttcggcggcgtgaaggcctccggcaccggccgcgaaggcggcgagtacagctttgaagtgttcgccgaaatgaaaaacgtctgcatctcgatgggcgaccatccgatcccgaaatggggagtctgatatgggtaagttagcgttagcagcaaaaatcactcacgtgccgtcgatgtatctgtctgagctgccggggaaaaaccacggctgccgtcagggcgcgatcgacgggcataaagaaattggcaagcgctgccgtgaaatgggcgtcgataccatcatcgtgtttgatacccactggctggtcaacagcgcctaccacatcaactgcgccgaccattttcagggcgtctacaccagtaacgaactgccgcatttcattcgcgacatgacctacgactacgacggcaacccggagctgggccagcttattgccgacgaggcggtgaagctcggggtgcgtgccaaagcgcacaatattcccagcctgaagctggagtacggcaccctggtgccgatgcgctacatgaacagcgataagcacttcaaagtggtgtccatttccgccttctgtaccgttcacgattttgccgacagccgcaggctgggtgaggccatcctcaaagccattgagaaatacgacggcaccgtggcagtgctggccagcggttcgctgtcgcaccgctttatcgacgaccagcgcgccgaagaggggatgaacagctacacccgcgagtttgatcatcagatggatgagcgggtggtgaagctgtggcgcgagggcaaattcaaagagttctgcaccatgctgccggagtatgccgactactgctacggcgaaggcaacatgcacgacacggtgatgctgctcggcctgctgggttgggataaatacgacggcaaggtggagtttatcaccgagctattcgccagctccggtaccggccaggttaacgccgtgttcccgttgccagcgcaggcgtaagggggccccatgccgcattttatcgccgaatgtaccgacaacatccgcgagcaggccgatctgcctgggctgttcgccaaagtcaacgaggcgctggccgccaccggcatctttccgatcggcgggatccgcagccgcgcccactggctggatacctggcagatggccgacggcaggcaggattacgccttcgtgcatatgaccctgaagatcggcgccgggcgcagcctggagagccgtcaggacgtgggagatatgctgttcgcgctgatcaaatcccacttcgcgacgctaatggagagccgctatctggcgctgtcgttcgccatggaagagctcgacccgacgctgaactacaaacaaaacaacgtgcacgcgttatttaaataatgtgcaaattgcccggtggcgctgcgcttaccgggcctacaacggccatgaatttgtaggccggataagcgaagcgccatccggcaatacaatgccacaggaatcactatgctcgataaacagacccgaaccctgatcgcccagcggttaaaccaggccgaaaaacagcgtgaacagatccgcgcgatctcgctggattatccatcgatcaccattgaggacgcgtacgccgtccagcgcgagtgggtcgagatgaagatcgccgaaggccgcgtgctcaaaggccacaagatcggcctgacctctaaagcgatgcaggccagttcgcagatcagcgagccggactacggcgcgctgctcgacgatatgttctttcacgacggcagcgatattcccaccgaccgctttatcgtgccgcgtatcgaagtcgagctggcctttgtgctggctaaaccgctgcgcggcccgaactgtacgctgtttgatgtctacaacgccaccgactacgttatcccggcgcttgagcttatcgacgcgcgctgccacaacatcgacccggaaacccagcgtccgcgcaaagtgttcgacaccatctccgacaacgccgccaacgccggggtgatcctcggcggccggccgattaaaccggacgagctcgacctgcgctggatctccgccctgctgtatcgcaacggcgtaattgaagagaccggcgtcgccgcgggcgtactcaatcatccggccaacggcgtggcctggctggccaacaagctggcgccgtacgatgtccagctcgaagccgggcagattatcctcggcggctccttcacccgcccggtcccggcgcgcaagggcgataccttccacgtcgactacggcaacatgggcgccatcagctgccggtttgtctaggagaaacaccatgaataacgcctttaaagacgccttaaaagcgggccgtccgcaaatcggcctgtggcttgggctgtgcagcagctacagcgccgaactgctggccggcgcgggcttcgactggctgctgatcgacggcgaacacgcgcccaacaatgtaccaacggtgctgacccagctgcaggccattgcgccctaccccagccagccggtggtgcgtccgtcgtggaacgatccggtgcagatcaaacagctgctggatgtcggcgcgcaaaccctgctggtgccgatggtgcagaatgccgaagaggcgcggctggcggtcagagccacccgctatccgccagccggcatccgcggcgtcggcagcgcgctggcccgcgcctcacgctggaatcgcgtcccggattatatccaccaggccaatgacgccatgtgcgtgctggtacagattgagactcgcgaagcgctgaaaaatctgccgcagatcctcgatgtcgacggggtagatggtgtgtttatcggcccggcggatctcagcgctgatatgggccacggcggcaatccgcagcacccggaagtgcaggccgccattgaagatgccatccagcaaatccgtcaggccggcaaggcgccggggatcctgatggccaatgaacagctggcgaaacgctatctcgaactgcgcgcgctgttcgtcgccgtcggcgtcgataccaccctgctggcccgcggcgcagaagcgctggcggcccggtttacccacaacgcaaccaccacaaccgataacaataaatccgtctattgaacggataatgtggagcgcaacatgactacctctaccctgcaacacaatgataataaagccgttgaagtagaaaaccgggtgatcaaaaagctgttccgccgcctgattaccttcctgtttgttctctttgttttctcatttttggatcgaattaatatcggcttcgccggtctgacgatgggtaaagatctcggcctgacctccaccatgttcggcctggcggcgacgctgttctacgtcacctacgtgctgtgcgggatccccagcaatatcatgctggcgaaagttggcgcgcgccgctggatcgccgggatcatggtggtctgggggatcgcctcgacctgcaccatgttcgccaccagcccgcatacgctgtacatcctgcgcatgctggtcggcatcgccgaggctggttttctgccggggatcctcgtctatctgacctggtggttcccggcctaccatcgcgcccgcgccaacgccctgtttatgatcgccatgccggtgaccatgatgctcggctcgatactttccggctatattctggcgctcgacggcctgtggaacctgaaaggctggcaatggctatttctgctggaaggcctgccgtcggtggtactcggcgtcgtcacctggttcttcctcaacgacacgccggataaagccaactggctggataacgaagagaaacaggcgctgaaggcgatgatcgatcgcgaacgggaacatgcggcgatcgtcccggcttcgccgcgttccacgctgcgcgaagtactgacgccagcggtgctgatgtataccctcgcctacttctgcctgaccaataccctcagcgccattaatatctggacgccgcagatcctgcagagcttcaacaccggcagcagcaacatcatgattggcctgctggcggcgatcccgcagttctgcactattttcggcatgatctggtggagccgccgatccgatcgccgcaaagagcgcaagatgcataccatcctgccctacctgttcgccgcggcaggttggctgctggcttcggcaacgcaccacagcctgatccaactgatcggcattattatggcttcggtgggatcctttaccgcgatggccattttctggaccaccccggatcgggtgatcagcctgcagtcgcgcgcggtggcgctggcggtgatcaacgctatcggcaacgtcggctctgccgtcagcccgctgttgatcggcattttgcgcgataccaccggcagctttagctccgggctgtggtttgtcgccggattactgatcgtcggcgcgctggtgcttacccgcattccaatgagccagcgtgaggacgccgccgccgcgccgggcttagcggcgcaaaaaggccactaaggagcgggtatgtgccagcattccatcgccaacatcgacatcaataaagattacgacgagagtctgggtaccgaagaggtgcactaccagtcgttctcccgcatggcggccttttttggccgcgacatgcaggcgcatcgccacgaccgctatttccagatgcactaccttgataccggacagattgagctgcagcttgatgaccatcgctattcggtgcaggcgccgctgtttgtgataacgccgccctcggtaccgcacgcttttattaccgagtccgatagcgatggccatgtgttgacggtccatgaggagctgatctggccgctgctggaggtactttatcccggcacgcgggagaccttcggcctgccggggatctgcctgtcgctggcggataaacccgacgagctggcggcgctggcccactactggcagctgattcgccgggaatctaccgcccagttgccggggcgggagcataccctggcgctactggcgcaggcggtctttaccctgctgctgcgtaacgcaaagctcgacgatcacgccgccagcgggatgcgcggcgagctgaagctattccagcgctttaaccagatgatcgacagccactaccatcagcactggacggtaccggattacgccagggagctgcatctgaccgaatcgcggttgaccgacatctgccgccgcttcgccaaccgttcgccgaagcggctgatattcgaccgccagctgcgcgaggcgaagcgcctgctgctgttttccgatagcgcggtcaatgagattgcctggcagctggggtttaaagaccccgcctattttgcgcgcttttttagccgccaggtcggctgctcgcccagcagctaccgggcgcaaaaagtaccggtgtcgtaataccccggcggcgctgcgcttgcctgggctacagaccgtagggcgggccagcgccgcgccagccggtaaaagttgcagagatcacaaaattcactcccgcctgaaaagtacccgccgttgtcgcaaacgtcccttcacgacaagcgccataaccgcttcaattaaacaacaaaaacaaaacatatatttaacataattattccgataaatactgaagaggcccctatgaaacctgaagatttccgcgccgacgcgaaacgcccgttaaccggtgaagagtatttaaaaagcctgcaggatggccgcgaaatttatatctacggcgagcgcgtgaaagacgtcaccacgcatccggccttccgtaatgccgcggcctccgtcgctcagctgtacgatgcgctgcacaaaccggagatgcaggattccctgtgctggggcaccgataccggcagcggcggctacacccataaattcttccgcgtggcgaaaagcgccgacgatctgcgccagcagcgcgacgccatcgccgaatggtcgcgcttaagctacggctggatgggccgcaccccagactacaaagccgccttcggctgcgcgctgggcgccaacccggcgttttatggccagttcgagcagaacgcccgcaactggtacacccgcattcaggaaaccggcctgtactttaaccacgcgatcgtcaacccgccgatcgaccgccacaagccggctgatgaagtgaaggatgtctacatcaagctggaaaaagagaccgatgccgggatcatcgtcagcggcgcgaaagtggtcgccaccaactcggcgctgacccactacaacatgatcggcttcggctccgcacaggtgatgggcgagaacccggacttcgcgctgatgttcgtcgcgccgatggatgccgaaggcgtcaagcttatctcccgcgcctcctatgagatggtcgccggcgcgaccggatcgccgtacgactatccgctttccagccgtttcgacgagaacgacgcgattctggtaatggataaggtgctgatcccatgggagaacgtactaatttatcgcgactttgaccgctgccgtcgctggaccatggaaggcggttttgcccgcatgtaccccctgcaggcctgcgtgcgtctggcggtcaaactggactttatcactgccctgctgaagcgttctctggaatgtaccggcaccctcgaattccgtggcgtgcaggccgaccttggcgaagtggtggcgtggcgcaacatgttctgggcgctgagcgattccatgtgctcggaagcgacgccgtgggtcaacggcgcatggctgccggatcatgccgcgctgcagacctatcgcgtgatggcgccgatggcctacgccaagatcaagaacatcatcgagcgcaacgtcaccagcggcctgatttatctgccgtccagcgcccgcgatctgaacaacccgcagatcgatcagtatctggcgaagtacgtgcgcggctccaacggtatggaccacgttgaacgtatcaaaatcctcaaactgatgtgggacgccatcggcagcgaattcggcggccgccatgaactgtatgagatcaactactccggtagccaggatgaaattcgcctgcagtgtctgcgccaggcgcagagctccggcaatatggacaaaatgatggcgatggtcgaccgctgcctgtccgagtacgaccagaacggctggacggtgccgcatctgcacaataatgctgatatcaacatgttggataagctgctgaagtaattcacagcgggaggtcataatgcaattagatgaacaacgcctgcgttttcgcgatgccatggccagcctgtcggcggcggttaacgttgtcaccaccgcaggcaaagccggccgctgcggcattaccgccacggcggtatgctcggtgacggatacgccgccatcggtgatggtttgtatcaacgccaacagcgcgatgaacccggtgtttcagggcaacggcaagttgtgcatcaacgtgctgaaccacgaacaggaaatcatggcccgtcatttcgccgggatgaccggggtgacgatggaagagcggttcgccctcagcggctggcagcagggcgcgctcgggcagccggtgctgaagggctcgctggccagcctcgaaggcgaaattagccaggtgcaaaccatcggtacccacctggtgtatctggtggagatccgcaatatttccctgagcccgcaagggcacggcctgatttactttaaacgccgtttccacccggtgatgatggaaatggaagtcgcggtgtaatggcctcgcctgcctctccccggataacggggaggggctacacagattcgcgttagccttcctgctgggcaaactgtgtcagcactgcgccaccttctggtactttccgcccgtgtcgtagtccgtcgtcgccgtccggctcacctgcgcgctgatttgctcctcgctcgggctgccattccctcccgctacctattacgatttttcttgtagccctggtaataaatccaccaacaaccagtagctatcaacgcccctgtgaaacatgcagcttttgtatacttccatgtatcactccaaatcagctcaaatgggatgtggtaaatcaataagaggtaacctctaatgagcacgtatataattaaaaacaatacgatcattgctacattgcaagcaaaaaatagatagaaaaaaataaagaaccacgattttctattcatttttgtttccctttttggaatttcacacctgttttacccgcttgatcattgaggatctctgtcaccgcactacccaaggcattaccagcaataccaggtactggattaatcggcagcggtttggatattcccatcccgacatctgtccagatccagtctttccatggcttcattggattaaggactttatcaaacggcaattcaactagtttacctgcaccatagctcatcccagaggccaaaccattaattaagccgcctgtaaaaggattatcccctttcaatagctggatgttgcaccacctgccgcattccagctcattgttccctttaatcctgtatttctggtaaaagctccaacatacgtcgcaatgagcacatccgttggattaacttctccattaataagatactgaataccagcatttgccgttccgcctatcgcgccagtaatctgcattcctcccggcagatagattagccccgctgacttccaatcctcttggctataaatagcgctactaattggtaataagtagacaatcttttaaacatgagttaattgccccctcatattcataacatatattaaaaccctttaactctaaaaaaatgaaacaaagaaaatcctacaccacctacagctccaccacaaaagctaaccttcacagctctccatatatcactccagcagataaaatattcaccaccaacgagccaaagcaaaaatgatataaataatttaaagtccacacaaacgacaaccacacttaaggaaacaataaaaaaaatcaaaaaagctacaagtatacgcttaaaaaaatcattcattagtatcacttaacttttcaataaggagttcaactcctttcccccaccgatggcagctgttaccaaagcccccttaggcaatatgcctaacccaacagtatctgcctgatgggctgatactactgcattcccttctgccacatcttcagcaagttttcctttatagtctgtatcgcagtctggcgtctggctgaaccagaacccgaggtttgttccagcgctcgctccgaaagcattattctccacactaatcccaactctgtggatgaatttttatcctatctttgctctaaaatccttttagtttaaatagtctggcaataacaaaaaccgcaccagtgaaggttccaatcacacaaccaattttaatggttttgagtatatcggcttttgtcaaatcgaaagttcctgttagcatccaaactaaaacgtctatagacaaagttatacataggaaactaacaataatcccaagaatacaggcgataaatagaatcagcaggtttagtattttctcatggaaggatttcatttcaatttctcctcaatgattggttcgagttttttcccccatattctgaagagaaagatgctcctatgtcgccaaaactgcctggaatgttactcggtgtaacttcttttaagataccaaagtcacctttaatctcagtatacttttgcagaacaggattaaacttcggatcccaaccgtctttccaccagtttacccctgcatttgtaccccaagaaattcctttgcctataccgtaaccaatgccagcaccaataccatttgttattgccccagttagcggatctttattgtctatccagtttcctaatgcaccacccgcagcattccagccaacggtacctgcgagaccgttacccatgctgataacgttcacccaacctgctatagccgcatttgccggatctatcgtgccatccgccagataactgatgcctgcattcgcaccggctccaagaccccacatagcctgaacgccacccggtaacaaggtaacactacctgtagctagcgcaagtccaacagcatcccgctcatttatcgctttctgacatgcgctcccgccaggattatcagaacaactcgccatatcgacaccatgctgacgtatccatatggcctgagcatcttcacttccactcagtaaattattctccaccgcgttcttcccggcctgcgcacccgccaccgcatccgcgctgctgcctccgctaagcacccccatcagtcccgccgccagcgtactcagcgcgcttatcgtcgacttctgctcttccgacagctcttctgtcttaacacccggataatattccgccgctatccagcgccccagcagctcgccactcactgcgcctgccgctcccgccagcgcgctgttatttcccgatgccgccgctatcgctccccacaccgcgtgcgccatcgcattggcttccacattcaccttacccgtcgcgctgtccgtcgtctggctgtgaatgatttccgccacatacggactcactgccccgctcgccgcctgcgccaggttgccgcccgccagaccctgcatcgccgccgttaccgcctgcgccaccttctggtactttccgcccgtatcgtagtccgccgtcgccgtccggctcacctgcgcgctgatttgctcctcgctcgggctgccattccctcccgctaccagcttcgcccgcgccgccgggtcgctctgcgccgcctgcgcgttcagcttgccctgcgtcaccagcacatcactcacctggcgcccgatttcacctgtcttctgcgctgtcgccagccggttctgctctttctccttatcaaatatcggactcagcgtctggttcgcatgcgccgcatcccggcttaaccccgtcacgtcctgctgctgattcgcgccgtcgcggataacgatactgccctcgctcaccgccgcccgcgtcagcgaactgtcgctgccgctcccgttcgcccccatcagcagaccgctggccgcattcccgaggaactgccctgccacgctaccgctcgtgctcactcccgcgctctgctgctccacgctgtactcggcatagtttttaatatcccggaaacccagcgtcccggtatccagccggttcagctccgccgcctccgtgctcgccagcacgctgccattcagctgcgtatgcccgcccaccttcacatcaaaaccaccctcaccggcaaaaatccccgtctgcgcctccaccgacgcccaggtgctgtgcattttgctctggctcaggttaagagaccccgaaccgccgcccatgctgccgctcgcccccacgctgccgctacgctgcttcgaatcgtagttatcgctgtcctgctcgctggtcagcgtcaggttacgcccgacgtccattgtcacctgatgaccgctcacctgcgccccggtcagcgtcgtatcgcgaccgctgacgatagtcacccgctcaccggcgctgagggtcgtttcgttatgcgtcaggctgttgcccttctcgtggcccttcgcggcgttggcgctggcgctgaccgtcagcccgttcgcgccctgaccgaagttaataccgacgccaaacgaactcccatggctctcgtttttaccgctcagggtgctggcgttctccgcagagaataaattcacatcgcgcgcggcattgagcaatgcgctgccgctggcctgcagctggctgccctcaacgttgatatccgtctccgtggcgataatgctgagattgttgccggccatcaggctgctgccgcggctggtgttctgcgtttgtcgctgagtggatttcgaggactgtctaccccaggaaaggttgacccctatcatgctctccggactggaatccgcagtctgcatctgcgatgcctgatacgcctgtacgcccgataatgccgactgcagcccgctcagcgcggcgagacggccattgctctcggtgctggcctggttggcgctggaaaccgcggtattaatggcgctgcccaccatcccggataacgccagcgtcaggccgctggttttctgctccacggtatgggtctgggtgctctggttttccgctgccagaatattcacggttttaccggtcaacgccatattgttgccggccaccaggtcagatccctgaaccgtcaatacattaccggcgctcaggctaaggttgccctgtgagcttccgccggtactggcggcgctactcagcgccgtcgtcacatcgttggctttcagcgacgaactgccgacgctgaagccgacaccgccggtgccggaaaagccgctatgtttctctttacgtagatggttttcctggcgactctcctcggcggtggtaatggtcaggttacgccccgccacaaggttgacgtcctgggtgccggcaacactgctgccggataccagcaggtcgcgcccggcctgcatcacaatacggtcaccgctaaaattgctgccgatggcgttctgcgcccacacttcatcgtgagtggtgagcgagcggcgagccagcaggccgctgctgctttgatggctattttccgtcaggtgccatgaggactcgccgctgctgaggttaatatcattgccggcggcaaccgtcaggctgctggtcgccgtcacgctggcggcgcgggcaatcatatcgtggccggcggacagtgccaccgcgccgccgttaatttgcatgccgatatcactacgctgagtcaaggaacgatcgttgcctttcccccagtttccgctttcgctatgggtggtggcgagcgtctgcaggttgagatcgttgccggcgataatctgcgtctggctgcccgccgcgctgttactcaccatgcttgccgtcagattaatgttatgtaacgcctgcagccccaactggccgttttcattctggacataaatccccgccggccgatcgaggctgatgttacccgggccgccgccgagggtgctggcgctgttgatatcacgcccggcttgcgcgatcaggctatcgccgccctgcagcgttccgccaatattgttgatatcagtacgcgcgtttagcgtgagctggttgccgccgatatagccgctgttatgaatgttttccgcggttagctgggtcacgccgcggctgtggatgtgcccgctgttggtcacatcacggctcacgctgaacgccacgttttcaccgccgagcaacgcgccgctgccatcgagatcgcccgctttaacccgcgcataaacctgcggcaccagcacctgctgcacggagccatccgttagcgtgacctctctggcgaccagccagaccatatcgctggtcagcagcgccatctgcgctggcgtcagcgccaccccgaccgtcaggttgtactgtttggcgaaggcgacgcccgcgtccatcagcgcccgatactgctcttcatcgttactgtagccctgcaggtagcgcccgccgctcagcttaacgatctgctcacgcaccagccgctgttcgtaatagccgtcgccaagccgcttcatcgcctgatcaacgcccagctgattttgcatgtagtcgctggcgagccacgctttaccgttggtaaaacgcggatcggtttccaccagatagcctgctttagcctgcgggtcgatctgatacaggctgctgacaggaagccgggtatccggtgtgacgacgcgaataaccgttccgtcagcgttaaccggcgtcacttccaccagccgtccggcgggtagttcgcctgtttcatcggcgcgatcgcgcggattaatcacgccgctatggccatcaatttgggtattgccctgccacttcatggtttgcaaatcgatggtctgaaccgtcggcgtcggttcatattcgctgctttttttcccctggctggttttggtgccgccaaacgggcggctggtctttttctcataccaacgggtctgggtgccgacgtcggtggtcacccgtttgccggtcgtggcgacgttgtttagttcgccaatcacgccaccgagcgctccttcggcgataatctggctatcgtagttattcagcttatcgctgttgatgatgagccgggcgccggagaggattttgccaggatcgctttccaccacctgcgtttccacaacggtacgctggtactggtattcatagaactcatcgccgcggcttccgtccggcatgatggcgtcgtgaacgccgtatttgtttttatagctggtatcgaccagcgaccagtcgaagcgctgtaccgatcctttcagcgccgcctcatggcgccatgactgctcgaccatcacatctttcgtcactagatggtcgttgtagttattgatttgttggatatcgagcgccatatcaccggcggactcaagcgttgcgctgtggttattaaacactcccgcccggccgctgagcgaaccgtcttcggcaagctggccgccaatggcgagcgtaccgtcgctgtagatcagcgcgtgatcctggttattgagcgtgccgacgcccattgccagcgatgcccgtgcggcaatcgtcgccgccacgccgttctccgcggcgttagtcagcgttgccgcctgcagcgcgacggcgtcgccgtacaggcgcccgctgccgatattggttaacgtcgtggcgacaatatgggttaagccaccgtcaatcagcccccgattgaccagctcgccgttgaccgtcaaatggttctcgccagcgctgatttcgccttcctgacggttatccagctttgccgcatagagattgagcgcccggccggcgctgataaccccctgattaatcagccccagtccggagagattccactgcaggttgccgttggcgatgatcctcccggcgttatgaaacgcctgacgcaacgtgagcgacatatcgctctgagagagcacctcgccatcgccgctgagggaatcggcatcgaggctaagtttgctcgcggcaagtaacgtcccgcccgtattagccagcgccaggttgacgcctgctatttccagagcggcggcggagacgatctgcccctgtcggttatccagcctccggttgtggatggtgatattgagattaccgccggactgcagttctccctgccggttatcaacggtggcgctctgaatacccagggcatcaaaggcggtaattgtgccctgctgattatccagcaaaccgctcgtcgtcaggttgacgctgccccgctgcgccgtgcctacctgcccgtgacgattattaagattttcagcctgtagccggatgtcgccgctggcgatgatattcccctgcgagttattcaccccatggcgcgcagtgagctgaacgtcgccctgcgccgcgctgatttttccgccatggttggtcagattgtcggcgtcaagcttgatattgccatttgcggtaagcacgccttcgcggttatccagcccttcttcagcgctcatggccaggtcgccctgcgccgcaatcaattgcccctgctggttccgaaggctggccacttgtagagaaaggctgccgccagcaacgatattcccttgcgaattttccagctcgtgacgcgtagtgagctgagcattgccctgcgtcgtgctgattttaccgctgcgattattaatgttatcggagtgcaaaacgatattgccgttagcggcaatagtgccttcgccgttgtccagcgcgccttcgctggtaatagacatgccgccgctgccggtatgcagcagcgttccgttttgattgagcaactggctggtgctgagcgtcaaagcatggctgttgctggcaatctcaccgccgcggttatccaatcccgcacgaaaatcaaggcgtagatcgtcctcgcccgtctgctggattacgccctgttggttatccagcgccattgctttcagctcaagcttgctggccgtcaacaggccactgtggttgttgagtttgccgctggcggccaactggagtttttcgctggccgccaccaccgcatctcgggtggtgatatcgccggacgcggcgctgaccacgatccgcgcccccgaggttcgactgttatcaagatccaccgtcctgccctgcgccgtcagcattcctgccgccatattgcggccattcagcgccagcgagctctggctattcagcgtcagcgcgccgctgctggcggtagaaccatcgctatttaatccggcggcgagcgtactgttttgcgcgctacgcaaagcgttggcggcaatccgcgtatcgccttgcgcggcaatcatgccgtcattggttagcgtcgcgctggccgtcaccacgctatcttttccggcgtacagctggccctggttgtgaagatcgcccttaacggacagttgcagattctgcgcggactgaatcacgccgcggttgctgagcgcgccatcagcgctgattgctacgtcccccgccgccgcgccgatattgccggcattgtgaacgcctacgccgcgctcggtaccgacaagacgaattttatgggcgtacatcccgcccagcgcgctgacgtcgatcgccaccgcaggcagcgcactgccgtcggctgattttgccgtcgtccggctgtgcgccgcatcgatctgattacgccctgcggtgacctttagctcctgcgcccaaaccccggcgttgattttcaccgcgcgggcgagcaggtcggtgctgtctaccgagctcgcatcaaggccgccgccctgtacgagaatttcgccgcgattgacatcataaccgctaatctgcccgttaccgtactgtacctggcctgtcgtcagcgtcgcgcggttggcattgatgaacccgcagccgtcgcagctaattccggcagggttagcgataaccacctgcgctttttgtccggcaacctcgatatagccattcagccggctcggatcgcgggtattcacctcgttgaggatcactctggcttcccctttcgccagattcgggttcccggcgaccatcccggccaggtggggtgaagtgttagcacggctgttattcagcaccacgccgcgcccatcgacgtcaaactggctgtaaacgttgcgtgaaacgcctgcgccgctcggtgtctgaatattgacctgcggcgtgccattggcgctcttggcgatctgcggttgctggccgcctggcgcatggttatcggcgacaatcgccgcctgagccgaggtaagacaggaaaaagcgagcagaaagctaaaggccagcggcgccagggaggagattaacgtcgacccggttcgcgcgtcggcgccggattgcggcgatacgccagcccgatgagagcgggtcgtttccgccaccaccatcagcatcccgcgagccttattaaatacgattcgataaaagcgtttattcattgccgttactcgtcatccgttgtccaccgcggcgcggaagatcgtccatgtgcgcagcacgcgccgccgggcggcgcgtgagtgaaagtcagtagctccagctgacgctgaaaccaaaagttgccggatcggttttaaagccatcgggtttggctaaagggataccggcgaacaggtcgtagctggcgcggtggtactggccgcgcagccctgccacgcccccggcgaggtgtttgcccaccagcgtttcactgcctgcgccgccgacttcgccgtaatccgcccccagataaaactcctgccccggcaacggagtcgaccaggcgatatcgttacgtacgtaccagccgtgactggcggtcagggtgcgctcgccgtcgaagccgcgtaccgtccagcgattgccgatggaaaacatatccggcgaagtcagcgtcgtgctgctcatctgccgctgatagcggctggtaaagcgaaaattttggccgcccagggcaaaaggcaaattgagctgagcattgaattgcaggattttgctgagggcggttgcttccccccattgctcttccggcgcgggctgagcgccaaaccagcgggtaccgcgctgatagctcactccggcatcgagagtggcgttgcccaggtaatggcgatgctgcagaccaagcttccaggccgccgtttgccgccgctgaacggcaatctcggtgtcgttaatgaagttgcgctgctcgcgggctaacacatcggcgctaagcgtggtcttctgactaccgctacggtgcagtacgcggctcatctggaaatcaacgttcttgcttttaccgctgtactggtaatcgccgttggcccccgccacggtttgcacgtaatcgtactggctggcggttaatccgaactgccagtaacccagcgggaccgaatagtgaccggtcaggttctttgaggatttaccgccgttgccatcgaggttatgtgagccggaaaggtaaaaaagatcgcttaaggctaacgggttatccagggacaacgtcaggttaccctgatagcggccggtggcattagagccggaatcatcgagcgaggcgtcaacgcgccagaagcgttcctgttggcggttaatgacaatatcgctttgcccaggcgtttcgcccggaacaatttccatgctggcctgtaccgtcggcagacgctgcaagttttccagcccctgctcaatatcgcgcaggtccagtagtttcccgtcggtcgccggaaacgcgctcgccagccatagataatcatcgctgtcctgcgtaagcctggcttcacggatataacccggcatcaccaccaggcgcaaaacaccgctttttaaatcctgctgcggggcaaggatccggctggtgatataaccgcgatcgattaatatattctgcaactgggccatcagtagattaatgcccttccctcccagacaacgcccaaccgctttatttgcctggcgctggagcggaagccaatgcggtaaggcatcggcgccctgtaaaataatctgtgaaatagcaaagcaaggttgttccacgggaaataaaccatcatcggtatttatttctcccactgataaatgaatatccggtgacggcggcgcgagctggttttccagcgcctgctggcgctgctgctggttgatgaactgctgctcacgtacggtatccacaggcgcagcccatgcccaggcaggcaatatacagataattaaaactttatgaatgaaagtccatttattcattataattaagtcacaacgttccatctcgagtaatagaaagcaaagcgtggcaattaatacaaccaaacccatgttaatatcaacatatattattcaagccacttcaaaaaatattacttaaaattataaacgcgttcattaccccagtttcatgatatggatgaatcaccgttaagttctgccgaagacaatatgaaatcatcatgaaataagtatatgagattatgaattaatatcgattcacactgagagcattagcgcgacctctttttacgttctgccgctcccccatcgcactgggttgaaatatgccgtgatctcaatcacataattatctcttgttcacttgatggccaaccgcttatttcagctagcgaccgcttaaccttccatacaaccactcaccgatttacccaactttacgcgcgcgctgttctggcaagatcggaggcagcctagctaatcaatacctccatcaacccttacttaaaaccagacggcttcggccaattattcatctaattaacgccaggttttactatggataccaaaaaactattcaagcacataccctgggtgattctcggaatcatcggggcattttgcctctcagtcgtcgcgttgcgccgcggtgagcacgtcagcgccctgtggatcgtcgtcgcgtcggtttccgtgtacctcgtcgcctaccgttattacagcctgtacatcgcgcagaaggtgatgaagcttgacccgacgcgctccacgccggcggtcattaataacgatggcctgaactatgtgccaaccaaccgctacgtgctgtttggccaccactttgccgcgatcgccggcgccggcccgctggttggcccggtactggccgcgcaaatgggttatctgccgggtaccctgtggctgctggccggcgtggtgctggcgggcgcggtacaggacttcatggtgctgtttatctcctcgcggcgtaacggcgcctcgctgggcgagatgattaaacaggagatggggccggttccgggctctatcgccctgttcggctgcttcctgattatgatcatcatcctcgcggtgctggcgctcatcgtggtgaaagcgctggcggaaagcccgtggggcgtgtttaccgtctgctcgacggtgcctatcgccctgtttatggggatctacatgcgcttcctgcgcccaggccgcgtcggtgaagtgtcggttatcggtatcgtgctgctggtggcctctatctggttcggcggcgtgattgcccacgacccgtactggggcccggcgctgacctttaaagacaccaccatcacctttaccctgattggctacgcgtttatttccgcgctgctgccggtatggctgattctggcgccgcgtgactatctggccaccttcctgaaaatcggcgtgatcgtcggcctggcgctggggatcgttatccttaacccggacctgaaaatgccggcggtgacccagtacattgatggtaccggtccgctgtggaaaggcgcgctgttcccgttcctgtttatcaccatcgcctgcggcgcggtctccggcttccacgcgctgatcgcctccggcaccacgccgaagctgctggccaacgaaaccgatgcccgctttatcggctacggcgcgatgctgatggaatcctttgttgcagtcatggcgctggttgcggcctcgattatcgaaccgggcctttatttcgcgatgaacaccccgccggcgggcctgggcatcgtcatgccgaacctgcatgaaatgggcggtgaaaacgcggcgatgatcgcagcgcagttgaaagaagtcaccgtccacgcggcggcgaccgtcagctcctggggctttgtgatttcacctgagcagatcctgcagacggcgaaagatatcggcgaaccttcggtactgaaccgcgctggcggcgcgccgacgctggccgtcggtatcgcccacgtattccataaaatcatcccgatggcggatatgggcttctggtaccacttcggtatcctgtttgaagcgctgtttatcctcaccgcgctggatgcgggtacccgcgcaggccgctttatgctgcaggatctgttgggtaacttcgtgccgttcctgaaaaaaaccgactcgctggtcgccgggattatcggtaccgccggctgcgtcgggctgtggggctacctgctgtatcagggcgtggtcgacccgctgggcggcgtgaagagcctgtggccgctgttcgggatctctaaccagatgctggccgccgtggcgctggtgcttggcaccgtggtgctggtcaagatgcagcgcaccaaatatatctgggtcaccgttatcccggcggcatggctgctgctgtgcaccacctgggcgctgggcctgaagctgttcagcagcaacccgcagatggaaggcttcttctttatggctcagcagtataaagagaagattgccgccggcggcgagctgaccgcgcagcagatcgccaacatgaaccatatcgtggtcaacaactacaccaacgccggcctgagtattctgttcctggtggtggtgtatagcatcatcttctacggcatcaaaacctggctcaatgtccgcaacaataaggtgcgtaccgacaaagagactccgtatgtgccggtaccggaaggcggcgtgaagacctcgtcacatcattaaccctgatgccggatagcgctacgcgtatccggcctaccaaaagcgcattaacgtaggccggatatggcgctagccgccatccggctttattcgttatctggaacttataatgtttggtaacttaggtcaggcaaaaaaatatctcggtcaggcggcaaaaatgctgattggcattccggattacgacaactacgtcacgcatatgcaaaccaaccatccggatcagccgtacatgacttatgaagaattcttccgcgaacgccagcaggcccgctacggcggcgacggcaaaggcggcgtacgctgctgttaatggaggcaataatggcaccgattgcagtcaccctactcaccggttttctcggcgcaggaaaaaccaccctcctgcgccatatcctcaatgagcagcacggtttcaaaatcgccgtaattgaaaacgaattcggcgaagtctccgttgacgatcagctcatcggcgaccgcgccacgcagattaaaaccctgaccaacggctgtatctgctgtacacgctccaacgaactggaagacgccctgctcgatctcctcgacagtcgcgatcgcggcgaaatcgagtttgaccggctggtgattgaatgcaccggcatggccgacccggggccgattatccagacctttttctcccatcaggtgctctgcgagcgctatctgctggacggcgtgatcgccctggtggacgccgtccatgccgaccagcagatggatcagttcaccatcgcccagtcgcaggtcggctacgcggaccggatcctgttaaccaaaaccgacgtcgccggcgacaccgaaaagctgcgtgaacggctggcgcgcattaacgcgcgggcgccgatttataccgtcattcacggcgatatcgatttaagccagttgtttaacaccagcggttttatgctggaagagaaggttgtcagcgccacaccgcgctttcattttgtggcagaaaaacagaatgacgtctcgtcgattgtggtcgagctcgactatccggtggatatcagtgaagtttcacgggtaatggaaaatctgctgctctccttcgccgagcaattgatgcgttataaaggcatgctgtggatcgacggcgagccaaatcgcctgctgttccagggcgtgcagcgcctctacagcgccgactgggatcgcccgtggggcgatgaaacgccgcacagcacgctggtgtttatcggcattcagttgccggaagaggaaattcgcgcggcgtttgccgggttacgacgctaacctgcccgcctgcgccctaaggcgcaggcccccttctctctgagacctcgtcaaaaacagggaccaaacgtcggcagcgcgtcgaaaaatgtaaagcaacgttttaataagtaacagtagaaacatttttggaaattataagaaactgaatgaataggccccttaataattaatgactgctctgttcagtttctgtttagcccaccaattaaaccacggctaaacaggctaaatttgctgattgacctcgccgtaacccaacgtcattacaacattttcaaaacaccttcctgacaaaactagcataaaaaatcgacgcaagtcacatttgcagaggtaaacatcgcttgttaaggtgccctcagacaactttattgacgaggagtaaaccatgagaaagcttaacatccttattcttgcagccctgaccgcggtctctggttccgccatggcggtggggtttaccgttgaacagggtaaaaacttcactaatctgaatatggaaatgggtaaatcctcttctggcctgtacgccgaaagccactggctgaagaataccgatgatggtagccagaccggcggcgtgggcgcgggttacaacctggaagtgggcccggtgatgctcaacgccggcgcgaaagccatctacctcgggccgaaaaaaggcgataacggcgtcgcgtttccggtcggcggcggagtgaacgtggccctgaccgacagcatccacgtgtttggcgaagggtatgtcgcgccggatggtctgaacaacagcgtgaaaaactatgttgaagcgaacggcggcgtgagctggtctccgattggtccagtgacgttgaaagtgggttaccgccatgtgagcgttgacggtaaagagggtcgcccgaaccacaccctgattgatggcgcctatgtgggcggcggggtcaccttctgattatggtcaacgccccgcgataaagttaaggtgcgctgagcattagccataaaaaaacctgccgaatggcaggtttttttatggccgggtcataggcttagcggcgcaccaccaccagcttctggttcacaaactctttgatgccgagatcggagagctcccgtccgtaaccggaacgcttcacgccgccaaacggcagctccggcgcggtatcggtgagccagttgatataaaccattccggtttcaatggcggaggccatccgtttggcgcgttcgatatcctgactgaacaccgcgccgcccagaccatagtgggaatcattggccagctggattgcctcctcatcgtttttcaccacgtagatctgcgccaccgggccaaagaactcttcgaagtacgccggattatcacgggtgataccggtcaaaatggtgggttcaaagaaattgccttctcgagccaccgctttgccgcccagatgcagcttagcgccatttttcaccgcctcgtccacctgtttgcttagggtatccagcgcatctttggaagagagcggccccagcgtggtgctttcatccagcggatcgccgattttcacctggcgaaacgcctcgctaaattttgtcaggaacgcatccgcgatattttcgtgcaggataaagcgcttggcagcggtacacacctggccggcgttgttcagccgcgcctggacgccgattttcaccgcgcgctccaggtcggcatcgtccagcacgacaaacacatcattgccgcccagttccagcgttgatttcttaatatgcttcgccgcctgcgccgccaccacgctgccggctttctccgaccccgttagcgccgcgccctgcacgcgatcgtcagcgataatcttcgccacctgatcctggtagataaacaggttggtccacgccccctccggagcgccggcctcacgcaccagatgggcaaaggtctccgcgcagtgcggcacaatgctggcgtgtttggcgataaccgggttaccggccgccaggtttggcgccaggacgcgcatcagttggtaataggggaagttccacggctccaccgccagtaagacgccaatgggatggtgctcaacccaggcttcacccagttcggagggatacttcaccggcgccaggaacgatttggcgttatcggcgtaatagcgggcgatctgcgcgcaaagtttcacttcgccgcggctctgcttaatgagtttccccatctcctggctagcgatttttgccagctcctccgcccggctatcgatcagatccgccagcttatgcagtaccgccagccgcggttcaatatcgccttttgcccaggcagaatggtagagcgcatccgcctgctgcagcgccgcctccacatccgcatcgctgtgcgccgggtacgttttaataagctgattgttcgcaggattcaccgtctgataggccatatcgcatgtctccttgttatcgctactaaggcagtcaaaaatgccgttaaagatattaagggtagtcgagatggctggcgatgcgggtaaagttaggtatatccggaatattccataacgaggctaaccggggcgaccgtcaggccgccccggcgttatcaatgcgccagcgcggcgatctcgtcggcggtcaggccggtgattttcaccaccgtctcgcgggcaatgccgtcagccagcatcctctgggcaatgcgcagcgcctcggcatgctgtccttcttgtctgccttcttgtctgccttcaagccggccttcccgtttgccttttctgcggcccacttcctgtaatctttcagcaatagtcatcaatctctccctgtgctgaggaacccgttgcgccacttcgtggataaaccggccaaagcggcgcgcgttgccagtctgcagcagataattaaacagcgtttttagctgtctgtcattagcgtccccgctaagtaaaatcgtcgtcagttgctcaacaatgcccattaaatcgcgctggcgaatatgcttctgtatcagctcgagtaatgccacgcgccggtggcgaacgatctcatcgtcggggatcaccgtgacatccaccagcggaaagggcgagatataaagctcactcgccagctgtggatcggcaaaacagtccagccagttgagtgaccacgggtatggcgtggtcgctccgtgatagaacagcatcggcaccaccagcggcagttttgtatgaccgccatcaagatggcgctgcatcgcggcgatggcgtagcgcatcaggcggaaggccatctgcgcatccggcgagctctgatgttcgataaccacataaatgtagccctcgccagacgcggttttgagtgaccacagcacatcggagtaccaggcccgcaggctctcctcgataaagcttgccgactccagctgtaaggtatcgaggtcgcagcgctgacgcagcgcaggcggtagatggatcgccagaaaatcgcgcgcggtgtcggcctgagtgaggaactgtttaaacaccgcatcatgcggcgtcgaggtggtgccctttgccatcggctcatccctgcctgcttatcctgcagggactctacatcccatgaatgtctctggcaccccggaaaccgggattttacattccgctacgaaaacatatttccccggactgcaagcgtgacatcctttttcgacgcggtacgcaaatccaggcgggcgacagcctcggcgcagcatgctataaacggcttatccccgcagcaaaggccaaagcagtgaaccatacccgagatatcccccaaaccttctggcgagacgatcgtctgccgtggctggagctgcgcagcacccggcgcagccgccgggcctataagcgccacagccacccccagctttccgtaggggcgattatcgagggggaaacgcgctgcctgtgcgctggccaggagtacctgctacagcccggggatctgatcgtgatcccgccgcacgcgccgcatagctgtaatccgctgcatggcaggccgcgcagctatcacatgctttacctggacgcgacatggtgccacgcgcagcgcccggatattccccctggcgccagtatcacctcgccgcagccgctgctgcgcgacagccctctctttgccagtttccagcaggttgtcgccctgatgagccgcgggagccttgaacaactgcccgcccggctggcgcaactcctgcacgcgctgccgctgtgcgccgccgcgccgcaggcgccacatcacgccagcgccctgctgtttcagcgcctggcgatggatctgccggcgtcgccgtcgctggataagcgggcccacgacagcgcgcttcgtaaagagaccgttatccgcgccgtgaaacaagataccggcctgacgcctgccagtttgatcaacatggcgcgcatcgaatatgcgaaaacgcgcttacgcgccggggatcctatcgccgacgttggctatcaggctggctttgccgatcagagccatttccataaaacctttgtcagctataccgccgccacgccgcggcagtatgcgcaaagcagatcaatatctgacaataagtaatacgccacctggcgtagggtggcctctgcaccattatcgaggccactatgcataccttatcgacgctctttcccgccgtcttcccggcgctagccctgtcccactttgtcgctctgctccgtccgggccctgatttttttctgctgatcggctacgccgtgcgctaccggatccgcggcagcatcggattgtgtctcggcatcgccgcaggcaatgcgctgtatattgtgctcgccatcgtcggctgggggcttctgcgccaggcgccgctgctttttttgctcatcgagctgctgggggcgggctatttattgtggattggcagcctgctgatacgcagccgtcccgcgacgctggcgatggagagcgttcgcgcagcgcgtccggggttcggcaggcagctgctgctggggctggggtcatcgctgctcaaccccaaaaacgccctgttttatctggcgctgatgacttccctgctcgggccggctgtgaccctgcttcagcaaacggtgagcgggctgtggatggtcagcgtggtgttcttctgggatttactgctggtgagcgcgattgcgctgccgcagatacagcgccgcctgggcgccatcgtctggcgagtcgagcgggcggcgggggcgatcctgatgctcttcggcctggggattatctggcgatttttgcacgacctcgccgtcaggctatatgcttaagcatatggaaaaactcgctgaactgaaacgcgccaaactgctggcgctgtcgctgctgctgattgcagccgccatttttatcactaccctcgcgctaccaccgtcgccctgggtcggtgcgctaaaagctatttccgaagcggcgatggtcggggcgctggccgactggtttgcggtcgtggctctgtttcgccgtattccgctgccctttgtcgcccgccatacggcgattattccgcgcaataaagaccgcatcgccgacaacctcggccgctttgtcgaggaaaagttccttgataccccgtcgctggtcgcgctgatccgccgctatcagccagccctgatgctcggcaactggttcagccagccggagaacgcccgacgggtcggccagcacctgctgcaggtgatgagcggttttctcgaactgaccgatgacgcgcgcattcaacgtctgctgcgacgcgcggtgcataaggctatcgataaggtcgacctgacgcagaccagcgccatgatgctggagggactgacccgcgacaatcgccatcaaaagctgctcgattcgctgatgaaccaactgatcgccctgctgcagcgcgacagctcccgcgcctttatcgcccgcggcatcgtacactggctggagaccgaacacccgctgaaggccaaactcctacccaccgagtggctcggcgagcacagcgctgagatggtcaccgacgcggtgaataccctgctggacgaggtgactcacgaccgtacgcatcagatccgtcagacttttgaccgcgccgtgcaaaagcttatcgataacctgaaatccgacccggatatggcgcagaaggccgataacatcaaagcctggctaaaaaatgatgagacctttaaccactatcttggcgaagtatggggcgacctgcgcggctgggtaaaaaacgatatcagcagcgacgactcacgtattaagcagcgcatcgccgaggcggggcagtggttcggtgaaaccttactccgcgacgacgcgctgcgcgaatcgcttaacgaacacctggagcaggcggcgcaccgggtggcgccggagttcgccgccttcctcacccgccatatcagcgacacagtgaagagctgggacgcccgcgatatgtcgcggcagatcgagctcaatatcggtaaagatctgcagttcatccgcatcaacggtaccctggtggggggaaccatcggcctgttgttgtggctgctctcgcagatcccctcgctgctgcatctgcatattggttagcaatgatactatccgaacaatagcgctgataaatattccacagggagggcgaaatgatgcacaggatttcccactggctgagccgacacgccgccgcgctgttcttcccggcggcgttaattctgtatgatttttccgcttatctcactaccgatctgatccagccggggatcctgcacgtggtgcgggatttcaatgctgatgtggcgctggctccggcctcggtgagtctgtatatggccggcggcatggcgctacagtggctgctggggccgctctctgaccggataggacggcgtccggtgctgctcaccggcgcgctgattttcaccctcgcatgcctggcgaccctgttcaccacctccatgacgcagttcctgattgcccgcttcgtgcagggcaccagcatctgctttatcgccaccgtcggctacgtcaccgtacaggaggcctttgaggaaaaaagatcgatcagactgatggcggtgatcacctccgtcgtgctggtggcgccgatcgtcggcccgctctccggcgcggcgctgatgcatttcattcactggaaagcgctgttcggcattatcgccgccatgggattggtggcctggctcggcctgctgttgaccatgccggagacggtgcgccgcggcgatgtgccgttcagccccctgggcgtgctgcgcgattttcgcaacgtctttcgcaaccgcatctttttactcggcgccgccacgctgtcgctgagctatattccgctgatgagctgggtggcggtatcgccagtgattttaatggacgccggcggactgaccaccagcgagttcgcctggagccaggtgccggtcttcagcgccgttatcatcgccaacctgtcggtggcgcgctgggtaaaagaccctacccgcccgcgctttgtcctcagcgcggtgccggtacagatgctcggcctggccatcctgatcgttggcaatctggtatggccccacgtctggctgtggtcggtgctcggcacctgcttctacgccttcggcatcgggctgattttcccgacgctgtttcgctttaccctcttttccaacgacctgccgaaaggcacggtctccgcctcgctgaatatcgtgatcctcagcgtcagcgcgttatcaattgaaggcgcgcgctggctgtggttccatggcggcagactccccttccacctgttggcggtggccgccgggattgtcgccgcctgctgcctggccggactgttacgccaccagcgcggacaagcggtgatcgaagcccggcagtcgtgagcccttttacggagaaagccccatcatgaatgacattgaactcagccaggcgcagcgcgacctgctgcgcgacaagctcagcaagtactgcgcagagaccttcgacctcgaactggagcagtttgacgccgaatttttcgtcgactttatcgccaaagagctggggccgctgttttacaacgccggtatcgaagaggccatccgcacccatcaggcgtggagcgagcgtatccaggaagagatggatttgaaaaaggtctattaacaccgcgtacagacgcaggagatcaataaaaccctgcatacaccatggctataatggcgactctttcagcatctcccgtgtacggggaaggaaaaccatgtcgcttatcaccgatctacccgccatttttgaccagttctcagaagctcgccagaagggctttctcaccgtcatggatcttaaagagcagaacgtaccgctggtgggcacttactgcacctttatgccccaggagatcgccatggcggcgggcgccgttgtcgtctcgctgtgctcaacctccgatgaaaccatcgaggaagcggaaaaagatctcccgcgcaacctctgcccgcttatcaaaagcagctacggcttcggcaaaaccgataaatgtccctacttctatttctctgacctggtggttggggaaaccacctgcgacggcaaaaagaaaatgtatgagtacatggccgagttcaaggcggtccacgtcatgcagttgccgaacagcgccagcgatgccgcctcgcgcgcactgtggaaaacggagatcctgcgcctgcagcaggtgattgaggcccggtttggcacgccgattagcgaggcggcgctgcgcgaagccatcgtgttgaaaaatcgcgagcgccgggcgctggcccacttttatcgtctcgggcagctcaatccgccggcgctcagcggcggcgacatcctgaaagtggtgtacggcgccacttttcgtttcgacaaaaccgccctgattgatgaactgcatgccatggcggagcgcatccatcaggagtggcagcagggtaaacggctggaacctcgtccgcggatcctgatcaccggctgcccgatcggcggcgcggcggaaaaagtggtccgcgccatcgaggaaaacggcggctgggtggtcggctatgagaactgcaccggcgcgaaagcgaccgagcgctgcgtggcggaagagggcgacgtctacgacgccttaaccgataaatatctcgccatcggctgctcctgtatctcccccaacgaccagcgtctgcagctgctgagccagatggtggaggagtatcaggccgacggggtgatcgacgtcattttgcaggcctgccatacctatgccgtggaatcgctggcgattaaacgccatctgcgccaacggcacgatcttccgtacatggcgattgaaaccgactattcgacagcggacctcggccagctcagcacccgcgtcgcggcctttatcgaaatgctgtaaggagctggcgtgaactatacggttggcattgattccggctccaccgccacaaaaggcatcctactggcggacggcgtcatcgtgcgccgcttcctctgccccaccccctttcgccccgccgacgccatccacgaggcctgggagacactgcgcgctggcctcacggagacgccttttttaaccctcaccggctatggccgccagctggtggattttgccgataagcaggtgacggagatctcttgtcacggcctcggcgcccgcctgctggcgccggacacccgcacggtgattgatatcggcggccaggacagcaaagttatccagctggacgccgggggaaacctcagcgacttcctgatgaatgacaaatgcgccgccggcaccggccgctttctggaagtcatttcacgcaccctcggcgccagcgtcgaacaactggacgccattaccgacggcgtggaaccgcacgccattaccagtatgtgcacggtgtttgccgaatcggaggtcattagcctgcggtcggccggtgtcgcgccggaggcgattctggcgggggtgattaacgccatggcccggcgcagcgcgaactttatcggccgcttatcggcgcaggggccgctgctgtttaccggcggcgtcagccactgcgccgcctttgcccggatgctggaaagccatgtcggcatggcggtgacaacccatcccgacgcccagtttgccggggcgatcggcgcggcgctgatcggccagcgccagcggaggcgcggatgacaacgtttctgtttttatttcactccacggtgggggtggttcggatgcgcaaagccatgcaggcggcgggagtagccttcgaggtcaaagatataccccgccagctgcgcagcggctgcgggctgtgcatcctgctggaggggacggaagccgatgcgcgaggctggatcgtcccggaacagacggcggcgctgtatcagcagaacggggaagcatggcgctgtctcgccaccttcccacctgcagattaatcgctcaccacaaagcgcgtcgccgcgaaacagttcagcaggcggtgcatgagaaaaaccagggtcagcgtcaccaccagcgagaccgtcaccgaggtgatgcggtacagatcgctgaacaccagatcctgatacggatgcaggttctggccgaacataatgccgatggtagtgatgctggcgaagcccaccccggcgcccactttctccatcacgtggaggcgggcgctgaaggccagcccgagaccaatcagcggcatcatcaggatcatgtggttgctgaaatcatagataatcagctgcaccaccagtatatagagacaggccagcaccaccccgacgacgcgccagatcgagctgatcaccgccccacgatagtgcatcgggaacaggatcaggatcccggccatcagcgccgacagcgagtcgctgagatcgcagatctgaaacaccacaaagatgatcgtcgctaccgtaccggagagcagcgactcatgacggatgcgggcggcgtctttctcaatccgcggcggcggcttgcgcggttcgacgtccgggatcaggtaatgcagcagcgcgctcagcgccacggccatcacgcaggcttccatattggagaacatcagggtgtgccagttgctggtgggatagctcataaagttgagcatcgtgctctggcacaccacccccatcgatcccaacaggaacagcggtccctggctcataaagcggaaacgcatcacgtacagggcaaacaccaccagggtcatgatcaccggccactgcgacaaatagccgacaattagcaccatttcgacacagtttaccgccgcgctaaatataaactggcgggcgacgtgcaggttgaacatcggtaccagcgacatcagcatcagcggataaacgacgaaaaatacgccgtactgtacgtcgtagaaggtggagatgctgagcgcaatggtcccggccacggcgatacgcaccgtctggcgaaaatcattcgccgtgtagacgatattgccgtgcggcgtaaagacgtgcgccagggtattaatagacatagtgcaaccagctcaccaggtggatctgcaggccggcgaaggtgcgggcgaaaggtccctcgctattgtacagctgcaccgtggcgcgagcgccggtcggcagcggtttgtccagcggctgatccagcgcgacgtgaatgcgcatccgctgggcgtcgcgcacccagcgggtggactgctcgggctgcgacagctggccgttcaccgcctcctgtcccgccagaatcccggcgtcgctgctggtcacgtgcgccgggaagacttgacccggcagggcgtcaaagaccaccgccgcatcggtattcaccgcggtgtggcgcaggcttttttcgcggaagtcggcgacgatgtcagtgttgttgttaaccaatgccagcacagccgtcgccgcggtggcgtagatccccgggttcagctgcaggttgctgaccatgccgtcagtttccgcacgcactttggtccaggccaggttcagctgcgcctcctccagcgcattgcggtatttttgcagggtgacgttgcgcttatcgtcgcgctcgccgcgctggatcagcaggttctggatctgcgcgttcagcgccgagaccgactgctcgctggtctgccaggtggttcgcaccttatcgaggtcggactgcgagacgttctgcatcgtactcaagcgctggtagcgatcgagcgtgaccttatcgttacgcgcggtgtactgcgcggtgcgcaggttggcgcgggcggcggcgatttgcgcgtccagctgctggttgctcagtttcgcctgctcgagggcgatctgcgccgcttcaactttattaatgaatggcgttgggtcgagctcatacagcaggtcgccctttttcacctggctgttgttgtgcacgtagacgtgcgagacatagccggagacccgcgacgaaaccggggtcaccacgcgcatgacggtggagtccggcgtcagcgggatccagatatcggcaacgataaaccaggcgaatattcccagaaaagcggcaatactcacccgtacccagcgggcaaatttttgttcaggcgtcatcatagtgtgttagatcttgttatcttcttcgcggatattccgcaaacggcaggcgatttgatttaacggggcgctgaaggtggcgagatcggcctccgggatggtctgggttacgcgctcctgataggtctcgatcacgcagctcagtttttccagaatagcccgcccctcagcggtcagcgtcagcaggcgaatgcgtttgtcatatggcgatgtggaacgcatcagatagccctgcttttccagtaatgagagggtgcgcattagcggcggcagttcaatgccctgcacctccgccagttcgctgaccgagacgttgtctcccagctgatgcagttgcatcagcaccgtccagctggactgggtgagtccggtatcggtgatagcggagtcaataatggcgcgccactggcgcaccaccatagccatccgcatccccagcgggcggcgggcaaacagttcgtcttcagtcacgggtcttcctctcattattgagaagaaaataatacttatcagggtaagtatcaagaaacggaagctcgtgccgcatcaattgataaatttcgtgaatgtatcccggcggcactttgcgctcaccgggataatgaagaaggtttgcctgtaaaaaactgcacgttttaattgatctggtcccgacgcaggccgatatctttcagctgttcgtcgctcatttgctgcaaaactctgcgcgtttgctgctgaagccaccattttttgataaaccgcaccagcaatacgaaaccgataaatgtctgtcttgccctgttctcgtgaaattccatcctctacctcctcaccttgccagaggctttatcttcacggatttgggggtaaggaatacagattcacaaaacgcttttctttaacatacagattagctaaaacgtacaccagagcccaatttttacgcccatctgtactggttattccatctgtatggcggcaattaaggatacagcatgacccgctaccaacatctcgctacgctgctggccgaacgcatcgaacagggcctgtatcgccatggcgaaaagctgccgtcggtgcgcagcctgagccaggagcacggcgtcagcatcagcaccgtccagcaggcctatcagctgcttgagcagcagcaaatgattgtgccgcagccgcgatcgggctatttcgtcgccccgcgcaaagcccagccgccggtgccgccgatgtcgcgtccggtccagcgcccggtggagatcacccagtgggatcaggtgctgaccatgcttgacgcccgctacgataaatcgatcatccccttcggcggcggctcgccggacgtgacgcagccaagcctgaagcccatctggcgtgaactgagccgggctatccagcacaacctcactgaggtgttgaactatgacgaactggccgggcgtcgcgagctacgggagcagatcgcccgcctgatgctcgacggcggatcggtggtaactgccgacgatctggtgctcaccagcggctgccacagcgcgctgtcgctggccctgctgtcggtgtgccagccaggggacatcatcgccgtggaatccccctgctactacggcaccatgcagatgctgcgcgggctgggattaaagacgattgagatccccaccgatccggaaaccgggatcagcatcgaggccctggagctggcgctggatcagtggccgatcaaaggggtgatcctcgtgccaaactgcaataacccgctgggctttatcatgccggacgcccgcaagcgcgcggtgctgaaccttgcccaacgctacgatatcgttattttcgaggatgatatttacggcgagctggccaccgaatacccgcgcccgcgcacgatccactcctgggatatcgacggccgggtgatgctctgcagctcctttaccaaaaccatcgcccccgggctgcgtatcggctggatcgcccccgggcgctactacgacaagctgctacagatgaagtacgccgccagcgggaccaacgtcccctccactcagctggcggcctgcaattttattcgcgaaggccactaccaccgccacgtgcggcggatgcggcagatctatcagcgcaatatcgagatctacacctgctggctgcgggaatttttcccctgcgggatctgcgtcacccggccgaagggcggttttatgctgtgggttgagctcccggagcaggtagatatggtctgcgtcgccaagcagctgtgccggctgaagatccaggtcgcgccgggctcgctgttttcggcagcgggcaagtatcgcaactgcgtcaggatcaactgcgccctgccgccgaccgaaaaacataaagcggtgatggtgaagctgggagaagcggtgaaggtggcgatggagtgaatttaacctgttctccccggtggcgctgcgcttaccggggctacgggtgatctaacgtctgcgtagcagcttcactgatcaaaaaacaccattcccttatacggctgctcgcggcaggcggccagacgctgggcgagactgccgacgtgcagctccagcttatggccatcgggatcgaggaaatagtgcgaggcaccttcgctacggttcagcttccagatcgccacgccggcagcctcaaggcgggcggcgaagctagcaaaatcggcttcgctaatactaaacgcataatgggtgtagtcgctctcttccggcggagtaacgcgccgctgcggatccagcgacaggcacagccacaaatcgccgcaggagagataagccccgctgtcccagcgggcatgcagcgtcatgcccagctgctgctgataaaacgccacgctcggcgccagctggctgactgccagggtcagatgattcagcccactcagcatgtctgttcctctagtgaattcacaatgaactgacgcagccattgatgcgccgggtcgcggtgccagcgctcgtgccacagcatcagcatctcaaagccggcgaccgccagcggcggctcgacgaccaccagcccgctctgcccgcgcaccagccgctccggcaggaccgccaccagatcgctattgcgcagggtctccagcataaacaggaaatgtggcacggaaaggacaacccgccgcatcagtccgaggttcgccagcgcgatatcggtcgccgcgctgaagccgcccccgtccggggagacgatcacgtgctccagctgacagaacgtttccaggctaagcccaggccgcagcgctggatgttccgcccggccagccagcacgtagcgttcgcgaaacagcaggcgctgatgcagccccggcggcgcgccctcgcgggtatgaaagaaaagatctactgtatcgctggccgcctgctgctccagccgcgccggctgcagttcgaataccgccagccgactgccgggagaggcctggcgtaacccagccagcatcggcaggaggatcgccgaggccatatagtccgtcgccgccacccgccaggtctccgccgccgtggccggatcaaaagggctgaccggcgccaccgcctgctccagcgcggctaacgcagcgcgcaacggctgacgaagctcatcggcgcgggcggtgggctgcatgccgcgcgggcccggcatcagtagcggatcggcgaaaatctcccgcagcctggcgagctgaatactcaccgagggctgcgacagattcagccgctgcgccgcccgggtaacgttgttttcgctaagcagcacatccagggtgcgcaacagattgagatccagacgctgtaaattaatcacgactataccgggaatttaagtaattaatttctactatagcgtcagctttcctactctgcagctctccatacgccagaggtgatattatgaaagtactgctgatttacgcccatccggaaccgcgctcgctcaatggcgcgctgaaaaatttcgccatccgccatctgcagcaggccgggcatgaagtgcaggtttccgatctctatgccatgcgctggaaggccgggtatgacgccgacgacagcggcgcgccgccggtcggcgagttctggcggccgaccctcgattccaaacaggccttttcccagggcacccaaagtgcggatatcgtagccgagcaggaaaagctgctgtgggccgatacagtgatttttcagttcccgctatggtggttctcgatgcccgccatcatgaagggctggatcgaccgggtgtacgcctggggctttgcctatggcgtcggcgagcacagcgaccgccactggggcgatcgctacggggaaggcactttcgtcggcaaacgggcgatgctgatcgtcaccgccggcggctgggcagaacactattcaccgcgcgggatcaatggccccatcgacgacatcctgttccccattcagcacggtatgctgttctatcccggctttgaggtgcttccgccgctggtgttctaccgcacggataaaaccgatgccgggcagttcgccgatcagtgcgccgccctggccgagcggctggacacgctgtggcaaaccgagcccattccattccgccggcagaatcatggcgattatctgatcccgtcgctgacgctgcgcccggagctggcgccagggcaaagcggcctggcggtgcatttgcgtagcgaataactggctatcccgtcttcgcccccgaggacgggtcatttacccggctctctccagtcccagcatgcctcgcgcctggataaagcacagcagcaatacgccccacagcgccatcgtcagataggggctgataccgaggatattgaacccactctcaataatctgcagcaggaacagcgcgagcaccatcccaacgatgcgcccgctaccgccatccggattcacgccgccaagcaccgccgcgaggatcgacaccagcaaatacgattccccataagatgctttggctgagttcagcttcgacatcatcagaaacgcagccaccgcgcagagcagggccgagatgacatatacccacatcaacacccgccgggtattgatcccggaataatgggtcgcccgttcgttggatccgatcaacatgatcgcccgacccagcgggcttttctccagcagcacccacagcccggccgccaccaccgcaaaaagccacattggcagcggaataccgaaccactgggcgtgattcagccacagcacccactgcggatagttagcgatggcgctgccgccggtgatcagaatatttatccctttgagcagggtcatcatgccaagggtagccaggatcggcgaaacgcggatcccggcgatcaatatcccgttgcacaggccaatgatcatcgccgcccctccgccggccagcagcgtcgccagcgcggtagcgcccccaggcggatagctcgtcgccacccaggccatcaccagcgagcaggcgttagccgtcgcgataattgacaaattaatgccgccgcaaagcatagtcatggccatcgccagcgccaggatccccagcaccggcatttgcgaggcaatcgactggaaattgctgacagaccagaagatgtttggcatggcgatgctaaaggcgataaccatcagcagcagcaggccgatcaggtaaaactcaacgttgttgcgccacgattttttcataacaagctccggttctgatgctggctccatgccgttacgctgatgctgacgacgatgatcgccccagtgatcagggtctgccagtaggaggagacccctagcaggttcaggccattctgcatcaccgccagtaaaatcacccccagcagcgtaccggtgagagttccgcgcccgccaatcaggctggtgccgcccagcaccaccgccgccagcaccgtcagctcatagcccagcagtgaatccggcgcaacggtcatcactgtccacgcctgcacgacacctgcggcccccgacattagccccatatagccataaacgaacagctgcaggcggagcacgctgaagccgacgcggctggcggattcccggttgccgcccatggcatagatcttgcggccaacggtggtgaaattcatgataaacgcggtcaacagcaccacggcgatcatcgtcagcagcggcagccccagaccgtaatcgtaaccatcggcatcggtatatttgaacagcataacccccttttcaaaccacggagggaagtcgtagagccagacacctttgcttaaccacagcagcaaaccgtagaaaatgttgagcgtagaaatggtgataatgatcgaggggacccgcagacgattaaccaacagcgcgttcaccagccccagcagcacgccgatgccgccggcaagcacaaaagccaccgcgaagttgccgcctactttttgcagcatcaccaccatgccgtactgggcgataatggtcatagccgggaaggagatatcaatcccgccggcgatcagcaccacgaacagaccacaggcgagaatggtcagcatcgcatagttattagcgaggtcgtaaagattgccgaaagtgaaaaattcctcactgcgccagcccagcagcaggcacagcgcagtaatgaacatgcctaaccagaattcatgtcgtttcaacagattagccattgaccacctccgctatctgctgctgggtactgctgtccggcaggaagctatgggtcaactcgccctgcttcatcaccaggatgcgatgactctggtaccacgcctcttcaatctcgtcgcaaatcatcagcacggcgataccatgggcagccaaatcgctgatgatatgatagatcccggctttgtttgcgatatccacccccccggttgggctatcgaggatcagcagcttaggagagatcgccagccatttggcgatagaaacgcgctgggcattaccaccggagagggtattcaccggcagatgcgtatccggcgccttaatggtcaacgcgttgaccattcttgcgaccagctgctgagctttactatcactcaatagtccgcaagcgcctttcactttatgaaacacggtgctgataatgttgttttcaatcgactgactcatcaccaggctgcgcgacatacggtcctcggagacatagccgataccgtggcggatagcgtcctgattgctacgcaaccgcaccggctggccatttatcaggatctcgccgctgtcagggcaggtcatgccgaaaaggctcaggcacagctctgttcgcccggcgcccaacaggccgactatcgacaccacttctccggcttcgaccttcagggagacgttatgatattcccccttgcggctgagattgcgcacctccagcaccggcgtactgccctgcccctgccacagatcgcgcacctgaaagtcaaactcctggcccgtcatcagaaaaccgagccggcgggtggttacctctgccgccggcaaggtgccgaccagattgccatccttcagcacgctgatgcggtccgatacggccatgacctcttccagacggtggcttacgaagacgatgcagatccccctctcacgcagctggcgcaccacatgcaataatccctccacttcctgatgggtcaatgaggccgtgggttcatccataatgataagccgggcatcctgcgccagcgcgcggcagatagccaccagttgacagcgagcgatggagagcgattccacggcggcatccagcggcagcgagacgttaatactgcgcatcgcctgctccgcactgcgtcgcagttcgctgcgcctcaccagcacgccgcgatgatagtggtttatagcaatgttctcccacacgctgagattgggaaacagcgacagatcctgataaatcacctggatcccatgggcgacagaggccgctggcgtcagtttgggccacgtcttgccgcccagcgtcatcgctgcgccctcatccgggcgatagacgccagagataattttgatcaacgtcgacttcccgcaaccgttctgcccggccaggcagtgcacttctccgggcataaagtcgatgctgatatcattgagcgcgcggttggcgtggaaggttttgctgacgtgtcgaagggaaaggaaaggttccatagcatcccctggctggttaagccggggcggctggcgccccggaaggtggattagtagagcgaatcaatattgtctttatttaccagcagcactttatggaagcggataatatgcttgtcgctatcgacctccgctttaccgagctctttcagttcaaatcccggctcaatggttttgccgttcagcagggtgctggcgacggccgcgagggcatagccggctgtcgccggatcgtaggtgatcccttcggtaatatcgccgctcttaataagagaggccgcctgcgaggggatcatcatcccgtagaccgcgactttatttttcgcacgcttctctttcaccgcgcgccccgcgccaatcgggccattcgaaccaaaagagaccaccgctttcagatccgggtaagttttcatcagatcgagcgtggtacggcgggaatcatcaacactttccgccaccggcattcggcgggtgacttcatgcatgtccgggtaatgttctttttggtatttcaccagcagatcggcccacaggttgtgctgcggtaccgtaaggctaccgacatagataacgtagccgcctttgccacccatccgcttggccatatgctccacgtattcagcagcgaacttctcgttatcgattatctccacatcccagttggcgctcggctgcccgggcgattcgttggtcagtaccacgatgccggcgtcacgggcttttttgaataccggctccagcacgttggcatcgttaggcacgatagtgatggcatccactttacgtgcaatcaggtcctcaataattttcacctgctgcggcgcatcggtgctggacggccctacctgggaggcgttgaggttaaactctttcccggcctggactaccccttcacccatccggttaaaccatggcatgccgtccacttttgaaatattgactacggttttttccgccgcatataccggcgcggaaataagcgcagcccccaacagcaaggatgaaaaaatattaacgaccagacgtttatgcataataattagcctcaatacgttgtagtcagacaggggtatgacgcaaagcggaaaaatagatagaaattgtaataatgttaataatttagaagagaataaacacaagctgtaacagcagacaggtaatattcagctataaatatggataataatactataatcctgtggcgtgagctttttcacaaaaaaaatgcaacatactttgttgttccagaataatgatcgggtcgcagagaaaatatatttttcccgcttcgttatttaccgaaaaacaatcacataaataacatcaggaaaagtatgtgatttttgattgcgcctccagccccttccgtggcaggatactccctatgaacagaaacgttatcgttacctatccccgccgttggtggctgcctgcataacaggcggcacgatacacgtttccattttcaaagccgccggaaggcggctttggtgttttcaggacgtctttcggctgaacagtctgataaggagtccctgatgaaccatccacaaaccatcctcaccggcgaccgcccgaccggccaacttcatcttggccactacgtcggctcgctgcgccagcgcgtcgcgctgcagcataaccaccagcaatttatcctgatcgccgacctgcaagggctcacggacaacggcagcaatccgcaaaaaatcagccaccatatcctcgaagtcatggccgattatctggccgtcggcatcgacaccaggctcaccactatttgcctgcagtccgccctgccggcgctggcggagctcagcgcgctgtatatgaatatcgtcaccgtcgcccgcgtagaacgtaatccgacggtcaaaaatgagattgcccagaagggattcgcccgctcgctgccggtgggttttctcgcctatccgattagccaggcggccgatatcaccgccttcaaagccgagctggtgccggtgggcgacgatcagctaccgatgattgagcagaccaacgagatcgtccacaagatgaatagcctcaccggcgagccggtgctgcgccactgtaaggcgctactcagcgaagtgagccgcctgccgggcgtcgatggcaacgccaaaatgtcgaaatcgctgggcaatacgctgacgttatcggccacagaggaggagatccaccacgcggtcagcgcgatgtataccgacccgacgcacctgagagtcagcgatccggggcatgtcaagggcaacgtggtgtttacctatctcgatgcattccacagcgataaggcgcgggtggcagagatgaaagcccactatcagcgcggcgggctgggcgatcgccagtgtaagaatgagctggagacctgcttgcagacgctactggcgccgatccgcgaacgcagggtcacttttattcaggataaagggatgctgctggagctgctgcgccagggcagcgaacgcgcccaccacctcacacagcagacgctgcatgaggtgaagcgtgggctgggtctgccggtgctgttctgagatggtgaaatactccctgtgcggataattttgttaacacgccgacaagaccctgtctttcgtatggacaatatcgccccggctgttactatcgcgttaacggtagctctcactatgcgtgtttcattaaggccaggatcgctgatgatgaccacataagtagcccagcgagcggctgcgcatcggcgcggcagagcgcggcgtcagcggccctccctccactttttcgtccttcgcaagaaggacgctccgcccgccggaggaaacacgcgcaccactcagcacagggaatcaagcgagtcgcgtatggacaaaataaagaaacgttgggcagggtattttgtcggcttactggtggtgctcgccgccgccgcatggtggctgctgcgcccgccgggactcccggcggggtttgccagcagcaacggccgaatcgaagccaccgaagttgatattgccagtaaaatcgccgggcgtatcgacaccattctggtcaaagagggtcagttcgtgcaccagggagaggtgctggcgagaatggatacccgggtactgaacgagcagcgtcttgaagccgccgcgcaaatcaaggaggcggaaagcgcggtcctggccgccagagccttgctcgatcagcgacaaagtgaaatgcgcgccagcgaagcggtagtgaagcagcgtcaggcggagctggattccacggcgaaacgccatgttcgctccaacaccctctcccagcgtggcgccgtctccgcccagcagctggatgacgatcgcgcggccgcagagagcgcccgcgcggcgctggaatcggcgaaagcccaggtctccgccgcccgcgccgccatcgaagctgcccgcaccagcattattcaggcgcaaacccgcgtcgaagccgcccaggcgaccgagcggcggatcctcgccgatattgacgatagcgagctgaaagccccccgcgatggccgcattcagtatcgcgtcgctgagccaggcgaagtcctggccgccggtggccgggtactgaacatggtcgatctcgccgatgtctatatgaccttttttctgcccaccgaacaggcaggtctgctggcgctcggcagcgaagcgcgcttggtccttgatgccgcgccggatctggtgatcccggccaatatcagctttgtcgccagcgtcgcccagttcacgccgaaaacggtcgagaccagcgacgagcgccttaagctaatgttccgcgtcaaagcgcgtatcccgccggagctgctggcgcagcacctggagtatgtcaaaaccggcctgcccggtatggcttacgtacggctggataaacaacaaccctggcctgaagccctggcggtgaggttgccgcaatgaaactaacgccgcaggatacctcgccccccgtcgccctgctggaacacgttggtcagcagtttggcgccaccatcgcgctgcgcgatatcagtctggcgatcccggcacggcgtatggttggcctgattggcccggacggcgtcggcaaatcgagcctgctttcgctgatcgccggggcgcggaccatcgagcaggggaacgtgatggtgcttggcggcgatatgcgcgatgtgcatcaccgccgcgaggtgtgtccgaaaatcgcgtggatgccgcaggggctggggaaaaacctctatcacactctctcggtgtatgaaaacgtcgacttcttcgcccgcctgttcggccacgataaagccgaacgcgaactgcgcatcaacgagctgctgcagagtaccgggctggcgccgtttcgcgatcgccccgccggaaaactctccggtgggatgaagcaaaagctcggcctgtgctgcgcgctgatccacgatccgcagctgctgatccttgatgaaccgaccaccggcgtcgatcccctctcccgggcgcagttctgggagcttatcgacagtattcgccagcgccagccggcgatgagcgtgctggtggccaccgcctacatggaagaggccgagcgctttgactggctggtggcgatgaacgccggcgaggtgctggcgaccggcagcgccgcagagctcaaagcccagaccggcagccagaccctggagcaggcgtttatcgccctgctgccagaagcacagcgtcaggcgcatagggcggtagttatcccaccgcgcgacagccgtgaggaagagatcgctatcgaagcgcgcggcctgaccatgcgcttcggcaactttgtggccgtcgaccacgttaactttcgcatcgcccgcggcgaaatctttggcttccttggatctaacggctgcggcaaatccaccaccatgaagatgctcaccggcctgctgcccgccagcgaaggtgaagcctggctgttcggccagccggtcgacccgaaggatatcgccacccgccagcgggtgggctatatgtcgcaggccttttcgctctatagcgaactgagcgtccggcaaaatctcgagctgcacgcccgcctgtttcatatcccggatgacgaaatagcccaccgggtcgctgagatgagcgagcgctttatgctgaccgaggttgaagacgcgcttcccgccgatctgccgctggggatccgtcagcgcctgtcgttagcggtggcggtcatccaccgcccggagatgctgatcctcgacgagccgacctccggcgtcgacccggtagcgcgggatatgttctggcagctgatggtagacctcgcgcggcaggatcaggtgaccatttttatctccacccactttatgaatgaggcggaacgctgcgatcgtatctccctgatgcacgccggcaaagtgctggccagcgatacgccgcaggcgctggtcgagcagcgcggttcaaacagcctggaagaggcgtttatcgcctggcttaaagaggcccagccgtcctctccagtaccagaagaacccacgtctgctgtggcatcgtattccggacacacggctccacggcaggccttcagtcttcgccggctgtttagctatagccgccgcgaggcgctggagctgcgccgcgatccggtacgatcgacgctggcgctgctggggacggtgatcctgatgtttatcatggggtatgggatcagcatggacgttgaggatctgcgctttgccgtcctcgaccgcgatcaaaccctcagcagccagggctggtcgcagaacatagccggttcacgctactttatcgagcaggcgccgctgcacagctatgacgaactggaccgccggatgcgcgatggcgagctggcggtggcaatagagatcccgccgaactttggtcgcgatatcgcccgcggcacgccggtgcaaatcggcgtgtgggtggacggcgcgatgcccaaccgcgcggaaaccgtgcgcggctacgtacaggcgatgcatctggcctggctgcaggagatggccggccggcagagcagcccgcagcgcgatacctcgctcatctccatcgagacccgctatcgctacaatccagacgtgaagagcctgccggccatcgtcccggcggtgatcccgctgctgctgatgatgatcccggcgatgctcagcgccctgagcgtagtacgtgaaaaagagctcgggtcgattatcaacttgtacgtgacgccgaccacccgtagcgagttcctgctcggcaagcagctgccttacatcgtactggggatgtttaacttcttcctgctgtgcgcgctgtcggtctttgtctttggcgtcgcgcataaggggagtttcctgacgctgaccctggcggcgctgctgtatgtcaccatcgccactggtctggggctgctgatctcaacctttatgaagagccaaatcgccgctattttcggtaccgcgattattacgctgatcccggcaacccagttttccggaatgatcgatccggtggcctcgctggaaggtcccgggcgctggattgggcaaatctacccgaccagccacttcctgactatcgcccgcgggaccttttcgaaagcgctgaatattagcgatttgtggggctcattcattccgctactgattgcggtgccgctggtgctcgggttgagcgtgctgctgctgcagaaacaggagggatgatgcgcggattacgcaatatttataatcttggcgtcaaagagctgcgcagcctgctcggtgataaagcgatgctggcgctgatcgtgtttgcgtttaccgtgtcggtgtactcctcggccacggtgatgcccggttcgctgcacctggcgccgatcgcggttgctgatatggataaatcccagctctcttcacgcatcattaacgctttctaccgtccctggtttcttgagccggagctgatcaccgctgatgagatggatgccgggctggatgccgggcgctacacgttcgccatcaacatcccgcctaacttccagcgcgatgtactggccggtcggcagccggaaatccaggtcaacgtcgacgccacgcgcatgagtcaggcctttaccggcaacggttacatccagaatattatcaccggcgaagtaaacagttttatcgcccgctatcgggataacagcgtgctgccggtagagctggcggtcaggatgcgttttaatcctaaccttgagcaggagcgctttggcgcggtgatggcgatcatcaacaatatcaccatgctggccattgtcctcaccggttcggcgctgatccgcgagcgggaacatggcaccattgagcatctgctggtgatgccggtcacgccgtttgaaatcatgatggccaagatctggtcgatgggcctggtggtgctggtggtctccgggctgtcgctggtgctgatggtacaggggattttgcaggtgcccattgaagggtcgattcccctgtttatgctgggggtggcgctcagcctgttcgccactacctcgatcggcatttttatgggcaccctcgcccgctcgatgccgcagctggggctgctgatgatcctggtcttactgccgctgcagatgctctccggcggatccacgccgcgagaaagtatgccgcagctggtacaggatattatgttgaccatgccgaccacctacttcgtcagcctggcgcaggcgatattgtatcgaggcgccagcttcgccatcgtctggccgcagttcttaaccttgctggctatcggcggagtgttctttagtatcgcgttgctgcgttttcgtaagactatcggtgagatggcataaaggcttaagaagggccgtcgacttacggcggccgaatggtttatttatggcgattcataaagcgacgtaaaccccaggtgaaggccatcgccatactgaagagaatgaacagcaacaccacccagctgatggagatgcgcagcagcgtgccgggggtcataaacggctgcagatacacggtgaaggactgggcgggtgattttcccagcagttcataaacgttatcggtgagccacacgccgacccgacagaacaaccagataatcgctggccagcagagcagcaccagaaaggtaaagcgctcctgaatgtaagtgaagagctggcgcaatggcgaccagttaagcaggattttcatttctattctcatttgccagccgagaacctgcatatgtctcgcaaggcatttcgggcagcatccatacaggcaatcatccctctttgtatatcaaatttgctgccatataaaccagatcaagttaacaaagtgttaatgataaagctcatttagacaaaaacagggaagaagcataccgttcgccacaatacatccggaagcgaagtatccagtcacggaaatattttttctgaagcgtaaacgcgttattttgtgggaggaagaggccgcatcattattttaccggggcacaatataatggcgctgaaataaagagataatattaatcgtagctgctgataattattttccgacttgtatcatccggtaaattcactatccggttgaccatgccacaagcattcgtcacgctattttgcgaagcaataaaggcggtgctgcgcactttgtccggggtacggttttgtagccccggtaagcgcagcgccaccgggggagatataccccacacagcaaaaaaccccgcacctttcggggcggggttctttttaaacgcaaaaacaaaaagcccggtctttcgaccgggctttctgctttatttgatgcctggcagttccctactctcacatggggagaccccacactaccatcggcgctacggcgtttcacttctgagttcggcatggggtcaggtgggaccaccgcgctagtgccgccaggcaaattctttgtgctcagtacgcaattctttatattgcgtactcaactctgaatctaagctgaaaattctctcaatccgccaaaacatcttcggcgttgtaaggttaagcctcacggttcattagtaccggttagctcaacgcatcgctgcgcttacacacccggcctatcaacgtcatcgtctttaacgttccttcaggagacttaaagtctcagggagaactcatctcggggcaagtttcgtgcttagatgctttcagcacttatctcttccgcatttagctaccgggcagtgccattggcatgacaaccc

SEQ ID NO: 131 - DNA, 232523 bp, Unknown
  source: /note="Description of Unknown: MKP2_2161_1 Mutant Bacteria sequence"
ccgtgttgtgatgtcttgctggattttgtttacagacggcgccacccccgcgccttccgccgtcctcccccgcggcagcgtcacggtgtgtatcaggggcaggggcaacagccccgccgccgagaccagcgaccgccaagggcgcgaggcgctggacggcaatctcaccagcgccttcgccagcgttcgcgcctgtctgccttcgctgattgcccgccgcggcaatgtgctgtttgtcgcctccatcgcctctctggccgccgggccgcaggcctgcggctacgtcaccgccaaacacgctttaatcggcctgatgcgctccgtcgcccgcgattatggcccccagggggtacgcgctaacgccgtctgtcccggctgggtcacgacgccgatggcggatgaagagatgcacccgctgatgcaggcggaagggctgtcgctgactgaggcttatcagcgggtgtgccgcgacgttccgctgcgccgccccgccagccccgaggagatagccgaggcctgtcagtttctctgttcaccgcaggccgccatcatcagcggcgctacgctggtcgccgacggcggggccagtatcgtcgatgttcccactctggcgtttgcctaacgccctactctgttcaggagccctatgacttcagaagccgtatttatccaggtcggcgcgctggccgatggttttgcgccgcacggtaacctgctggctaccgccagcctgcccgcaggcgaaaactttaccttttatgtcgccgggagcgagccgcaacagctggttatcgaagatgagcagacgctaagctggaacggcaagcgcgccccctggcgggcgaccgccctgcgcccggacattctgtttatcgacttccttgacccggagcgggatagcgccagcattagcgcggtatgcaacctgacgcagcgcaatgccacgctggtatacggccagctaccggacgaagccgccgcgcggctggacgccttcagccgggtagaacaagggttgccgctgaccgcggttgaggtccgtttcgtcttcgcccgcctggatgcccagccggggccgttgccgggctttaccaccgcgctggtcggcatgcgcaatcagtacacctatagcccgaccgagcgctatgagcacatctatctcaacgataatttttacgcctggcagtgtctggacggcgtggaaaaggggctggcggatgtcgatcgctgccactatgtgcaggtggcggaggatctctatttgttcgtctggcgggagaaaatcattcccacgcggggggtgatcctcatcgatctgcagcagatgcgcactgacggcaagatcatgggctatcagggcagcgatttcggcgccctcagcaatttcccggtcggcgccagcgcgaagatcctcaacgtcacccgccatcaggaatagtagggcgccgccgggcacgctttcaggcaccgcacccgtcatttcgccgggtggcggctgcgccttacccggcctacggtccgtagcagccagccgttaacttacccactagtgcgactgaaactgccggtgttgcggcctcaacatcgctgagacgttcccggaaggccggggcagcccgcatggatgcgggctgagggccgtgttttgcacggacgctgcctcggcccgacccgaagcctgcagggataagtcgaaggtaccgcgcagcggcgatgttgctggccggagcccgggggtacagggggcggcggcgactggccgccccctgtgcgctccctgcaccatgactgccataacgcagacaattaaccgggagcgcaatcggcccggaagtaacatagaagctgtagccctgctaagcgcagcgcgaacagggacatttccggttgcgccgttattttgccgggtggcggctggcgccttacccggcctacggtccgcgtcatgtttagccttcccccctctccccgccgggaagagggattgcctcaggcgctggcgccgtccagccgcgccacttgctccgcgctcaggctcagcgccgccgcgcgggcaaaactctccacctgagccacgctggtggcgctggcgatcggcgcggtcaccccttcgcggccgatcagccacgccagggccacctcagccggcttcgcgccctgctcgtccgcgaccgccgccagggtatcgataatccgcatcccccgcggattcaggtacttaccaatcccgcttccgcgctggctctgtgtcagatccgacggctggcggtacttaccggttaagaaccccgaggccaggctgtagtaggtcaccaccccgatatcgcggctgacgcagagatcgcacagcgcgccttcaaacgcagagcggtggtagaggttatattccggctgcagcacctgccacgcaggcaagccgcccttacgcgccacctccagcgcccccgccagctgcatcgcatcgaggttagaggcccccatcgcgcggatttttccggcctgctgcaggctgtggaaggcctccagcgtttccgccaccggggtttgcggatccggccagtgggagaagtagaggtcgatataatcggtattcaggcgacgcagagagtcgtcaaccgcctgttggatccaggctttgctgagccctttatggccggggaggccgagatcggagccgactttggtgaaaattttgactttatcacgcatgccggggcgcgcctgtagccagcggccgattatggtttcagattcgccgccctggttgccctccgcccagcgggaataaacatccgccgtatcgatagcgtcaaacccgtggtcaacgaaagcatcaagaagagcaaaactggttttttcatcgatggtccagccaaagacgttgccgccaaagactaatggggcgatggaaaatccggttttgcccaaaggacgtgtcatcatgccgagtactccttagcttatattctgcttccctcaggtaaccacaggggtcaggaggggaggtcgattggataatcagaaaaggaatcttacggcgggcgctccacgcccgcaggtacactctgacattatgtcccggaataaacatcaaagctaaaatatttgccagctaattttttataggtgccgtcggcaagaatcttcgcaatcgcgccgttaatttcctgacgcagcgcctcatcgtctttacgcaaacctatcgccgccccggcgccaaacagcgtatcgtcctgcagatggccgccgacaaaggcgaattctttaccctgcggctgctgcaggaagctgtagtcggccatcatcccggagagcaccgcgccgtcgatgcgccccgactccaggtcacgcaccacgctatcggccccctggtaggccacaatgtttatcccctgcggccgccagtgctggttaacatacgtctcctgcgccgagccctgctccacgccgatggttttgcccttcagctgttccggcgtattgccttgcagggtatttttccgcgccacgaggaacaccggcccgttatacaacttgtcgctaaaggcaatctgcgctttgcgcttctcggtcatatacatcccggaaaggatcgcgtcgaatttacgcgccttcagcgccgggataatgccgtcgaaattgctttccacccacacgcatttcgcctgcagctgctgacaaatggcgttgcctaaatcgatatcaaaccccgccagcttgccctgcggatctttccattcaaacggcgcgaaagtcgggtcaacgccgaagcggatctcctttcccccttcggccagcgccgacgtcgacgccattaatgccagccatagcaacagtgattttttcattcgcgttcttctccagagattagcgacagtgtttttccaccagacgggcgaacagcgtcgcgccgatggtgataatgtcatcgttaaagtcgtagccggggttgtgcaccatgcaaccgcccttctctcctttctcgccattgccgagcaggaagtagctgcccgggcgttcgcgcagcataaaagcgaaatcctcgctggcgttcatcggcgagaccgactccaggaccccttcgcggccaaacacctccagcgccagcgcccgggcgaaatcggtctcttcaggactgttggttaataccggataggagtcgtaaacctccactacgctgctggcgccatagcttttggcggtaaagtcagcgagctcgtgaatacgcttgatcagcaggtcgcggatttccggcttcatcgcccgcacgctcagctccatcaccgcgctctccggaatgacgttggaggcgataccggcctggaaggtgccgacgctgaccactgccgtttcccccggcggcacgttgcgcgccacaatgctctgcagggccatcaccagcgccgcaccggcgacgatcgggtcgacggtgcgctcggggtgggcgccgtggccgccgtagccggtaatcgtgattttgacggtgtccgccgaggccatgaagttgccggcgtagaagcccagcttgcctacaggcaggcctggcatgttgtgcaagccaaagatgcgttcgcaggggaactgctcgaacaggccgtctttaatcattaaatccgcgccgccgatagcctcttccgccggctgaaaaatcagatgcaccgtgccgttgaactgacaggccggcgaggcgatatatttcgccgccgccagcagaatggtggtgtgaccgtcatggccgcaggcgtgcatttttcctggcgccgtgctggcccagggtaaaccggtggtttcctcgatcggcagggcatccatatcggcgcgtaaaccgatggtgcgcggagaatcgcctttgctcaggctgccgaccacgccggtcttgccgagaccgcgcgtcacctgatagccccattccgtcagcttgctggcgaccagttcgctggtattaaactcttcaagacttaattccggattggcatgtaaataatgacggatagaaatcatttccgcttccgtcgctttaatttctggaattacataatcactcatgccgctctccgggaaataaattaaggacttatcacggtatcgcgatgaaaagtttatgcaagcagcatttctaatacctggaatggacgcatcttatttaataattcactcatcacagcgcaatgaataataaaaatagtgcaattaaaaaataaaagtttatttttttgaggatttcccgttatttaccctaccctgcacggccacatccagcgttatataaaataaacgggcaggcaattacagaggcttttccttctcgcaatcgttgcgctggcgggctgcagcgcgccgatcgccgccgcttccagcggcgtggcgtcagataccgcctcgttgtcctcgaaggtcaacgtttatcatctgaccgaaaaagaactgtccacccaggcaacgatcaatggttataaatactggccggatgctgcgctggatccgtagctttccgcgagtgcgccatcgccggatcaggcttttcctgacccggcgtcgcggagcagcgcatttagtggccgagggcgccgctcaccagaatcgaggtgatgatcccggtcgccgcggcgatcagcacatagttaccgtcgatataggaccagtgatggccttccggcgggggcggcaggccgcggtcgctccagtcgcggacgcgatattcatcgccacggaacggcgccggagccgggtggcctttgcggaaatcgttcccgcgccaggcgaaatggtcctgctcatgacgtgccagatcgcgtttgtcatggccgtcgcgatccgggccacgctggtcatggtcgccctgatgatgcgcgtcaggtccgccctgcggtgcatgcccgtcatggtccggaccgttctgccacaccgtgggttgccccggacgatggccgtcgttcgggccatcggcaaaggccgggacgctcagcacacaggataaaattactgccagagaaatcatctttttcatggtacacctcctgattcagctcctttgtaccgggcaaatgtgaagaaagagtgagtaactggttaaccaggacgattcctggcatcggcagttgctgtgctgcgcaacagccaggctgcgggaggaaggacaataaaaaaggccgctttcgcgacctttattcagacaggttaaaggacttattcagtcactttattttttaattcttcggcgccggttttggttttatcccagcccttttccgcaccggatttggtggcattccagcctttttcactgacctctttggtcttatcccaccccttctcggtgccttctttggtcttgttccaggttttctgcgcgccttcgctcacctggctgccgacgctgtcctgcttgccttcggcggcgtgtttcgccttcagctgctgctcttcgccctcgtgctgggcctgatgcagcttctctttagcggtgttggcgttggcattcgccgccgcgacggtatcatctgttgcatgtgttgtcgcagcaaaaaccggagccgcaaccagaatagccgataacgcaatcattgcttttttcataatatcctctctcacgtgtcgtgttatgagtcgcattcaggatggcacaacgaaccggggatgacattaggaattagcctgaaaaacgtcttcgacctccagccttggcagaaaatgctgccgccgcgcgcgccctgtcggcgttggcataatttccaacatgtttgttacattttatgaaatttgcccttgatatacttgccgttgacgtttactcgagaataattctcagaatcattatatttataaattggcaaacggaactcattttatggcaagaaaatcagtaagatcgctgttacttactgcgctgctcgcgacgcccctcctcagctatgcaacccaatatcccctgacggtcacggaccttgacggccggcaggtcaccctcgccaaagagccgcagcgtattattttgcaggatggtcgcgacattatgaccctcgccctgctggaccgggacaatccgtttaaacggctggtggcatggaataatctggcgaaaaagcaggatgttgccaccttgcagatgctgaaaacgacgtggccgcagtcggccacgatccttgacatgggcttcagcgataaagggaacgtcgatcttgaaagcgtcatcgcccgtcatccggatctgatgatcgcccagctgcgcgccaggccagcgctgatggagagcggcgtcatcgacaagctcagcgccctgcacgttccggtgctgtttgtcgactatgagatcgacccggcgaaagataccgcccccagcatcgacctgctgggcaaagtccttaaccgcgagagccaggccaaagcctttaccgattactatcgtcagcagctgcagacgattcgccagaaaaccgcggccatcacgccgaaggccaacgtcttcgtggaagcgctggccggcaacagcgacgcctgctgctttactcatggccacagcggctggggcgggctggtagaggcggtcggggcgaacaatatcggttcgcagctgctgccgggcgcctccggggtcgtctcgctggagaaaatcatcagcatgaagcccgacgcctggatcatgaccggctcgaagcgcggcaacagccaggtgctgcccctgggttatgcggttaagccagaggcggtgaaggcccaggcgcagacgctgctggcgcggcctggggtcagccagatcccggcggtacaggaaaagcgggcctatggcgtttatcaccacttctataaccacccgtggaatattgtcggcatggaatacctggcgaaagatatctacccgcaggctttcggcgatctcaacccggatgagacgtaccattatatcgtgcgccatttcaccgacctgccggaccagccgttcgtcttctcctggcagcagagcgagtaatccggcatgcgtttaacctccgactccgtgctcgacgggctgcccgccgggacctctggcgtgatgaatgattatcgccgtatcgtgcgtcgccgtctgctgctgatcctcctgctggcgctgttgattgtcgcgtcgctgctgctcgattttatgctcggcccctccggtctgccgctgcagaacctgtggcagacgttaaccgatccggccagcgccgatccgggcacgcgcgccatcgtctgggatatccgtctgccctatgcggtgatggcgattatcgtcggtctggcgctgggactggccggcgccgaaatgcagaccatcctcaataacccgctggccagcccgtttaccctcggcgtctcctcggctgcggcgtttggcgccgcgctggcgattgtgctcggtattggcctgcccggtattcccggccagtggtttatctcggccaacgcctttatcttcgccctgctggctgccctgctgctggacggcatcacccgctggacccaggtggccacctccggcgtcattctgttcggcatcgcgctggtctttacctttaacgctctggtctcgatgctgcagttcatcgccaacgaagacacgctgcaggggctggtgttctggaccatgggcagcatcgatcgcgcctcctggagcaaagtcgccatcctgttggtcgccctggcgctggtgatgcccctgtcgctgcgcagcgcgtggaagctgaccgccctgcggttgggcgaggaccgggccatcagctttggcattaacgttcgccgtctgcgcctgaccacgctgctgcggatcagcattctgtcggcgctttcggtggcctttgtcgggccaatcggctttatcggcctggtggcgccgcatattgcgcggatgctcttcggcgaagaccatcgcttttacctgcccgccagcgcgctgatcggcgccctggtgctctccctggcctccatcgcctcgaaaaacctgatccccggggccattattccggtggggatcgtcacttccctggtcggggtcccgttctttttgagcatcattttacgtcatcgggggcaggtatgagcgaccagacattatccgggctgtcgctgtctcacttcagcgccggctaccccagacgcaaggtgatcgagaacctgacggttccccatctgccgcgagggaaaatcaccgcgctgctggggccaaacggcagcggtaaatcaacgttaatgcgggcgatggcgggtctgggcccctgccgcggcgagctgctgctggagggggaaaatctgctgacgcagccgttctcacgtcgcgcagagcaggtggtctatcttccgcagacgctgcccgccggcgtgcatctgcatgtgctggagtcgataatcgttgcccagcgcgccgccggaggacgccacagtccgcagcgccaggaggaggtgatggcgctgctgcgacagctggggattgcccatctggcgatgagctacctcgatcagctctccggcgggcaaaagcagctggtgggtctcgcccagtcgctgatccgccagccgcgcctgctgctgctcgacgaaccgctcagcgcccttgacctcaactaccagtttcacgtgatggatctggtgcgccgggagacccggcggcgcaacatcgtgaccctggtggtggtgcacgacatcaatattgccctgcgtcacgccgaccacgtgctgatgctcaaggcgggccagctgctcggcgacggcaccccggccgcggtcatcacccccgagactctggcggccgtctatggggtgcgcgggcgtattgaaccctgttcgcagggggtgcggcaggtgattattgacggcctggtggacagcgaggcctgaccgcggcgcggggcggttcgtccgccccgcgcccgccggcttagtgatcgagatagatatagttttcccagcttttcatgcggatcaggatcttcctgatcagcgacagctctttcaggtgatccgagtagaccgccgcctcgagggtggccccctgcggcagagcgtattcggcaaaacgcggatcggtcaccttcagcaccaccagcgcccggccatgggtattgagcgcgtctgtggtcagcagtttgccctgcccctggaactggctctcgccaatcgccggcagcacgtcggccacttctccgcgaaagacggtgcccgggatagccggaaacatcagctccgcgggctcgcctttgtgcagacgctgcagggcgttctggcgaaatgccgcgacgtactcccgcgaggcggcgccctccaccggcacaaaggtcatcagcgggatcatccccagcgcagtggacatggtgcccggccgtaagccgacggtactgacatagccatcctccggggcgcggacgacggtgttctccagctgaaactgcgccttttgcagctgcgccagcagggaggccacggtggtgtttttgcccttcaccaccgagtccagcgcattacgcgcctgaaccacctttgcctgagccgcgctgacgctggcttcatcggctttccacgtctgcagacgggtatcaaccatttgatcggagaaggcgccctgggcatggccctcccgatagcgggcatactcccgccgcgactggtcgcgctgggccaccgcacggctcagctcggcctgcgcctggcttaacgccgcgtttaaggagagcgcatcctgactggctgcttttatctgcgcctgcagatcgtccactttcgcctggaagggcgtcgggtcgagggtaaacagcacatcgcccttatgcagcatctggttaggcttcaccggtacgctctgcacccggccgcgtacctgcgacacaatcggcacggtgcgaaacacctggttaccgacgtcggtataagggaagttgtagttcatcccgaagatcaccgcgccaatcagggcgataccgccgagcaccgccgtcggtacggtccacttattgagcgggatgcgaaaaactttaaacaccacgatgcatagcgcggcgtaggtcagcaacattaacgtttccattattttgcctccttcgctttcagaacgtccacctcgcgctggacctgttccagctgctggaccaccgtttccagacgctgatgcagcgcctgctgctcgtcggcaatgtggcgcatcccccatccgcggtcttcgcgccacagcgtcgcccagatccataacaagggccacagcgcgtggagggtaaataagctgacccaaccggcataatgaatcgcatcctgatgaggatgacgccgctctttggcgatttcataaggaatatcgtgaataacaatcacgccataaaaaagtattaaggccacggcgatcagaatggccagcgccacatagtccagggtcataaaataactccagagtgcaaggttaaataaataaaacagccagattcaggcgtaacggggccgggggaaaaagcgcgcttagcgctttccctggcggtaatagcaacgtgatggcgtgaatctgccgaatcggatttagaatttctcaggaatatgacggtcgatggagatcagcttgccttttttcaccgtgatatatcccccctcgcgcagcgcggccagcacctggtacacatagctgcgcgagagattggttcgtttaataataaatgccgacaggctctcatgctgacccccatcaatttcgccgcgatataaatagcgcgacagcatcgatttaatggtctgaaagctggtctggctgccgcgttcatagtgggcatcaagggcaaatatgcccatataggccaggatcgtggtcagctcttgcatatagcccggcgacgaatgaaagaatattcgctcaaaatcgctggcggttattttcgccagctggcactcgcccagacactgataatagagcgcgaccgacggacaataatgttccagtaatcctaacggcatatgcgcgataacaatcccgaccaggttctgctcatcgccaaaggccaatgtcatttgcccctgcagcagaaagtagagatagcccggctgcggaataaagccctggtctttgcccaaactcagcgtttcactgcaggcgatcaccgccggcagatgtgtagtcagcgtcagcttctggtaccgatcgtaaatatcgccaaaactggggttcatcgcgctacgcactcctttacctttggccaccgcggcggggctaaccgcgacctggtgaactatacctaagcgggtggggaaggaaaagtccagatctggagtggcgaaatattccgcctggctcacattttttaccctcgcctccctgtttcgtgacccaatcgttccgcttaccggtgggctgtgctttaatgagctaaaccggtttaataaagtttagcttagaggagcttgtcgtatgaatggaaaaatctgggtactcggcgatgcggtcgtcgatctcctgcccgatggagagggccgcctgctgcaatgccccggcggcgcgccggccaacgtggcggtcggcgtggcgcggctcggcggtgacagcgggtttatcggccgcgtcggcgacgatcccttcggccgttttatgcgtcacaccctggcgcaggagcaggtggatgtgaactatatgcgcctcgatgcggcgcagcgcacctccacggtggtggtcgatctcgatagccacggggagcgcacctttacctttatggtccgcccgagcgccgacctgttccttcagcccgaggatctcccgccgtttgccgccggtcagtggctgcacgtctgctccatcgctctcagcgcggagccgagccgcagcacgacattcgcggcgatggaggcgacaaagcgcgccgggggctatgtcagcttcgaccccaatatccgcagcgacctgtggcaggatccgcaggaccttcgcgactgtctcgaccgggcgctggccctcgccgacgccataaaactttcggaagaggagctggcgtttatcagcggcagcgacgacatcgtcagcggcatcgcccggctgaacgcccgcttccagccgacgctactgctggtgacccagggtaaagcgggggtccaggccgccctgcgcgggcaggttagccacttccctgcccgcccggtggtggccgtcgataccaccggcgccggcgatgcctttgtcgccgggctactcgccggcctcgccgcccacggtatcccggacaacctcgcagccctggctcccgacctcgcgctggcgcaaacctgcggcgcgctggccaccaccgccaaaggcgccatgaccgccctgccctacagggacgatcttcagcgctcgctgtgatccccttgggccggttaacggcccactttgctggcgacatcacaattcttaaaccggtttagcaatttttattttcaccgcgttaccgacatgtttaccatatcaactaaaccggtttagcaaaaattagcacactcactgatttacctttggatgtcaccaacatgtataaaaaacggaagttagccattcttattgctttgctaaccggcaccgccgccgcccatgggcagacagacctgaacagcattgaagcgcgtctcgccgccctggaaaaacgcctgcaggacgccgagacccgcgccagcactgccgaaagccgcgccgcctcagcggagcagaaagttcagcagttaacccagcagcagcagcaaacccaggccaccacccagcaggtggccaggcgcaccactcaactggaagaaaaagccgaacggcccggcggttttgagttccacggctatgcgcgttccggggtgatcatgaacgactcggccgccagtaccaaatccggcgcttatatgacccccgccggggagaccggcggcgccattggtcgcctgggcaaccaggccgacacctatgtggaaatgaacctcgaacataaacagaccctggacaacggggcgaccacccgtttcaaagtgatggtggccgacggacagaccacctataacgactggacggcaagcagcagcgatctgaacgtgcgccaggcgttcgtcgagctgggcaatctgccgaccttcgaaggcccgttcaaaggctcgaccctgtgggccgggaaacgctttgaccgcgacaacttcgacatccactggattgactcggatgtggtgttcctcgccgggaccggcggcgggatctacgacgtgaaatggaacgacagcctgcgcagcaacttctcgttatacggccgcaactttggcgatatcgccgacagcagcaacagcgtgcagaactatatcgtcagcatgaataactttgccggcccggtgcagatgatggtcagcgggatgcgggcgaaagataatgacgaccgccaggacgcgaacggcaatctggtgaaaggcgatgccgctaacaccggggttcatgccctgctgggcctgcacaatgagagcttctatggcctgcgcgacgggaccagcaaaacggccctgctgtatggccacgggctgggcgccgaggttaaaggcatcggctccgacggcgcgctgcgcccgggggccaatacctggcgcttcgccagctatggcaccacgccgctgagcgatcgctggtttattgccccggccgtgctggcgcagagcagtaaagatcgttatgtcgatggcgacagctatcagtgggccaccctcaacctgcgtctgattcaggaagtgacgcagaacttcgccctcgcctgggagggcagctatcagtacatggatctgcagcctgaaggctacaacgatcgccatgcggtcaatggcagcttctacaagctgaccttcgccccgaccttcaaggtgggcagcatcggcgacttcttctcgcggccggagatccgcttctatacatcgtggatggactggagcaaaaaactggacaactacgccaacgatgacgcgttaggcagcaacggattcaaatcgggcggcgaatggtcgttcggtatgcaaatggagacctggttctgacggcaaccggggcgacagggtaaataacacataaatataaggttcgcggcgcctgccacggctggcgccgcccacgccatatcatcatgcatttagagggtactatggattttgaacagatttcccgctcactgcttcccctgctgggcggcaaggaaaatatcgccagcgccgcgcactgcgccacccgcctgcggctggtgctggtcgacgacgcgctcgccgatcagcaggcgattggcaaaatcgacggggtgaaaggctgctttcgcaatgccggacagatgcagatcatcttcggcaccggggtggtcaataaagtctatgccgcctttatccaggccgcaggcatcagcgaatcgagcaaatccgaagccgccgacctggcggcgaaaaagctgaacccgttccagcgcatcgcccgcctgctgtccaacatcttcgtgccgattattccggccatcgtcgcctccggcctgctgatgggcctgctggggatggtgaaaacctacggttgggtcgacccgagcaacgctctctatatcatgctggatatgtgcagttcggcggcgtttatcattctgccgatcctgatcggctttaccgccgcacgcgaatttggcggtaacccctatctgggcgcgaccctcggcgggatcctcacccatccggcgctgaccaacgcctggggcgtcgccgccggcttccacaccatgaatttcttcggcatcgaagtggcgatgatcggttaccagggcaccgtcttcccggtgctgctggcggtgtggtttatgagcatggtcgagaagcggctgcgccgcgtgatccctgacgcgctggacctgatcctcactccgttcctgacggtgattatctccggctttatcgccctgctgctgatcggcccggccggtcgcgcgctcggcgacggcatttcgtttatcctcagcacgcttatcagccacgccggctggctggcgggcctgctgttcggcggcctctattcggtgatcgtcattaccggtatccatcacagcttccatgccatcgaggccggactgctgggcaacccatcgattggcgtcaacttcctgctgccgatctgggcgatggccaacgtcgcccagggcggcgcctgctttgcggtgtggtttaaaaccaaagatgccaaaataaaagccatcaccctgccgtcggcgttttcggcgatgctggggatcaccgaggcggcaatcttcgggattaacctgcgctttgtgaaaccgtttatcgccgcgctggtgggcggtgccgccggcggcgcctgggtggtgtcgatgcacgtctacatgaccgcggtaggcctgacggcgatcccggggatggctatcgtgcaggccagctcgctgctgaactacattatcggaatggcgatcgccttcgccgtggccttcgcgctctctctgacgctgaaatacaaaacggacgctgaataatgtcattaccgtcacgtctgcctgcgatcctgcaggccgttatgcagggccagccgcaggcgctggccgacagccattatccgcaatggcatctggcgccggtcaacggactgctgaacgatcctaacggcttttgccaggtcgccgggcgttaccacctgttttatcagtggaacccgctcgcctgcgaccatacctataagtgctggggacactggagctctgccgatctgctgcactggcggcacgaacctatcgccctgatgccggatgaagagtatgaccgcaacggctgctactctggcagcgcggtcgagttcgagggcgccctgactctgtgctacaccggcaacgtgaaattccccgacggcgggcgcaccgcctggcaatgtctggcgaccgagaatgctgatggcaccttccgcaagctggggccggtgctgccgctgccagaaggctataccggccatgtgcgcgaccctaaagtgtggcggcaggacgggcgctggtacatggttcttggggcgcaggatgtgcaacagcgcggcaaagtgctgctgtttaccgccagcgacctgcgagagtggcgcctggtaggggagatcgccgggcacgatgtgaacggcctggcgaacgccggctacatgtgggagtgcccggatctctttccgctggcggacacccacctgctgatctgctgcccgcaggggctggcccgcgaagcgcagcgctttctcaatacctatccggcggtgtggatggcaggccgcttcgacgccgaacgcgggatcttcgaccacggcccgctgcacgagctggacagcggatttgagttctacgcgccgcagaccatgcaggccgatgatggccgccgcctgctggtcggctggatgggcgtccccgacggggacgagatgcatcagcccacccgcgcgcagggctggatccatcagatgacctgcgtgcgtgagctggagtggcaggctggcactctgtatcagcgtccgctgcgcgagctggtcgccctgcgcggggaagcccagggctggcgcggacagaccctgcccctcgccccgatggagctggcctttgacctttcccccgacagcacgctggggctggactttgccggcgccctgcagctcaccgtcaatcgcgacggtctgcgtctgtcgcgccgcggcctgcagacggcggagatgcatcaccgctactggcgcggcgaggcgcgacgcctgcggatctttatcgaccgctccagcgtggagattttcatcaacgatggcgaaggggtgatgagcagccgcttcttcccgggctatccggggcagctcatcttcagcggtgcgacgccggtggcattctgccgctggctgctgcagccatgcatggtagaataagcgttttgctttcaggctcccgggtgctgatgaaaaccaaacgcgtaactatcaaagatatcgccgaactggcgggcgtctccaaagcgaccgccagcctggtactcaacggtcgtggtaaagagctgcgcgtggcgcaggagacgcgcgagcgcgtactggcgatcgctcgtgaacagcactatcagccgagcattcacgcgcgctcgctgcgcgataaccgcagccataccattggtctggtggtgccggagatcaccaactacgggtttgccgttttctcccacgagcttgagacgctctgccgggaagccggcgtgcagctgcttatctcctgcaccgacgaaaacccaggtcaggagagcgtggtggtcaataacatgatcgcccgccaggtcgatggcctgattgtcgcctcttgtatgcacagcgatgccgactatcagaagctcagcgaacagctgccggtggtgctgtttgaccgctcccccagcgacagcgccctgccgctggtgatgaccgactcggtcaccccaacggccgagctgatctcccgtatcgcgcctcagcatgcggacgagttctggtttctcggcggccagccgcggctgtcgccgtcgcgcgaccggctggcggggttcacccagggcctggcccaggcggggatcacgctgcgccctgagtgggtgatcaacggcaactaccaccccagctccggctatgagatgttcgcggcgctctgcgctcggctggggcgtccgccgaaggcgctcttcaccgcggcctgcgggctgctcgaaggggtgctgcgctatatgagccagcatcatctgctggattccaatattcatctcgccagcttcgacgatcactatctgtatgattcgctttccctgcgcattgataccgtgcagcaggataatcgccagctggcctggcactgctacgatctgctcagccagctgatcgacggtcaggccccggagccgcttcagcgctacctgcccgccaccctgcagattcgccatccctgacggcgcggttggcaattagcgttttcgcctggcgcgcgccgcctgcctcagcgccagcagcgcgctggcgagcaccgcgccaaggccgatcgttaccggccagcggtaagccaccagcaacgagggcaatccaccatccggcgccagcatcaccagattccagcccgccagccccgcgttgccgttcagcgcccggcttaacatccgctgatgcggggcgaatggctgaatggtctggtagtggctgccgaacagcgggggctgcatctctcgcgggaactgcgcctgcacctgggccagcacgctggccggcagcgcgtgcgatgccgccagcagatgcccgtcgccattcaccagcagcagctgataatgccgctcccgggcgagggtctggagagcggcgcgcatcgccgccagcggccaggtcgcttcccgctgcggcgccggaatgttcatccgccgctcaaggcgttccgccacccactgcgcatcctcctccagctggcggatctgcctctcacggtaaacctctctggccggcaaattcatgccccgaccgagcgccaggatcgccagccccgcgagcagcgtgacgataaggcccctttttcccgctagccagcgcggcgagaatttgccaaaggatggtgtattcatacgactccagaaaccgcaggccacgcgtggcccctgacgaatggacaacggaagtggcgaaactgtacaggatgcgcagcgcgggcaaaacagacaggcggagcctggcggggagtattttgtttatttctggacaggacgggcggcaacgacatccttcgccgttgccgcccgttgataagattagtgttttttccggttgcgacgcatatcgatggttaccgccgcaacgataatgatgcctttaataatatcctgcacataggcatcgacgccgacaaaggtaaaaccgcttttgatcaggccaaggatcatcgcgccaatcagggtgccggtaatgcgccccaccccgcccattaagctgctgccgccgatcaccgcggcggcaatcgcgtccagctcgtaggacatccccatactcgactggccgctgctgacgcgcgccgccagcaccacccccgccagtccggagagcgccccggcgatggtgtagacgatcaccagatatttattcacgttgatgccggacactttggccgaggtcatgttgccgccgatggcatacacatatttgccataccgggtatgcttcagcgcaatgtgaaacacggcggcgatcacgaagaagataatccccggcatcgccccctggcctatcgccgtaaagctgtcggagaggaagctgatcgggttgccctgagtgtaatactgcgccagaccgcgcgccgaaaccatcatcccgagggtggcgataaacggcgggagaccggtccgcgtcaccaggaaaccggtggccaggccgcacagccggccgccgccgatccccgcgcaaatggggatcaccgccggcaggttgaccagcgccgggaacattggcgacaggctatcggaggtttgcgccaggctggccgccaccaccgccgcaagggcaataaccgagccggaggagaggtcaatcccggtggtgatgatcacctgggtgacgccgacggcgatgatgccgataatcgccacctgcagcacaatcagcaccagccggttggtattgagcaggaacgactggtcgcgaacataccagccggcgatttcaaaggtcagggcaatcaccagcatcaccacaaagatgccggtatctttcggcattttatgccgcaaattagcgaagaaggaggaaccctcgctggccggagccgccgttaatttcatattactcattctctttgcctcaatgggatgccaacgacaaaatggtttcctggtcggcttcgtctttttccaggatgccggtgatacgaccttcatgcatcaccatgacccgatcgctcatgccaaggatttccggcagttcagaggagaccataatcaccgccaccccccgattcgccagttcactgataagatgataaatctccgccttcgccccgacgtcgataccgcgggtcggctcatcgagaattaagattttcggttgcgctaacagccagcgcgcaatcaggactttttgctgattccccccgctgaggttattaataatttgctccatcgtcggcgttttaatattgagccggcgtatttgctccatgcagtcttcggccattttcacgtgctggacaaaaccgctcttgccgatatattccggcattttgacgatactcatattttccagcaccgacagcaccagaaacaggcccgactttttccggtcttcggttaataatgccatccccttttcaatcgccacggagggggaatcgatggtcaccggcgccccgtcgatcagcacttcgccgctgtcgaagcgctccataccgaacaggctttccatcacctcgctgcgcccggcgcccaccagcccggccacgcccaggatttcgccacggcgtacgctaaagctgacgtcatggaacacgccctgacgcgtcaggttgcgcaccgtcagcacctcttcgccgatggtgttattaaatttcggaaacagctgggttaattcgcggcccaccatctgggtgatcagcgactgccgggtaaattcggtggtgtttttgctccctacccaggtgccgtcgcgaaagacgctgatctcatcggtgatggcaaagatctcatccattttgtggctgatatagatgatcgctttcccctgggcgcgcaggtcgcggatgatggtgaacaggtgagccacctcgccttcggtcagcgccgaggtgggctcatccatgatcacgatatccgcgttccatgagaccgctttggcaatctccaccatctgctgggcggcgatgctcaggtcgcccaccagccggtcagcggttaagcggatattgagcttatccagcagcgcctgggtctggcgggtcagctgaccgtggtcgacaaagccgtacttcatcggctcgcgccccagccagatattctccgccaccgtcatatgcggcaccagattgagctcctggtggatcatcgagatccccgagcgcagcgcatccatggtgtcggtaaactccaccggctcccctttcacgcgaatcgaccctttatcggggcgatagataccgatcaggcatttcatcagcgtggatttaccggcgccgttctcgcccatcagggcatgcaccgttcccggacgcacgcgcaatgagacattatcgagcgccttcacgccggggaagaacttactgataccttcggcttcaagggcaaaagcgttcatacatccacctccgtaccacaggttggccaggactatttctgattacggttggtaaattcagccatgttctctttggtgatcagctgatacggcacgtcgatgattttttccactttctcgccgttcgccagcttgatggccgcgtcgactgcgccttcaccctggcctttcgcatcctggaagatggtggcgatcatcttgccgctcttcagcatctgcagggcatccggggtgccatccacgccagcgatgagaatatggttcgggtttttgcccagcgcctgcagggcgccgatcgccatttcatcgttgttggaggcgatggcctggatatcctcaccgctggtcatccagttgctgaccacgtccacggcgtcattgcgggtaaatttcgcggtctgcttctggacgattttgatgttcgggtatttcgctaccacctcttccacccctttggtgcggtcgcgagtggattcattcgccaggtcgccgagcaggatcgccacattgcccttaccgttcatcgctttcgccagcgcttccatctgcagacggccggcgagaatggagtcagatcccacataggccatcttgtcggtcagctccgcttgcggacggcggttcacaaacaccagcgggatcccggctttggtggcctgatccatgatcggtttcaccgcgttggtatccaccgggttgacgataatggcgtccaccccctggccgataaagttctgcacctgctgcagctgctgggagacatcccctttcgcgtcctcgatctgcgatttaacgccatcttttttcatctctttttgcatcgaggtacgcaggatcgtcaggaagttatcgtcaaacagcgccatcgagacgccaatggagacatcttttgccataaccaccgcaggcagcatgcaggctaacaaagaggcaacaatcgttttcttaatattcatagttgatccttgattttgtaggtacgccggtgaatgaaacaaaatgaaaaattaatttcagttacgttgcggcaaatgtctgctggtatatcgacgacgctgcggcacctctcgcactccatcgtgatctaaatcacaaataacggctgttttatcatcactattttgaaacatcagtccatttacgccgcaacctggatttcagaccatttatttcattaacaagaaatttgaaacttttataagtaaataactgaaatgaaaattttaaaactatgcagtaacagaattttgacagacatctaacattgccgcataaatgagcgaaaaatgagaagcagacaacgctttgaagcgatccctcccggcggggttggcatttacccgccggggaaatccgtgttgtcaggaagggaggcgccgtacgccttagtccacgttctcggcgctgtagaggataaagtcgactttaccgtcggcataggtttgcggctggtagccggactccagatggcgcagcatcaggtcgatcgccagctgggcgtgctggcgggtgttctgatcgagcgttaacgccaggctgcccttcgccagctgctgccgggtggtgttgtaacgctcatgggtgatccagcagacgtcgccttcgcggcggtggcgggccagcgcctcggcaatctgggtattgccaagcccggtgttatagatcccaacaatattccggctgcggcacagggcttgctccaccaggcgggtgatctgctcccgccgctcctcgcccgccagcacgtcgctgagctgcaggtggggaaagcgctggctcagcacctcgcggaacccctgaatgcgcaggcgatgcgcgctgtaatcttgccggccgctgaccatcagcacctcgccgggccgcggcgtcattctccccagcattaaccccgccgtgcggccagcctgcagctgattgatccccacgtggcagagtcggtcggcgccgggcaggtccgtcgccagggtgatcgccgggacgccagcctcccggcagcggcgcagcgcgtcgtgcaccgcgggatggtcattgccgaagacgatgatcccctgacgctgctggcaactacgcgcaatgcgccgggccagcgtcgtcggctgcgactccgggacaaaggtgcggtgcaaggtcagacggcgatagccgaggctatccgccacggcggcaaaatcctgcgccagctgcggaaagaaaaacgagtcattgctgctgagaaagacctcaacctgccagggaaagcggtgctcctccggcaggatccgcttcagccccgcctcgcgcgccgcctgcagcactttgcgcgtggtctgcggcgatacgccgccgcgctcgttcagcacccggtcaacggtggccacgccgacgccaatctgtctggccagcatcgccagtgaaatatttttcatcgcccctctcttcatgatggaaatccatcaaaacggcagtgtcagtgagtttagcaaaccgattatggtggcagcgtcccctcgccattctggagaaaaaaatgatctgcaaacgttttgccctggtaggcagtggttttatcggtcaggttcatgccgccagtcttgctcgtcatgaaggaagtgcgctgacgatggtggccgatgccgccccggagcgcgcccaggcgctggccgcccgctatggcgcccgggcggtgaccgtgagcgaggcgatccatagcgacgccatcgacgcggtgctgatcgccagttcaaccccgtcgcatgccgaactgctggaagccgccgcccgggcgggcaaggcagtctattgcgaaaaaccgatcgacctctccctggcgcgcgcccgtgaggtggtggagcgggtgctccccctgaacgtgccggtcactgtcggctttaaccggcgcttcgatagcagccatcagcagctccgccgccagctggagcaaggactgatcggccgggtcgagctggtgcagatggtctgccgcgcctccagcatgccgccgctcgactatctgcgcagctccggcggccagatgcgcgatcaggcgatccacttcttcgatctcctgcgctttctcactggcgatgaagtgcgcaccgtagcagcgatgggcgcggcgctggccctgccggacattgccgaatttggcgatgtcgacacctccatcctgatgatgcagatgcgcggcggcgcgctggcgcagttggacaatacccgccgcaccggccacgggtacgatgaacggatcaacctgctgggcgccgaaggcgcgctggagtccggtagccagtcgccggcgggccctaccctgtggcgcggcaatcagcgcattgagccgggcctgtggccggactggttcagccgggtacagggatcttattaccagcatcttgacgcctttattcgctccctgaatggtgaaaccgtcgccgacctgcccggcctgctggacggcctgcaggcgcaggccattgccgaagcggcggttcagtccctacagcatggccagtttgtcgccgtcgatgactgtcgctgagcgggtgcgaggcaaccgctatctagcgcagtacctgcctttatgccgggcggcggcaacgccttgcccggcctacataacacaggcattaatatgctttaatatcaaacggttgcatagatatcccaggcccgcgcaagcgcagcgccgccgggcaacagacatcaggcatcgtacgcgtccttttgccgggcaatggcagatacgctcgcgctatctgcaaaccaatgcccggccggctccttagcgttcttcgttaaacaccgcgcccacctggcgccgcacctcatccatcacctgcagattctgcagcacccgactgagcggccgcagcggcgagtcctgcaacccctgtccgatgcaccaggcaaaatgctccgcctgccagaacagctggtcgtagcgattgcgcggctcttcccagcgcagcacctgcccgccctggctggcggcgagcgtgaagccgccgggggcgtaaaactggccgtcgatcgtcagggtcgcctggcgtccggccaccaccgccccgcccggcgtgttgctgaacaaagtggtgtttaacaacccctgcatcccgttctgccagctaaacagcatcgacgtctgaccgttcagcccctccgccgtggcgctgccgcgggcgacaatctcctgcggcatgccgcccaccatcagcgcaaacgaggtcacatagctgccgaggtccatcatcggcccgccggcaagatcggcattgaagatgcggtgctcgggggtgaaatactcgccgtgatcggccagcagggtatgcaggtcgccgagcgccccatcctccagcagctggcggatcacatcatatttcggcgcgtaatcgcaccacattgcctccagcgccagcttctcctggcgggcggcttcggcctgcagctcacgcccttcgccgaggttgagggcgaagggcttctcaatcagcacgtgtttacccgccttcagcgcctgcatgccgtcgggaaagtgatggttgtgcggcgtcgcaatatacaccgcatcaatatccggacgcgccagcatctcctccacctggccgtaagcctgggggatcccccattccgcggccacccggtcggccttcgcctggctgcgggaagccaccgccaccacctgctgccggctgtaggttttcaatgagtgcacaaagcgctcggcgatccagccaggaccgataatgccccagcgcaggatgggaatgctctgcgccgccgggcggcgcggggttggtaagtgtgacggaaacatagcggctccttagtctttaaccacgttcacccagcgacggctggccatcgaggcttcaatcgccgacagcacgcgctgattctgcaaaccaaattcaaagttgggatagcagtcgccctccccgcaaatcccctgcaccaggtcatgcacttcgatcaccttgacgtcaaaatagcccagcccgccgccgccaaaatcgaagccgaagaagccggcataggccgggatctggctcccggcatacagcgtcttaaagccgcggtcatgtttgtcatcgttgaagcgatacacctgcagctcgttaaagcgctccccgtccatatacagcgtgccttcggtgccggagacctcccagaacacgccgaagatccgcccggcggcgatgcgcgaggcctcaatcacccccgcggcgccgctgtcgaaattgaccaggcactgaacctgatcgtcattttccacttcccgccactcggcatcggccgcgacccggctggcatacccggcatcggtttgcggcaccggacgctggcgcaggcaggtttgcgcgctggcggtcacttcgcggatcccgcccagcaaaaactgggcgacggacagggtatgggcgccgaggtcgccaagcgccccgctgccgccgagagttttcgagcagcgccaggaccagggcaggttcgggtcgttataaaacccctgatcaaaggtgccgcgaaagcgcaccggttcgccaatatcgccccgggcgataatctgctttgccagcagcgccgccggcgttttgatgttgttaaaagccaccatggtcttcacccccgcgcgccgtgccgcctgcgccatctcctgcgcctgctgctcattgaccgccagcggcttctcgcaatagacatgtttacccgccgcgatcgccgccattgccattgtgtagtgcagatggttcggcgaggtgatatccaccacatcaacctgcggatcgtttaccagctcgcgccagtcgccgtaggccttttccgcccccagtttcgccgcgtggcgttcggccatcgcctgatcctgatccgccagcgcgtagagatgcgggcgcttgggcagatcgggatagaacatcgccgcgcgacggtaagcgtcagcgtgtgcctgccccataaaacctgagccgataaggccgatatttaaccgcgcgctcatgatgcgtactcctctgacgatgaaggggaagataaatggtgcgccagccaggcataggcgcggctggcggtggccagcggcggcgccatcgccgggtcctgctcggcttcgataatcagccagccgcggtagtcgctgtcccggacaaagtcgaggatcggcgcatagtcgatgcagccgtcgcctgggatggtaaacagcccggcgcgcaccgcctcgttaaagctcaggttttcccgatatagacgccccagcacctgcggacgcacgtctttcagatgcagatggcggatacggtggccatatttgtgcaatacgcgcgggatctcgaccccggcgacaaaggcgtgcccggtatcaaacgccagcccgacgttgtcatgggtgtgagacagaaaccgctccagctcgtcatcgtgctccaccagcatcatcagatgatggtgataggccagctggaggtcatagtcgcgcagcagcaggtcggcaaaggtattcagcttgtggcaatacgccgccaggctgacgcggcttaacggcggcgagagcgaaataggctcatcaagcggggtttcacctggcagttgcccgcattcgccgtaaaccatcaccttcgcgccgagctgccggaggagctgggcgtgctcccgcaccgcctccagctccgcttccacgctgcggtcggccagcatgccgctgtaccagccggacgccaggcgcaggtcggccgccgccagcagcgggcccagggttgctgcctggcggggaaatttccgtcctaactcaatgccctgatagcccgcctcccgcgcctcgcgcaggcaggtatccaggggaatatcaccgcctaaatcctcgagtacatcgttggtccagcacagggggctcacgccccaccgcagttgctctgtcgccatcttgttctcctttccaccctgtggtcttgtctggcgtcactataagcaggtgacgaccgacgatgaaaacggagaaatgatggaaatccatcattgcgctggcggtatattcgctatttcaggtaaccctgaaaaataaatggaaataatgcttgccgccggcttattttgcggataaaaattactggcttaataacccgctccagaggttatccctttcattcgaaatatgatgatagcaatatgaaaacaactcaacaccgcaccagcgcgggcttttgccgcacgccaaggacaggcctgctgttatttgcctgaatgacacatagccgcttttaaaacatcaaataattaacattctctctgcaataatatgacaagcagtgggaaggttggcttgcgaaataagcatgaaactttgatgttttactaataaataaccccagagcctcttgctaattacttatcaggactggttgggttattttattctgacgccaacgggagaatacaccaacgtgtatccctctctctggcccggcacgccgctatcgcgatgagaaacaataagatgaataagacctggcttttcaccaccctgaccctggcgctggtcgccgccgcgccggcccacgccattagcgcgaaataccgggaacagcttgaacgttccggctgcacgcagatgaccgacgggatcacctgcgatattcataaaaccaaagccgagaatgccgccgccgcacagcacgccgatagcggcttcggcccctgggtgggcacctggtatgtttatacggagtatggcgataaaattgatgagattaccgtcaccgctaaaacggtgaaaacccgcggccatctggttgaggcggcgaaagccagccagggtaaactgaccttccgggtgaaaagctcagcctttacgctgaacgacgcctttaacggcgtatgggcaaacggcagccagcgcggcacgttgcaaaaagtcctgtaataacatcgctctgccgacaggccggggataatgcagggagaacctcccggcgcaggccgggagggagtgcaacggattacttctgcggacgcatggccgggaagaggatcacgtcgcggatggtatggctgttggtaaacagtatcaccatgcggtcgataccgatacccagaccggcggtcggcggcaggccgtactcgagggcggtcacgtagtcttcgtcgtagaacatcgcttcgtcatcgcccgccgctttggcgttcacctgatcctggaagcgctgcgcctggtcttcggcatcgttcagctcgctgaaaccgttaccgatttcgcggccgccgaggaagaattcaaagcggtcagtgatttccgggttgacgtcgttacggcgcgccagcggagaaacttccgccgggtattcggtgatgaaggtcggctgaatcagatgcgcttccgccacttcgtcaaagatttcggtaactatgcgtcccagcccccagcttttctctacctgaataccgatagattccgccagcgctttcgccgcgtcgaagttatccagatccgccatgttggtttccggacggtgtttcttgatcgcttcccgcatggtcagtttttcaaacggcttgccgaaatcaaacacctggtcgccatacggcacttcggttttgcccagcaccgtctgcgccagggtgcggaacagcgactcggtcagttcgatcaggtctttgtagtccgcatacgccatatacagttccatcatggtgaactctgggttatggcgtaccgagatcccttcgttgcggaagttacggttgatttcaaacacgcgttcaaaaccgccaaccaccagacgtttcagatacagttccggcgcgatgcgcaggtacatatcgagatccagggcgttgtgatgggtaatgaacggacgggctgacgcaccgccagggatcacctgcatcatcggcgtttcgacttccataaagccgcgggccaccatgaactggcgcatggtggcgaggatctgcgaacggatacggaacgtatgacgcgactcttcgttggcgatcagatccagatagcgctggcgatagcgaacttcctgatcctgcaggccgtggaatttatccggcagcgggcgcagggctttggtcagcaggcgcagctcggtgcagtggatcgagagttcgccggtttgcgttttgaacagcttgccgcgggcggcgatgatatcgccgaggtcccatttcttaaactgttcgttgtagacgccttccggcaggtcatcgcgcgccacgtacagctgaatgcggccgccgacgtcctggagggtgacgaaggaggctttgcccatcacacgacgggtcatcatccgaccagccaccgcaacttcaacgttcagggaagcgagttcatcgttgtccttcgcatcgaattcagcatgcaattggtcagaggtatgatcgcgacggaaatcgttggggaaagctacgccctgctcacgcagcgcagccagtttttcgcgacgagctttcagttcattattaaggtcaatggcctcatcggcaccttgtgcttgttgttcagacatatggattcctcataaccttgctttcaaactagcttcgataaattgaaccaggtcacccttccgcgcggcctgtctctgggaagacaccagagcacaatcttaacgatcctggattcactccaagctgatctcactcagctatggcttcagtaacggtattttttatcgttggcctccgcgcatgccagaatatcctcctcctgttcactaagctgtgcaaggagcgacttcgcgctccgctgttgaggtaatgcccccggtcgcgctgcgcttaccggggctacgaatcgcagcccggacaaggtgtttacgccacgagccgggacgagcgtcaggcgccgccgccggtaatttcaccggcagccgcacgacgtttgccaacgctacaggccgcggcaaaggcgataatgaccatcaccgccacgcagccgagggtccattcgcccatctgcgcgaagaaatgctgataggcggcaatcgccgtatcgctgatttgcgattcggtggtttgctgggcgaccacgcccgccagccagttggccaccgcgccggtggccagcatatagatcccggtcaatacgccggtgacgccgggcatgttcagacgggtgatttgcgccatcgccaccgggtcgataaacagttcggcaaagcccatcatcgccagcccggcgaccatcatgcccatcgaggcctgaccgtcagccgcgccatggcgggcattgagcgccagcagcataaagccgccgcccatcagcagcaggccgaaagaaaatttcagccagacgcgcagcacagaacgcacgctgccttccgggcgcatcagccacgccagcaccacgccggccgccatcaccgctatcgcgttaactgactggaacagcgcggtcggcacgtcccagttcagcagacgacgattgacgaagtggtcgataaacaggctaatcgagctcccgccctgctgcgccagcacccagaacagcgttccggcgagcatcagcaggacgatctgccacagcgcgcgtcgatgctccggggctttgatcatgatccgcgccaccatctgggcagcgaacaggcagacgatcgccagcagatagccggaccagttgttttgcagcagcagcgtgaaaaataccggcgccaggcagagcatcaccagcagccagccccaggtcggcagcacgaacttcaccgcccgcagcgccggtttatcgacgccgcgggtatgccggaagtggcggctgccgcttaagaaaatcatcaggccgataaacataccgatccccgcaagggcgaagccgatatgccagccgtaccactgcgccgccagtccgcaggcgatgggcgcggcaatcgagccgacgttgccggcggcgtacagcagcgagaaaccgccgtcgcgacgcgggtcgtcgtgagcgtacagttcgccgagcaggcagctgatattggatttaaacaggccgtagccgcagatgatgatcgccagcgcgacgtacaaactccatgcggaggtcgactcaacgcccagcaccacatggccgagggtcatcaacagcgccccggcaattaccgccgtgcggttgccgagcaggcggtcggcaagccagccgccgagaataggggtaacgtaaaccagagatgcgtaagcgctgaacaggctgatggcgtggctgtcgtcgaagccaagctggtgggtaaggtaaaggatgagtaaggcgcgcatgccgtaaaagctgaagtactcccagatctggatcgcaacgatgtagtaaatcgcgcgcggctgtgagggtgttttcatgtgttctccttgcagcgtgaaaaagggaagtggcaagccacttccctggtgtgcgtctattacttgttattctcttctttcagcactttaacggtgtaacgaccatccgcctgacgataggcgccgtggatatcggtttcgaagcctggatagtgggcgccgatttcgcacagcatctgcaggaactccagcaccggacggctctcttcggtgatcatctcacccggcatcaccagcggcactcccggaggatacggcaggatcatgttggcgttgacgcggccgaccatctcttcgagatacacttcttccgtctgaccgtgcagctctttctggaacgcggcatacggggtcatcaccatcgatggcagcacttcaaacgcgcggaacatcagatccggcaggttgtgatgctcaatcagtttgtgaatgttctgcgcgaggtcctgaatacgcatgttttcatagaattcaggatcttcacggtacagcgacggcagcatgtttttcacccgcaggttcaggtcgaacgcgcgtttgaagtcggtcagcgcacgcagcaggctcagcgctttagtcttatcgataccgatactgaacaggaacagcaggttgtacggaccggttttctctaccacgatgccgtgttcgtcgaggtatttcgctacgatgcttgccggaataccgaagtcatccatggtgccgtctttcttcatccccggagtcagcagcgtgactttgatcgggtcgaggtacatgtgttcattatcgatgtttttgaaaccgtgccatgcgctgtcggaacgcagcggccagcattcaggaccatcgatatgctccggctgccagacgtcgaagaaccagccgtcagactcgcctttcagacgtttgatctctttacggaacttgatggaacgttcaatagagccgtcgatcagacgcttaccagcgttccccttcatcatcgccgccgcggtttcggtggaggccacgatcccgtagtgtggagaggtggtggtgtgcatcatgtaggcttcgttgaaggtctcttcgtttacgtcgcctttcacatggatcatcgacgcctgggagaacgccgccagcagtttgtgcgtggactgggtttcataaatcactttcccttcgacgcggccgccgctcatcccgcatttgccttcatagatcggcgagaagttggtgtaaggcacccacgcggagtcaaagtggatggatttcacatccagggttttcttgatgaagtcggtgttgtatagcagaccatcataggttgagttggtgataaccgcgtgtaccggccaggtcgcattcggcgtctctttcacacgcttggcgatagtcgcgtgctggaattcgctctgcggaataccgccgaggataccgtaggcgttacgggtcggacggaagtagatcggcgtaatgtcgctcatcatcatcaggtgagtcagcgatttgtggcagttacggtcaatcagcacggtgctgccggccggcgcggagtacatgccgacgattttgttagcggtagaagtaccgttggtcaccatgtagctgcgttctgcgttaaacacgcgagcgatatactcttccgcttctttgtgcgggccgctgtggtccagcagggaacccagttcagaaaccgaaatggagatatcggatttcatggtgttggagccaaagaaatcgtagaagatgctgcctaccgggcttttctggaacgcggtaccgcccatgtggcctggggtacagaaggtatatttaccttcacggacatatttgaacagcgctttggtcagcggcggcagaatggtgtcgatgtattcgtcagtgttctgtttgattttgttcgcgatatcttccgcagcgcccagcgcatattcgaagaagcgaacctgcatgcgcagatcgttcaggctaacgtccagagtggagtaggtgttagcgaacgcatacagcggcatgtactcgttcattttgctgatttcttcgcacagttcgagattgtatttatcccagtcgaagatcacgccgcacagacgagagttgttttcaataagttttaataagtcgtcacggtcgttcgggtagacaatacggaagtccaggcgttcgagagcacgatgcagttcacggatgggttcttctttgaagtaaacccccatgtgattcatgattgcaataacgttcatagtcaaatctccagatgtagaaagcccctcccgtcgcgtgatgacaggtgatggaaggagcctcaggaaaacgggttgctgattagtgcacgttagcggtggtgttgttatccgatgcgttgttctggcgctggtgcattttgcgaccgtagaacatcaggataatcaggctaacgatgaaagtgccggccagttcgaaggagcttgcgcccatcagcgcgatgaagcagaacacgcaacccagtaccgaacaaatcaggctaacgaagttacggatgttgatgccttcgaaacgaatcaggtcaacacaggagtagaagtaaggcagcatggtcagcagtaccgcgataccggtcagttcgccgaacaggtcagaggctttaccaccggcggagttcatcagggtaatcagcaccatcagcgcggtcattttcactgcggccagcagcaggccttttttcggaataccgttgttatcaacttcgccatacactttcgggaagttaccgtcgttggcggcacgtacaccggcctggccaaccagcatcatccacgagcccagagaagtcaggcaggcaaaggcggtgaaagcggataccatcggtgcagcccagccgccgaggatggtagaggcgctaattgcgaacggcgcaccggacgcggccatctgagaagcaggatacataccggcgataacctgagtcgcggcgatatagacgataccggccatcgcagtgcccagcatggtagccagcggcacggtacgtttcgggtttttcaccatcccggtactcacggcggcggattctacgccaacgaaggcccacaggcagagcaggatacttttaataaccgcgtggctatcggtggtgctggaggtattccagttcgcctgataggtagcgacatcaaaccagtgccagccgacgaccgcggtcatgactaccggaataagcaccagtaccagaccaatagtggtcagacggctgacccaggtcccgccgagcatattaacgaaagtaaagatccacacgatggcaatacaggcaatacctgctggcaccgggttatttaaaattgggaagaacgtagagagataagaaactgcggtaatcccgatggccaggttaccaatccagtttgcatgataataaaggacaccggtctggaaaccgaatgccggagatatttcgccagcgtaggcaataggaccgccctgctgcgggtttttagtggccagtcgggcataaacataagccagagacatcgcaccaataattgaaatcacccagccccaaatggcaataccaccgatgctggccaggttcgcaggtaataatgcaatcccgctccccatcatattaccggcgacgacaccggtacaggcaaatagcccgatcttcttggcagaactcatggttgtttttctcctaagtttatttgggaggtacagatcatgatacagaaccattaattgacccgaccaactgccaacaagattactgatttgtacgagataagtcctaaagataaagtgatataaaaacaaacatcagacaaatgatattttgacctttttcgcttaacatataaacatgacaacagggtgtcagaaaaagataaacatcgttgtattacagcaacttacaagaagcagggcgtgttatctgactgttatttaaagcctcctgaatgctaaataaaaataacaacaagaggcttcatgagaaacataaatttaacctcaccatgcccaaaaccttgcacatgatgagggtttacttattctgaagagagaaagttgtcgagatatggaacgactcggttaaccgacgtctggaaaaccccattttcaatccagtacagggtatcttcgccaggacgtaaattaaacgccgtgatgtaagaatcggcagccagacggttctcacctttcatctcatagactttgcctaacagcacataatttagccatgacatctctaaatcaatcgcactattaattgcggtatttgcttcgtcgactttgcccttccccaatgaatccaccgcttttatttgataataaatcgccatgtcttttatacccggcatcgcccctacccgctcgacttcactgtagagggcggccagcggtttatcgtccagcggctgttgcgaatggcgcaatacatccaccagcgttttttcggcataggcgtaaataaaatccggcgcccgcttaatcacatcatccagcaggctactggccttacttaatgaatcgacgtcgcccttcattaacagctgatgcgactggtagaaataggttaacgccacgctttgcgagggctgatattgcctgagcatcgcctgcattcgcgccggccacggctgcgccagggcatccgacaggctgttcatcagatcgttctggatggtcagctggttatcgttggtcacaaagtagcgcttatccagcatcgtcgagctgtcggcgttgtccaccagctggaccgacataaagcactgctgcgcccgatagtggcgctgattgacgaactcgatggtcagcgttttcccggagctgctcggctcattgatgttgtagtccgttttgtcatgcaccataaaggtcgagaaggtgttcagcgaggtggtgatcaggctggccagtcctacggcgtaggagtgctgcgacgaccagttagcgcaggagttgccattcaccaggtggatatcgatatcgcgcggattgagcagcagacgcgccttgttgaccggcggccgcgattccatgctcgacagcgccaccagcgccacgcaggtgcccagcgccaacaggaacagcccccacaccagggcggtagtgaggcgcttgcggcctgacggcgcgctggccacggtaggagccggtggcggcgcggcggcatcagggagagggacagagacgtcggatggcgcaccggcggccggcggcgcaggaacggcggtcgacggcgcaggaacggcggtcgacggcgaaggcgtcagcgcctccatcgacggggctagctcctccccctcttcggtgcaccagatcaccggcaccgtgagcttatacccccgtttgggtaccgtcgcgatgtactcaaggctaacgtcgtcgccgtctttgagcgacttgcgcagttcagaaatactctgcgtgacgacgtggctggtcacaacgttccgggtccagacgttttcgataagctcgtcccggctaagcacttcccccggatggcgggcaaaaaagaccagaagatcgattaaacgcggttcaagggtaagctggcgccccttcctgctgatttggtttacagagggggttaccagccattcaccgacgcgaacaacaggttgtagcatacaagaaagccccagacaaaaagggaaaggcgcgatgataacacatttgtcctacctatttttgccaggggtcacttcctcaggcattaggccggaattggctctttattaacaataaaaagcaataattcattaacatcgtgatcatgaaatctatatatagcgataaaaacgcatttccgctgccgctattgcctaaggcaattccgatagcagaaaaaaataagcccggaggcttaacgcgctccaggctcagtgcgttgcgcgccgatacggcacgctttaaaaaaggttatttatacacttccgctgtggcttcaaagttagggccatgctcacgcgcagcggtgatcacgtagtactttccgcctttctcatcggccagcttggagagctgatcgtgcagatcggaaggcgaagagaattcgccaccggacggccccaccgagatcggcccgactttggtcagtttgaagtgtttcacttcttctttggtaatcaactgcgcggcggaggcgccaaatgcaacggcggaaagggctaacgcgactatcacttttttcatcctgcaatctccttggaattagccttcagtcaggccctttcagtatagacggcgatttactgagcgtgctaccgatgcgcttattttttggccgaggcgttcagtaacgcggcggtaccccttccgggcgggtcttaaagcgccggtgcagccacatgtattgctcgggcgccatcaggatgcactgttcgataatctgattcatccaggccgccgtaacctcggcgctcgccagcggcggcgtgcgctccggcgtcagggagatcaattcataccccatgccgttgggcttgcgccgcggaacaaacggcacaatcgtcgccccggacattttcgccagcatccaggtaccggtggtggtcgctgcctgttcgacggcaaacagcggggcgaagacgctgctggccggaccgtagtcatgatccggcgcgtaccagagaatttccccctcttttagcgccctgaccatccctttcagattttttcgatccagcatggtcttgttagagcgcaagcgtccccaggtttgcagccagtcaatcagcgggttatcgttaggacggtagacgccaattcctggggtaaacatgccgtacattcgcgcacccatttcgagggtcagaaaatggataccgatcagtaaaatgccctgcttttcttccagaagctccaccacctcgttaacgccgctggtctcggtccagcgcgctacccggtgcgtcggccagaaccaggccatgccggtctccatcagccccatgcccagcgattcaaagtttttcaccagcagcgcctcgcggtcggcggcgctcatctcgggaaagcagagttcgagattacgtctggcaatccgcgcgcggcttttcatcacccgcattgccagccgcccaagcgccgttcccagacggtagatcaccggatacggtaattgcaccagcagccacaaaaagccaattcccagccacaacagccagtaacgcgggtgcaacagcgcgcgggaaaatttgggtaaatttgacatagtaatcctgttaattcactcaataatagctgagcaaaaaccgcgaaataaagtagcggatcctgcacgtagtatttttccaattcgtgcggtaatactcaatcacaaagcgcgttattataagccgattccaggataaattcagcccttacgctggggactactctattattagacgcaacgcgtaaaatttcctgtttaatgcataaataaataaacctaacctctacggctcggccaattgtcgataaaatagccagtacatttgcctcagcctctcgaccaatacctcttttactcacgctttattatggcgatagcgaacgcaaacagtccgtttcgcccggtttgacacggccagcatgcggttatttgtgactggggcaaaggttaagcatcgacattgcggatccttttcccagatatgctacgtttacagcgctcattcgacgcaagtgcctttgccgacgtcgccgctttcagaagccatagtgagaaggaactatgacaatgaattatcaattagtgaagcaagtcagagaaaataacccattaagaaaaagcttcattgaccttgccgttaagacttttgacctgtcttttgaagagtggtatcagcaaggttactggaccgacgcctatatcccctatgcttttgtcgaacgcaataaagttatcgctaacgcttcggccaacatcatcgacctgcgctggcagggcgagccccggcgttatattcagattggcaccgtgatgaccgaaccggaccaccgtaataagggattagccggccagcttatccatcacatcctgcaggactggcagcaggaggcggacgccttctttttattcgccaatcccaccacggtggatttttaccccaaatttggcttcacccgcagcgaagagtatcaatatattatgccggtctccccgcgagccggtgattttcgtaaactggatatggacagccctgacgatgtcgccctgctccgccattactatgaaaaatccaacccgttctcaccgctgcgggtggagcataactttggcctgctgatgttttactgctcagcctttatgaagcattttgtctattactcggcaaaaaatgaggcggtggtcatcgccatgcaaaacggtccggtgctgatctgctttgatctattctgcgacgtgggcaagagcctgtcgacgctggtcaacgaactggccgatgaccacgtttaccaggccatcctcggttttacccccagtgaagaccggctcggcgagtatgagaagatagagggagaagatatcctcttcgtctatgaccagaaggaaaacctgtttaaagacaggaagttgatgtttcctttactggcgcatgcctgacggcgccgcgccgccaggcagatcagttataagtcaccacgaaggtcgcgctggcgttcgcttcgcccgcagtcactgcgggcccgttgaccgctcgccgcgtcgggagacgtaatcccgatagccctcgccaacgtaaatctgccgtggccggtagatggtcagcggcgcctggtgcatctcgttccagtgcgccacccacccgaccgtccgaccgaccgcggtgaccaccgcaaacattgacgaaggcagattcatcgctttaaggatcaccgcggtatagaaatccacgcttggcgacaggccattgtccacaaaataggggtcggtcagcgccacgtcctcaagggccatcgccacctgcagcaggcggtcggacatgcctacctccgccagcacccgatggctggtttcacgcaggatatcggcgcgcgggtcacggtgacggtagcgcgagttgccaaaacccagccggcgaaatgcctgcggatcgcgcttcgcctggcgcagaaacgccggaacctgatcgacgctttcaatctcctccagcattcgcatgctcgattcatttgctccgccatgcatcggcccccacagcgacgccagcccggcggcgacgcaggcgaataagttcgccccggaggagcccgccgcgcgcaccgtagtggtcgaggcgcactgcccgtgatcggcatgcagcaccaggatctggttcatcgcctgctcgataaccggattgagaacgtatttttccgccgggatagcaaacagcatctgcaggaaattaccggcataggagagatcgttgcgcggatacgccgcgggttgctcaatggtgtacttgtagctcatggcggcgatagtgggcattttcgacagcagccgggtggcggccagcgcccggtgctgcggattttccacgtccaggacgtcatgataaaacgccgccagcgcccccaccagggcgcacatcagcgccatcgggtgcgagtcgcgacgaaagccgctgcacatgcgggctatctgctcatggaccagagtatggcgggtgatggtctcgcgaaaggtttgatagctggcctcatccggcgcgtcaccgttcagcatgatgtaggccacttcgagaaaatcgcactggcgagccagctgatccaccggatagccgcggtgcaatagcacgctgttttccgtatcgatccacgagatcgccgactggcatccggcggtattggcgaagccggggtcatagctgcagaatccggactgatttagcccgcgcatgtcgactcccaccggcccccgcgttcccgacacctgcggcagggcgatgggcggttgttgtccggcaaaagaaagcgttaacggtgtagtgctcatcctgttagtcccccagcaagcttatcagcgacccgaagtcattcttcaggcggaaagaccaacataaccaatgtgatgcagcttattcattgatgtcatcactataaccctgacaaagaggatattttgctggccttcacggggaaacaggccgtctttccccagcccaccgccggatagcggcacaaatcgccaaggataaaggcgatcatcgctgtcaaaatttacgttgagtaaagaaaggatgaagaggagctaccatgaattttgtgctgtcgatgacccttatctgcatcgccatcgcctggctgatgatgagcctcctgccggtgtagatgcaccgctaaccgccacgccagtggtctggataacccctccttcaattgatttccgccgtggtcttcgcctctgaggtttcataagagccatataagaagtactggttgcatatcaggctgttgcgttttcccgccgaggggtaggctaaaggcccactgttaaggaggtgatatgtctggactgatcaatccacatgcggccccggaagaagcagcctatgcgctgctgattgagctcgttcgcgcccagcgcgtgccgcaatatgaaggcgaaatttccggcctgctggcgatgtacgacgaagccgttaaacactttaaagagaaagagaccgagcgttaggcgtggacatcgtggtgcgagaaaagcgtgacgcctgcggaagccgcgcaggcgttggctggatagcggcttgggtcatcagctgccgcggtaggtagagtatccgtactgactgagcagcagcgggatatgcagtttttgattttgctttgtgacattaaaaataaccggaatcaccgggaagaacgtattcatattttggcttttaaaatagtcaccggttttaaacgtcactttatacacccccggctccatattctccgcctgcggatagagcgatttaatccgcccatcggcatccgttttaccggtggcgatatgctgccagctctccccctgctgtttatccagctcaatctgcacccccggtgaagggagcccggtttgctgattaagaatgtgtacgctgagcgtcccctctggcgccgccagcgcgctgaagctgagcagagaaattacggaggcgataactaatttcataatcgtgaccttattgggcaagtgaaagtgccctaactatagtcagcgcggcggggaaaaaaattaaactttttgttatcagtttgagttgatgggtactgtctccacacacaacacgctgaaccggtttcctcgtaagaagaggaagtgtcttatgagtaggtagccccgtgctcttagtaacaggatacggtgacactaagtctatcaggcaggggaaatagatttgctgggttcaaatatcacaaggtaaaaagatatacgccgtggcctctgccgcctctaccagaacagtgcttactgcaaatgggctgcagtattcgaaataatcatttaatattatttaaactactattccagtgtaagtaatcacctggttcagatattgatcgttatcattgattctcttgtcgccacgccttaaccatctcctttgttacctctttcttgtagcaaataggtgagtacccaccagctttgctccaggcactgcggccaccgcacgagctgccgttccgggcggtattgaagggacaggcacaagtaccggggtaggatgcgacagagtcatcaataatcctttgactgacctgatcatcgcttaaggaattcgatttggcgatggaaatatctgatgcaaagacgcacacaacagcgaatacggagatggcgacgaatttgatgttcattcggatctttccaggtagtggatgaacatcgagggtatgctttcaaatagtgttcaatattgatctataacaactgtacttcacgccagcttaaaatgcgatatttaacccagtcagacagaacctaaagctataatgactattagcctgttaccggcaacatattttcacattcctgcagagcgcttattctgcactcagctataaccagcattaaccattctgttcgatattacagagcagtaatgctgtactctgactggccatcgtccgacagatactacaagacattagaatcatcgaaatggtccgtcgatatgctcacctggcacctaaccatttaactgagcacgcacgtcaaattgactcaatttttgcaaatttttgcagaagatgtcccaaatatgtcccacaaggaaaaatcagcgactggaggaagttgataagtgattgattattaaatggcacgccctacaggattcgaacctgtgacctacggcttagaaggccgttgctctatccagctgagctaagggcgccctgagaagcgagtgcttcgcggagtgaaacgcgtggaattatacggtccacgtcggttgagtcaatccattttgccaggaaactgcggggcttatacgacgctggcgaaatatcctccaccaactgtacaagaagcataccgccgggcctaatgcgcgcgtaaatcgactcagtggccaggcgcaacgcacttataaccatgtaataactatggccataacaggctaaattagcctcagacaggataaaacagcaaacgaggactgacagcgaggcccgcttctgacaaaatatcctcatccccctttcgtaaagatacagatggaatcctctctctgatggcagcaaaaattattgacggtaaaacgattgcgcagcaggtacgctctgaggttgcggaaaaagtgaaggctcgcgttgcggccggaaaacgcgcccctgggctggccgtcgtgctggtcggcagcaacccggcctcgcagatttatgtcggcagcaagcgcaaagcatgtgaagaagtgggcttcgtctcccgctcttacgatctcccggaaaccaccagcgaagccgagctgctggagcttatcgacactctgaatgccgataagaccatcgacggtattctggttcagctgcccctgccggcagggatcgataacgtcaaagttctcgagcgcatcgcgccggataaagacgtcgacggcttccatccttacaacgttggccgcctgtgccagcgcgcgccgcgcctgcgtccgtgcactccgcgcggtatcgtgaccttgctggaacgctacaatatcgacacctacggcctcaatgcggtggtcattggcgcctccaatatcgtcggtcgcccgatgagcatggagctgctgctggccggctgcaccaccaccgtcacccaccgctttacaaaaaacctgcgccatcatgtcgaaaacgccgacctgctgatcgtcgcggtgggcaaaccgggctttattcctggcgagtggattaaagaaggggcgattgtggtcgatgtcggcagcaaccgtctggaaagcggcaaagtggtcggcgacgtggtgtatgaagatgccgccgaacgcgcgtcctacatcaccccggttcccggcggcgttggcccgatgaccgtcgccaccctgatccagaacacgctgcaggcgtgcgaagagtatcacgacgttgaggaggcctgagatggcgacattttccttaggtaaacatccgcacgttgagctgtgcgatctgctgaagctggaaggctggagcgaaagcggcgcccaggcgaagatcgccatcgccgacgggctggtaaaagtcgacggcgcggtggaaacccgcaaacgctgcaaaatcgtcgctggtcagacggtgagctttgaaggccagagcgtaaccgtcacggcctgacaacgaaaagaaaaacgcccgcttttgcgggcgtttttttatggcttacttccggcgccaggtggtgccctgcgggccgtcttctaacacaatccccatctcgttaagacggtcgcgcgccgcatccgccgccgcccagtctttcgctttgcgcgcgtccagacgctgctggatgagcgattcgatctccgccacttccgcgtcgtcaacctgcgcgccgctctgcaggaacgcctccggctcctgctccagcagacccagcaccgcagcaagcttacgcaggtgggccgccatggcgttcgccgcggccgcgtcctcggttttcaggcggtttacttcacgcgccatatcgaacagcaccgaataggcttccggggtgttgaagtcgtcgtccatcgcctcgataaagcgtgcttcgaaggcttcgccccccgccgcgtcgacggatttgtccgtcccgcgcagcgcggtgtacagacgctccagcgccgaacgcgcctgcttgaggttctcttcgctgtagttcagctggctgcgatagtggccggacatcaggaagtagcgaatcgtctccgcatcgtaatacttcagcacgtcgcggacggtaaagaaattacccagcgatttcgacatcttctcgcggtcaaccatcaccatgccggagtgcatccagtagttgacgtattcgccgtcgtgggcgcaggtggactgggcgatttcgttttcatggtgcgggaacatcagatccgaaccgccgccgtgaatatcgaagtggttgccaagctgcttgcagttcatcgccgagcactcgatatgccagcccggacggcccgcgccccacggcgacggccagcttggctcgccctctttcgacatcttccacaggacgaagtccatcgggttacgcttgacgtcaaccacgtcgacgcgcgcccccgcctgcagttgatcgagatcctgacgcgacagcaaaccgtagttcgggtccgtcggcacgtcgaacatcacgtcgccgttatctgccacgtaagcatggcctttggcgatcagctgctcggtgatctcaatgatctccgcaatatggtgcgttgcgcgcggctcgctgtcgggacgcagaatattcagcgcgtcaaaatctttgtgcatttcggcaatcatgcgatcgaccagcgcgacaaagctttcgccgttttcattagcgcgcttaatgattttgtcgtcgatatcggtgatattgcgcacgtacttcagcttatagccgagaaaacgcagatagcgcgccacgacgtcaaaggagacgaaggtacgtccatggccgatatgacagagatcgtaaacggtaataccacacacgtacatgccgacttccccggcatggataggtttaaattcctctttctggcgcgtcagtgtattaaaaatttttaacatcgaagattccgtgtagacgtgtgtgggtaatgaagtctctataatacccataattcagaccggacgcagcacacattgcaaggtgcatcgacccccgcggttatgctataacacccccctatatctcacccgacaccgggtgctggcaccacactcatcggaacaggatgcaaaaatggttactttccacaccaatcatggcgatatcgtaatcaaaacgtttgacgacaaagcgccggaaacagttaaaaacttcctggactactgccgcgaaggtttctacgacaacaccattttccaccgtgttatcaacggcttcatgattcagggcggcggttttgaacctggcatgaaacaaaaagcgaccaaatctccgattcagaacgaagcgaacaacggtctgaaaaacacccgcggcacgctggcgatggcccgtactcaggcgccgcactctgccaccgcgcagttcttcatcaacgtggttgacaacgacttcctgaacttctccggcgaaagcctgcagggttggggctactgcgtcttcgcggaagtggttgaaggcatggacgtggttgacaaaatcaaagcggttgccaccggccgcagcggcatgcaccaggatgtgccgaaagatgatgtgatcatcaaaagcgtcaccgtcagcgagtaattcgtggcgacactttttattgcagatttgcacctgcaaacagaagaaccggcgatcaccgccggttttctgcgttttttacagggcgaagcccgccaggcagacgctctgtatatccttggcgatctgtttgaggcatggatcggcgatgacgatcctaacccgctgcaccaacaaattgcctcggcaatcaaagccgtcgtcgacgccggcgtgccgtgctacttcatccatggcaaccgcgattttctcgtcggccagcgctttgcccgccagagcgggatgatcctgctcgccgaagaagagcgactggacctctatggccgtgaagtcttgatcatgcatggcgacacgctgtgcaccgatgaccaaggctatctggcgtttcgcgccaaagtccacaccccgtggatccagcgtctgttcctggccctgccgctgtttatccgccgtcgcatcgccgcccgcatgcgcgccgacagcaaagccgccaacagcagtaaatcaatggaaattatggatgtgaatccacaggcggtagttgacgcaatggagcggcatcacgtgcagtggctgatccacggccatactcatcgcccggcggtccatgaactgcaggccaacggccaacccgcatggcgtgtggtacttggcgcctggcacagcgaaggttcgatggtcaaggtgacgccggacgacgtcaaactaatccactttccgttctgattcctgcgcgagcacaattccgaaagcgccttttgcccgggcgaaggtgcgcgcttccccccgccctgcatgctagtcttccacaacgtcactctcaaggaacgagcatgagcaggaaaaagtggagtcagccgctgacgtggggaatgatcatcgcgatcctcaatccgttaggggtaagttatatcgccttaatcggcgtcgttatcggcaacacgctgacgtttgtctggtgtgcgatgctggcgtgggctatctatttttatgccatttatttgctctgcacccgccctcacgatagccggctggtacaaatctatttactgcttatgggcaccctgatgctcccgtgggggttagtgctgcttatcacctgtatcatgagggagataaaggtcaatcaggcactcacgccatcacctccaggcgagacaaaagacggctaaccatgcgcacgcaaccgttttccttgctggcagttcatgctattctctgtggcctctaaagcagtgtgaaacacacccacaggagttttaagacgcatgtcttcccgcaataattcggcgcgtatcgccatcgtgatggggtccaaaagcgactgggctaccatgcaatttaccgcagaaatccttgatgccctgaacgttccgtaccatgtcgaagtggtctccgcccaccgcacgcccgataagctgttcagctttgctgaaagcgccgaaagccacggttatcaggtgattattgcaggagcaggcggcgcggcgcatctgccgggcatgattgcggcgaaaaccctggtgccggtgctcggcgtaccggttcagagcgcagccttaagcggtgtcgacagcctctactccattgtgcagatgccgcgcggcattccggtcggtaccctggccatcggcaaagctggcgctgcgaacgccggcctgctcgccgcgcagatccttgcccagcacgatgctgaactgcaccagcgcctgagcgcctggcgtcaggcgcaaaccgatgaagtgctggataatccggatccgcggggtgcggcatgaaacaggtatgcgtgctcggtaacggccagttaggccgtatgctgcgccaggccggcgagccgctgggcatcgccgtttggccggtcggcctggaagccgacccggaagcggtgccgttccagcagagcgtcatcacggcagaaattgaacgctggccggaaaccgccctcacccgcgagctggcccgccacccggcgttcgtcaaccgcgatgtcttcccgattatcgccgaccgcctgacgcaaaagcagctgtttgacaagcttggcctcgccaccgccccgtggcagctgctggcggataaaagcgagtggccggcggtgtttgctcgccttggcgaactggcgatcgttaagcgtcgcgttggcggttacgacggccgcggccagtggcgtctgcgggaaaacgagatcgatcagctaccggccgataactacggcgagtgcatcgtcgagcaggggattaacttctccggcgaggtatcgctggtaggcgcccgcgctcatgacggtagcaccgtcttctacccgctgacccgtaacctgcatcaggacggtattctgcgcgccagcgtcgccttcccgcaggccaacgctcgccagcaggaacaggcggaaagcatgctgacggcgatcatgaacgagctgaactatgtcggcgtgatggcgatggagtgcttcgttaccgccgaggggctgctgattaacgagctggcgccgcgggtgcacaacagcggccactggacgcagaacggggcgtctatcagccagttcgagctgcatctgcgggcgattaccggcctgccgctgccgccgccggtggtcaacagcccgtcggtgatgatcaacctgatcggcaccgatcttaactacgactggctgaagctgccgctggtgcacctgcactggtatgacaaagaggtgcgcccgggtcgtaaagtcggccacctgaacctcaccgacagcgataccgatcgcctgagcgcgacgctggaagcgatcaagccgctgctgccgccggagtacaccagcggcctgttgtgggcgcaatcgcagctcagctaagcccttcgtgccggggatttgatctatccccttccccggcacaccttgaggcgcgtacaatcccccccttgctgtaaagctcatttctgttttgacttcagaggataccccatgaccaatgggacggattatcgcgccattctcgccagcgatacgccactgattgacgtacgcgccccggtggagtttagccaaagcgcgatgccggcggcgatcaacctgccgctgatgaatgatgaagaacgcgccgcggtcggcacctgctacaagcgccaggggccggaagcggcgctggcgctcggccataaactggtccagggtgacctgcgcgccagccgtactcaggcgtggctggaagcgtgcgcccgttacccgcacggttacctgtgctgcgcccgcggcggccagcgctcgcatatcgtccagcagtggctgaaagaagctggcgtggattaccccctgatcgtcggcggctataaagcgctacgccaggcggcgatccaggccaccgacgaactggtgcagcgcccgatcgtgctgattggcggctgtaccggcaacggcaaaactcagctggtttgctcgcgcccggacggtatcgacctggaagggcttgctcatcaccgcggttcttcattcggtcgaaccctgcaggatcagcatccgcaggccacctttgaaaaccacctggcggtcagcctgcttaaaaaagccgaacagcagacccgctgggtgctggaagatgaaggccatatgatcggcgccaatcatctaccggagagcctgcgcctccgcatggcgcagtcgccgctggcggtggtggaagatccgtttgacgttcgcctcgaacggctgcgcgaagagtatttcgatcgcatgtatcgcgactttatcgccgcgtatggcgaagagaaaggctggcaggcatacggcgagtatctgcatcacggcctgtttgccatccgccgtcgcctggggctgcagcgttttgctcagctcactgaacggctcgatgaggcgctggtgcagcagcagcgcaccgccagcaccgaggcgcactttgcctggctggtaccgctgctggaagaatactacgacccgatgtatcgctatcagttggggaaaaaagccgggaaaattctctttcgcggcagctggcaggaggtcgcagcctggctggcgaagtaatcgcatgctctattgtcccggcttgcggcgtaaacgccttagccgggctaccggtcggcgcgatttgtagccacggtaagcgcgcgcgaccggggagttgtgaccgcttagaagtcgtagcgcagacggaccaggttcatatcgccaaggttgtcggtgctggaggtaaacacgtgttcgtagtcaacgcggaaaccgtaatccagctggaagctaatccccagaccgttatcgatacgctggtagttgcggccgttcacatattccagacggtcgcccataaagtacggctgaatagatttaacagcgtattgattgatcgggaatttatagcccgcaaaatattcaatcccccaggcgtcaccggcaaagtaattatgcacatcggttttcttggtggtgaggaagttctgataccagccgccgccgaaggagaaggtccagttatccggggtccagctcatcgcggtaccgacgatattctggtcataggttttgctgtcggcgcttgacgggtcgcgcatttcggcgcgggtgtagttccacgcggtaccccaggtcagatccttcatgatgtggtagtccgcgccaacagaaccaccgcctttacgcttgtaacgcaggccgttacccggcaggtattcgctgtcttcgaacagataagagccgtaaagatcgacatcacctacagttttcttatatttcagcatattacgtgaacgataggagccatcgtaatcgccattaataccgttccccggggcctgaccgatcatatcgtagtcccagatatcggttttcacccccaccacatcatagtaaatgctgttctgctgcccgtaggttaacgtaccccaggtatcgcttttcaggccggtatacagcatgcggcgggtggtattgttcgcgccttccgcgtagtggttatcccagtcaaacagcgccggaatgttcacgcccagctcatagtagctgatccagctaatatcatcgaacaggtagtaatccgccgcgaagcggaagcgggtgccgccgtcaaaaccgttacgcttataggagcctttgtcgccatcgccggtcatcatgttgaactgcggccggatactgccgccgacggtaaagttaagccggcttaacggatcgcccgcctgcggatcttgtttcagcagcgtaatctccgcgtgggaaggcaatgacgttaacgctaatgctgcgccgatcgagatcgccagcgcttttattgtgtgtgccatagtttttccttgattaataagccaccttatattttccagttgaatattaaccgcgaatcagcatagcgtgttgttgggtttttaatgttttgtgctcttaaaaatcaatgatttatcaatttgtgcgtttaaaataaaagcgccgccaaaaacggcggcgcatcatcaaaatgcaatattcttactggctaaactggcggaatagcgcttttccttttaacagacgcagccccagcccgccgccgcacagggataacaacaccgctcccgtcagcggcagcaacacccacaggcgccagtccggcgcccagggaaaatcaaagactttcgtctgcagcatcgccagcgccacttccgcgcctatcgccgccaccaggccggaaaccagccccagcagggcaaactccgcccacagcgtagcgcgcagcagcgattttccagcccccagcgtgcgccagaccaccagctcctgatggcgttgacgcataccgacctgcacctgcgccagcaacagcagcacgccgcaggccgtcaccaggcctaccatcacctccagcgcccggctgacctgggagagcacctggccgacctgacgcaggatggcgccgatatccagcatactgacggtgggaaactcgcggttcagctgggtcaacatcgcgggaccgttatcccagcggaagctggtgagccagctctgcggctgcccgtccagcgccccggcggggaaaataaagaagaagtttggccgcaggctctcccagtctactttgcgcgcgctgctgaccttcgcgctgaactcctgggtatcgccggtaaaggtcactgtatcgccgatctttatccccagccgctgcgccagcccctcctcaatcgatacctcgcccggcttcggcggccagctgccggccaccagcggattatgatccggacgctgttcgctccaggtgagattaagctcgcgattcagcgcttcgtctttgttcccgtccgtggattgaccgttgatctgcgtcagacgggcccggacgatcggatagaattccgccgcccgcgtctggtgttcggcgaggaaggtcttcaccggcactatctgctcaggggcgatattgatcagaaagtagttcgggctctgcgggggcaactgctgctgccagcggtcaagcagatcgccgcgcagcaccaacaggagcgccagcagcataaacgacagggaaaacgccgccagctggctgagggtcgaccacggctggcgcagcaggcggttcaccgccagacgcagcggcaaggctttgagcgtcaggcgtttgagcagccacagcaatccccagcccaccaggccgcacagcagcgccagcaccaccgccccggccagcaccgaccacagcagcgggctgccgcccagcagccaggccaacaggcccaccaccacgacgctaaccgccgggatccagattttcaacggccagacgttagccaccacatcctgacgcagcactcgcagcggcagggtcgccagcagcagtcgatagggtcgcaggcccaccagcagggaaatgacgcctgtcgccccgatagcccacagccacggccaaccgctggcagcgggtaacgcggcgggcagcaccggtttgagcaccagcagcagcagacgctccagtgccaggcccgccaccccgccggttatcaccgacagcgtcaacagcagcagccattggccgacgataagcttgcgcagctgcgaccttccggcgcccagcgtcttgagtatggcgaccagatcatagcggctgcggcagtagtggctcatcgctaccgccactgcggcgacggccagcagcagcgtcaacagcgcggataacagcaggaattgctgcgagcgctcaagagatttgcccagcgcgctgtcgtcctgttcaaggccaatccagcgatgttccgggccgagcttcggcagcagccactgctcataattggccagctgttcagcgtcgccggcgaacttatatcgccatgcgacgcgactgccgggctgcacggccccggtttttgccacgtcggccatattcatcatcagtcgcggcgccatctggaaggggttaaaccccgcatccggctcctgaatcacctccccggcaatgcgcagcgtggcatcgccaacgtcaatcgtatcgccggttttcaggttcaggagcgccatcagccttggcgccagcagcacgctccccgcctgcggcttcagccccggcggctgcgtctcgagggtgccatacagcggataacggtcgtccaccgccttaacgtccgccagctgcggcgtatccccggcgaacgtcatggtggcaaagctcagctgctcgccgacggtcagccctgacttccgcgcctgtgcgatccactcggcgggcacctcgcgcgaactgcgcagcgtacggtcgccggccataaactcacggctttgctggctaaggcctttctccatccgatcgcttatcgaccccagcgccagcacgcaggccacggcgaggcttaacgccagccagacgatcagcagcgacggcgagcgccattcgcgccagaaccagcgggcgatcatgcttcctcccgcagctggccatccaccaggcgcagacggcgatcgcagcgcgccgccagcagcggatcgtgagtgacgaggatcagggtggtgccgtgttcgcgattaagcgagaacagcagatcggcaattttgtccccggtctggcgatcgaggttgccggtgggctcatcggcgaacagaatggccgggcgcccgttaaaggcccgggccagcgccacccgctgctgttcgccgccggagagctgcgccggcaggtggtgcaggcgtttgccaagtcccagctgctcaagcagcgcgcgggcatcgccccggctctggctatcgctggcgccgcgcaacagcgccggcagctcgacgttctccagggcgttgagcgtcgggatcagcataaacgactgaaaaacaaaaccaacgtgctgcgcccgcagcgccgcccgcgcctcttcatccatccggtgcagcggtttgcccagcatcgatacttccccgctgctgccatcgtcgaggccggcgaggatcgccagcagggtcgatttaccggaacccgactcgccgatcagggcgatggtctgccgcggtttgacaaccagctcaactccggtaaggatggagagctgatgctccccctgaccgacggacttcttaagatgatgaacttcaagtatgttttccgctggcatgtgcctttcctgttgttgttcctgtttacctgccgcgcgatggcggcggacacgctgctgatcctcggcgacagcctgagcgctggctatcggatggcggccaacgccgcctggccggcgctgctcaatgagcagtggcaggcgaaaacgccggtggtgaacgccagcatcagcggcgatacctcgcagcaggggttggctcgcctgccagcgctgcttaagcagcaccagccgcgctgggtgctggttgagctcggcggcaatgacggactgcgcggttttccgccgcagcagaccgagcagacgctgcgcaccattattaaagatatcaaagcggccaacgccgagccgctgctgatgcaaattcacctgccggcgaactatggccgccgctataatgaagccttcggcgcgatttacccggccctggccaaagaattcgctattcctctcctgcccttttttatggaggaggtctatctcaagccgcaatggatgcaggacgacggcattcacccaaatcgcgacgcgcagccgtttatcgccgactggatggctaagcggctggctcccttagttaatcatgactcctgaacgccaggggtcgctgacaggtaaagttatgcaaaaaacggttttagtgacaggctgttccagcggaattggtctggaaagcgcgctggatttaacccgccagggctttcgcgtgctggcggcctgccgcaaagcagaggatgtcgcgcggatgcaggatctggggctaaccggtattttgctcgatctggatgacccgcagagcgtggagcgcgcggcagcggaggtgattgcgctgaccgataatcgtctctacggcctgttcaataacgccgggtatggcgtctatggcccgctgaacaccatcagccgccagcagatggaacagcaattttccgctaactttttcggcgcgcatcagctcaccatgctgctgctgccggcgatgacgccgcacggcgaagggcgcatcgtgatgacctcctcggtgatggggcttatcgccagtcccggccgcggagcctatgccgccagtaaatatgccctcgaggcgtggtccgacgcgctgcgcatggagctgcgccacagcggtattcaggtcagcctgattgaaccgggcccgatccgcacccgctttaccgataacgtcaaccagacgcaaagcgataagcccgtagaaaatccgggcatcgccgcccgctttaccctcgggccggaggcggtggtggaaaaagtgcgccatgcttttaccagcgataaaccaaagctgcgctatccggtcaccctggtcacccacgcggtggcgctgcttaagcgcctgctgcctgcccgcgcgatggacaaaattatccacggctgagttgaagcgcggaatgccgcccccatgtaaaacagaaatcgactaacgagaaatgcccatgtccgaacagaatattgtcaacattagcgaagcgaacctgcagcagacgctacagcagtccatgaacgttccggtgctgttttatttctggtctgcccgcagtcagcactgcgaacagctgaccccggtgctcgagcgcctggcagcccaatacaacggccagttcacgctggcgaaggtcgattgcgacgccgagcagatgctcgcctcacagtttggtctgcgcgccatccctacggtttatctgttccagaacggccagccggtggatggttttgaaggcccgcagccggaagaagcgatccgcgccctgctggataaagtcctgccccgtgaagaggagctgaaagctcagcaggcgctggccctgatgcaggaagaaaaatacgccgatgccctgccgctgctgaaggaagcctggcagctgtcgaatcaggaaagccagattggcctgctgctggcggaaacgctgattgctctacaccgttccgatgaagcggaaagcgtgctgaaaaccattcctctgcaggatcaggatacccactatcagggtctggtggcgcagattgagttgctcaaacaggccgccgacaccccggaaatccagcagctgcagcagcaggtggaacagaatccggaggatgcgcagttggcctcccagctggcgctgcagctgcatcaggtcgggcgtaatgaagaagcgctggccctgctgttcagccatctgcagaaagatttaggcgccggcgatggccaggcgcgcaagatgctgcaggagatcctcgccgccctcggtactggcgatgcgctggccgccaaatatcgtcgtcagctctattcgctgctgtactaatccgttgccttccccggatagcgctgcgcttatccgggctacgcgaactatgcggaacgtagcctaagtagcccgggtaaggcgtgaacgccgcaacccgggatcgttcacgggcgctttttcagctgcgtcaccactagctgatggcgggcgttgaagaacttccggtaggtcagatagccggcgataatcgtcgacaggctggcggtcgacagcagcataaaggtcaccatgatctggtacttaatcgccttcaccgggtcaataccggcaaaaatcagccccgacatcatcccaggcaagctcaccagaccgaccgttttcgccgaatcgacggtgggaatcaatgacgcgcgaatactctcgcgaatcagccgcgctgaggccatcttcggcgtcgcgccgaggctcagtttctcctgaatctgctgctgctcgctgctgaagcgctggcccatattgttgtagcacagccccaccgccaccatggcgttcccggccaccatcccggcaatcgggatcacctgcatcggcacgaaggcgatcgagccagaaaacaccagtaccgccagcgttagtccagcgccagtagtgatggcgataaacgacgagataaaagctttgtcgatatatttactgcgcttcttcgcattccacgccgcgttaaagcagataaacagcaccatcaacagcgtcagaaccgcatgattgacgttaaagatatatttcagcacatagccgacgattatcagctgcacgatcgcccggcaaatactccagataatatctttttccagcgccagcttttcccgatagctgaccagaatagcgatcagcaccagcaccatcgacagcgccagcgattcgttcgtaatgttatgcccgttcatgctgtacctcctgcatatttccgccggcaggttgcagcgtaatcacttcatcggcatgcgaaatttcattgcgatcgtgggtgacccacagaacagcgacctgtttttccgttgcgtagccatgaataatttcattcacattctgtttattactttcatccagcgcgctggtaatttcgtccagcagcagcacgcgcggcagaaattgtagattgcggatcagcgatacgcgctgcttttccccgccggagagttcgttaatggatttttccagcatattttcgtcaaggccaaagcgctgcaggtcggccagcagcgcctgcggatccggttgtttattgcggatctgccacggaaaaatcagattatcgtaaaccgaatcaccgaacagggccggcgtctgcgcgcagtaagagacctgttggcgatacctttccggcgacagcgtcgcgacatccgcatcgtcgaagaacaggcgcccggaggttgggctgagcagcgaggcgataatcttcagcaaggtacttttcccgcagccggaagggccggtaatcaacttgaattctccggcgcgaagctgaaaactaatattgtgtaaaataacggcgtcgtcggtcttaaaccccacaccgtcgagacgcaaaagcgcgttattttccttcatgagtcttcctgattattttctgaaacaccgctagtttaccgcactttcctttctccaggatgaggagaaagatatactcagtttaaacatgcgctatttccttgtagcgccccgccaggcaacaagacaggaggtttttgatgctgatttttattcctatccttattttcgtcgcgctggttattgtggccgcggcggtgaaaattgtcccgcagggctaccagtggacggtggagcgcttcgggcgttttacccagacgctgcagccgggattaagcttagtcgtgccgtttatggaccgtatcggccgcaaagtgaacatgatggagcaggtgctcgatatcccctcgcaggaggttatctcccgggataacgccaacgtcaccatcgacgcggtctgttttattcaggtgatcgacgcgccaaaggccgcctacgaggtcagcaatcttgagcaggcgatcgtcaacctgacgatgaccaacatccgtaccgtgctcggctcaatggagctggacgaaatgctctcccagcgcgacagcattaacacccgcctgctgcatatcgttgacgacgccaccaacccgtggggggtgaaaatcacccgcgtcgaaattcgcgacgttcgcccgccggcggagcttatcgcctcgatgaacgcccagatgaaagccgaacgtaccaaacgcgcgtacatccttgaggccgaaggggtgcgacaggcggaaattctgaaagcggaaggggaaaagcagtcgcagatcctcaaggccgagggcgaacggcagtccgcgttcctgcaggcggaggctcgcgaacggtccgccgaagcggaagcccgcgccacccaaatggtctcctcggcgatcgcctcaggcgatattcaggcgatcaactacttcgtggcgcagaaatacaccgatgcgctgcagcaaattggcgccgctaacaacagcaaagtggtattgatgccgctggatgccagcagcctgatgggatcgatcgccgggatcagcgagctgatcaaagaaggcgctggcgatcggaaaaaatcatgatcggcatgatcctcgcacacccccatctgttctggctaagcctcggcgggctgctgctggcggccgagatgctgggcggcagcggatacctgctgtggagcggcgtcgccggcgtggtgaccggcgccctgacctggctcctgccgctgagctgggaatggcaaggcacgctgtttgccgttctcaccctgctggcggcgtggctgtggtcgaaatggctgcgcaagcgcgtcaaaacgcagcgcccggccgatgcccagctcaaccagcgcgggcagcaactggtgggccgccgcctgacgctggatgccccgctggtgaacggccgcggccacgtccgcgtgggcgatagctcctggccggtgattgccgatgaagacttcgcggcgggcagcaaggttgaagtgattgccgtagaagggattacgctacgaatcagacccgccgtccgttaagcctgcgccttgcgatggcagcagccggaaagattatcgataatcgggcactccgcgctgtcgtcgccggggcaggattcggccagcgccagcaggtgcgcgcgcatattttgcagctcgcggatatggttctcgatatccgccactttctccagcgtgcgttttttcacatcggcgctgtgccgcgacgggtcgttgaacagggccaccagctcgcggcactcttccaggttaaaccccacctgccgcgcctggcgcagcagcgtcagctcatcgagatgctgctgactataggtgcggtagccgttttcgctccgcaacggcggcgtcaccagccccttctcttcataaaaacgaatcgctttgctggttaagccggtttttttcgccacatcgctaatattcattttttctccttgaccttccccttgctggaaggtttaaccttcttaatactcgatgaaagagtgggtctggtcaatcgttgaccggaaaattattcaggagttatttatgtctaacactatcgacctgacgctggatggcctctcctgcggccactgcgtcaaacgcgtgaaagagagtctggagcagcgtcctgacgttgagcaagcggaagtcaccctcactgaagcccatgtgacgggcagcgccagcgcgcaagcgctgattgataccgttaaacaagccggatacggcgcggagctcagccacccaaaggctaaaccgctggcagaatcatcaatcccgtcggaagcactgacagcggccactcctgagcttccggcagcccatgacgaagatgacagtcaacagctgctgatcaacggcatgagctgcgccagctgcgtctcccgggtacaaaacgcgcttgccgcggtgccgggcgtctcacaggcacgggttaacctggcggaacgcacggcgctggtgatgggcagtgcgtccgccgcagaattagtgcaggcggtggagaaagccggctatggcgcggaggcgatcgaagacgatctgcaacgccgcgaacgtcagcaggaaaccgccctcgcgacgatgaaacgttttcgctggcaggcgattgtcgccctgctggtcggcgtgccggtgatggtctggggcatgatcggcgataacatgatggtcagcgacgacaaccgttcgctgtggctggttatcggccttgtcaccctcgccgtcatggtcttcgccggcggccacttctaccgcagcgcgtggaaaagcctgaaaaacggcaccgccaccatggacacgctggtggcgctcggcaccggcgtcgcctggctgtactcgatgagcgtcaacctgtggccgcagtggttcccgatggaagcccgccatctctattacgaagccagcgcgatgattatcggcctgattaacctcggccatatgctggaggcccgcgcgcgtcagcgctcctcgaaagcgctggaaaaactgctcgacctgacgccgccttcggcgcgggtcgtcacgcccgagggcgagaaagatctgccgctcgcggaagttcaggccggcatgacgctgcgcctgactaccggcgaccgcgtcccggtcgacggcatgataagccagggcgaagcctggtttgatgaagcgatgctcaccggcgaaccggtgccgcagcaaaaaggcgatggcgacgccattcacgccgggaccgtggtgcaggatggcagcgtgctgtttaccgccagcgccgtcggcagccagaccacgctggcaagaattatccgcatggtgcgccaggcgcagagcagcaaaccggagatcggccagctggcggataaaatctccgccgtatttgttccggcggtggtcgtcattgcgctgattagcgctgcgatctggtacttcttcggcccggcgccgcagatcgtctataccctggtcattgccaccacggtactgattatcgcctgtccgtgcgccttaggcctggcgacgccgatgtcgattatctccggcgttggccgggcggcggagtatggcgtgctggtgcgcgatgccgatgcgctgcagcgcgccagtgaactcgacaccctggtgttcgataaaaccggcaccctgaccgaaggcaagccgcaggtggtggcggtgaaaactttcgctggcgttgatgagcataccgcgctgcgtcttgccgccgcgctggagcagggctcaagccatccgctggcgcgagcgatccttgataaagctgccgacggcccattgccggaagtcagcggcttccgcaccctgcgcggccttggcgtcagcggcgaggcggaaggtcatcgtctgctgctcggtaaccaggcgctgctcaacgagcagcatatcaataccgcggaggtggaaagcgagatgacagcccaggcctcacgcggcgccacgccggtgctgctggcggtggatggtcaggccgccgcgctgttcgccatccgcgacccgctgcgcgaagacagcgtcgacgccctggcgcgtttgcatcggcagggctaccggctggtgatgcttaccggggataaccccaccaccgcgaaggctatcgccaaagaagccggcattgatgaagtgatcgccggcgtgctgccggacggtaaagccgatgccattaagcgtctgcagagccaggggcacaaagtggcgatggttggcgatgggattaacgacgccccggcgctggcccaggcggatgtcgggatcgccatgggcggcggcagcgatgtcgctattgaaaccgcggcgatcaccctgatgcgccatagtcttcacggcgtggccgatgcgctggcgatttcgaaagcaacgttacgcaatatgaagcagaacctgctgggcgcgtttgtctacaactcgctgggtatcccgattgccgccgggatcctctggccgctgaccggcaccctgctcaacccggtggtcgccggcgctgcgatggcgctgtcgtcgatcaccgtggtgagtaacgccaaccgcttgctgcgctttaaaccaaaagagtaaacgccgtcagatgaaacgggcgccgacgttgttcggcgcccgtttttttgccgggacaagaaaagcccgccggaagggtgacgtgtatcaccatatgcgctagcatgaagtcctcacacttcggagcgcgtatgggcctgttaaaccggataaaaatgctgtggcgagccgccgtcggctcgtcttattcctggcctgcgatggatatcgtcctgcccggcgaacgctatttgcacctcgtcggcagtatccatatgggcacccgcgacatggcgccgccgccggcgaagcttctgaaaaaaatacgccaggccgatgcgttaatcgtcgaggccgatatcagcggcaatgaaaccccgtttagcaatctccccacttacccaccgctggcggaacgcctgagcgatgcgcagctgagcgagctagaggcgcgaaccggcgagctgggcctgtcggtcgggctgttcgacagccagccgctgtggcaggtggcgatggtcctgcaggccacccaggcgcagaagctggggctgcgaccagattacggcatcgattatcagttgctgatggccgcccgcgagagcaacatagcggtgatggagctggaaggcgccgacagccaaatcgcgctgctgcgcgatctgcccgacggggggatggcgctgctggaggatacgctgacccactggcgcaccaacgcccgtttactgcaggtcatgatcggctggtggctggagcaaccgccgtcgcgcggcgcggtatcgctgccgacgacctttagccagtctttatatgatgtgctgatgcaccagcgcaacctcgcctggcgcgagacgctgctggccttgccgccggggcgctacgtggttgccgtcggcgcgctgcacctgtatggcgaagggaatctgccggatatgctgacataaaaaaaatggccaatattgctattggcccgtcaaagaggaatttcatcattattattatcccgggatttgcatcccggatcgtctgattgtcgctcaaagtgaccatcactgccaacactattgcgcaagatggtactattttttagacaacctgcgggcgtattctgacgtcacgcaaaaccggttggtaagaaggatagctatgactcccgccgttaaattactcgaaaaaaacaaaatttcctttcagatccacagttacgatcacgatcccaatgagaccaacttcggagatgaagtggtgcgcaagctcggcctcaatgccgaccaggtttacaagaccttgctggtcgccgtgaacggcgatatgaagcatctggcggtggccgtcactccggtcgccgggcagctggatttgaagaaagtggcgaaagcgctgggcgctaagaaagtcgacatggccgacccgatggtggcgcagcgtatcaccggctatctggtgggcggcatcagtccgctggggcagaagaagcgcctgccgacggtgattgacgccccggcgcaggaatttgccaccatctatatttccggcggcaaacgcgggctggatattgagctggcggcgagcgatctggcgcagcttctcgatgcgaagttcgccgatatcgcccgccgcgattgataaaactatcccggatagcggcgcacgcgccttatccgggatacccaactcgtagccccggtaagcgtagcgccaccggggaaatagccaacctgaagcccaggcttactgccagctcacctcgcctttcggctcataggcggcggcatccagcggcgagttcttctcgatatactctttcagcacttcggcatcgataaagccggtattcacatacccgggtttatcggcgatgttcggatagccatcgccgccggtggcgttaaagctcagcgtcgccatccgataggtcttcgccggatccaccggttcgcctttgattttcagatcgttcagcttaccgtctttggccacgaaactgacgttggcaaactgcggataagcgccggaatccggcttcatctgcgcgacggcggtcaggtaatccactacctccttgccgttcatatcgacataggtcagcacattgccgaacggctggaccttcatcacatctttgtaggtgatatcccccgcctcaatggagtcgcggatcccgccgccgctcatcaccgcgaaatccgcgttactgcgcgccatttgcgccgccagcagcaggtggcccatattggtctgcacaaagcgcactttactgcggtcgccctccagatgaccattcacgctgccgattttgacctgcagctgcgccttgcctttgttctggaacggcgtcagcagcgacatcatctgcgggttctcggcgatctgcggcgtatacagcacccgctcgctttggccgttatcgtaagtcacttttttcttcaggttcaccgggatcagctgatagtgcaccagcttcatctcgccgttgcggaactcaaaatcggcgcggccgacgtatttgccccactcatgcgcctggacgatccagatgccgttctgacgatccggagcgcacggggtgcctggcacataatcgacctgctttttattttccgccgccatgcataccggatcctgcgaatgaccgccgacgatcatcgccagcgatcccgcaggtaaactccgcgccatttcaacgtcgcccggcgcgttagagccgtggttgccattgtcgtaatggcccatatgggtggtggccaggatcacgtccggcttttcattctgctgcagctcctggataaccagcttcgcctcttccgccggtttgcggaattcgatatcggtgaaatattccggattgccaatcttggccgtatcgtcggtggttaagccaatcaccgcgattttcagcccaccgcgcttaaacaacgcccagggtttgaacagccgttcgccggtgcttttctgataaatatttgccgacaggaacgggaacttagcccacttttcctgctggcgcagtacgctcagcggattatcgaattcatggtttcccaccgccatcgcgtcgtagccgatcaggttcatgccgcgaaaatcgggctctgcatcctgtaaatcagactccggtacgccggtattaatatcgccgccggataacagcaggacgcttcccccttccgccgccacctctttacggatgccatcgaccagcgttttctgcgccgccaggccatattcgccgtagtcattgcgccagaaatggccgtggtgatcgttggtgtgcaggatggtaattttataggttttatcctgctcataggcctgtgccgacaggctgcccagcgataaagcggcgaatagcgccagcgctacgctgtgtttgaaataatgcatgcttcactccctgacttaatcccaagtgccgaaagtatagcgagttagtcgcgttgacaaatatgttttcagaattgcgacttccttcaaaccttatcaacaggtatgttagtcggataataattctacccgtcatacttcaagttgcatgtgcgttggctttcctcgctcaccccagtcacttacttgagtaagctcctggggattcgctgcgtcgccgccttcctgcaactcgaattatttagggtatcaacctgcattctctacaacaaatagaactcgctgaagtgaacctatgacaaccaaccaatccgctcaacccttgtccggccccgctgcgccgccgcaaaaagcacgcacctcgtttggcatcttaggcgcgatcagcctgtcccatttgcttaacgatatgatccagtcgcttattctcgctatctacccgctgctgcaggcggagttctcccttaccttcgtgcagatcggcatgatcaccctgaccttccagctcacctcatcgctattccagccggtgattggctacatcaccgataaacgctcgatgccgtggtcgctgccggtgggcatgtgcttcaccctctgcggtttgattctcctcgcgctggccggtagcttcggcatggtgctgctggccgccgcgctggtaggtaccggctcctcggttttccatccggaatcatcccgcgtggcgcggatggcctccggcggccgtcacggcctggcccagtcgctgttccaggtgggcggcaatttcggcagctcgcttggcccattgctggcggcggtgatcatcgccccgtacggcaaaggcaacgtcgcctggtttgtgctggccgctctgctggctattgtcgtgctgtcgcaaatcagccgctggtatgccgcgcagcatcgaatgaataagggcaaaccgaaaccggccatcgttaatccgctgccgcgcaagaaggttattctggcggtaggcattctgctgatgctgattttctcgaaatatttctatatggcgagcattagcagctattacaccttttatctgatgcataaattcggcttaacggtgcaaaacgcccagcttcatctgtttgccttcctgttcgcagtggctgccgggacggtaattggcgggcctgttggcgataaaattgggcgtaaatatgtgatttggggttctatcctcggcgtagcgcctttcacccttgttttaccctacgccagccttgaatggacgggtattttgacggtgatcattggttttatcctcgcctcggccttttctgctattctggtctatgcgcaggaactgctgccgggacgcatcggcatggtttctggcctgtttttcggcttcgcctttggcatgggcggccttggcgccgcggtgttaggcctgctggcggaccataccagcattgatctggtttataaaatctgcgccttccggccgctgctgggattcctgacgatattccttcctgataaccggcaaaaagcctgattattcggcggccaaagtgcaaccttggccgccgttaacccttgtgtcatcagcctgttccacgatttccccccgccattttcccttctgtgccttttcatcggctaattgcatttttttgcacaactcaagaattattcataaacaaagtgaacgtttttgtcataaactattacccggacagggtagcaaaatggaccgatacaccactggaaaggagacggaatgcaccacgcaacaccgcttatcaccaccattgtcggcggcctcgtgctcgcttttattctcggcatgattgccaataagctacgtatttctcctctggtgggatatctcttagcgggcgtgctggccggacctttcacccctggctttgttgctgacaccaaactggctccggaactggcggaacttggcgtcattctgctgatgttcggcgtcgggctgcatttctcacttaaagacctgatggcggtaaaatcgatcgccatccccggggctatcgcccagatagccgtggcgacgctgctgggtatggcgctctccgccgccctcggctggtcgctgatgaccggcatcgtctttggcctgtgcctctccaccgccagtaccgtagtgctgctgcgcgcgctggaggaacgacaactgattgacagccagcgcgggcaaattgccatcggctggctgattgtggaagacctggtgatggtcctgacgctggtcctgctgccggcgattgccggtatggcggagaaaggcaacgtcggcttcgcgtccctggccctcgacctcgggatcaccattggcaaagtggtggcctttatcgccattatgatgctggtcggccgccggctggtgccgtggatcatgtcgcgcagcgccgccaccggctcacgcgagctgttcactctgtcggtgctggccctggcgctgggcatcgccttcggcgccgtggagctgtttgatgtctcttttgccctcggcgccttctttgccggcatggtgcttaacgaatccgagctcagccaccgcgccgcccatgacaccctgccgctgcgcgacgccttcgcggtgctgttcttcgtctccgtcggcatgctgtttgacccgatggtgctggtccaacagccgctggcggtgctggcgacgctggcgattattatctttggtaaatccgcagccgcctttttccttgtgcggatgtttggtcactcgccgcgcaccgcgctgaccatcgccgccagcctggcgcagattggcgagtttgcctttattctcgccggcctgggaatggcgcttaacctgctgccgcaggccggacaaaatctggtgctggccggggcgatcatctcaattatgctcaacccggtgctgtttaccctgctggaaaaatatctcgataaaaccgaaaccctcgacgagcagacgctggaagaggtcctggaagacgagaagcaggtgccggtcgatatctgcaaccacgcgctgttggtcggcttcggccgcgtcggcagcctgctgggcgagaagctgatggcccaggggatcccgctggtggtggttgaaacctcgcgcacccgcgtggatgagctacgcgagcgcgggatcagcgcggtgctcggcaatgccgccaatgaagagatcatggagctggcgcatctggactgcgcccgctggctgctgctgacaatccctaacggctacgaggccggagagattgtcgcttccgcacgggaaaaatgtccgaatatcgagattatcgcccgcgcccattatgatgacgaagtggactacattatcgatcgcggagccaatcaggtggtgatgggcgaacgggaaattgcccgcgccatgctgcggcttctggaaacgccaccggccggcgaagtggtcaccggctgatgtactgccctctccccgccgggagagggacgcgcttaccgatcccagtacgcctcttccaggctgtcctcacgctccggcaggccgcgagttaaacgcggcgagtgctggttcagcacctgatagctcacgcggttggcatatttacacacctgcgccagcgaggagtaggtcagccatttgcatttgtgcttgctggagttggggacgttattgcggtggtagttattggcggtgatgtcatgcagcagcgccgccagcgcgccgtcgcctgcgccgttggtgttcatgatcttctcggggccgcccatatagggagcgatatgggaatatatgcgcagcggattaacgcaatcctggtgacgcatcgcgcggctgaattcaaactggttaaactccgggatcgcccccggcagcagcggatgctgggttttacgcttcgcctcttcttcggtgaagcccgccatatacaggcccgccgggccggcggtgcacagcaccaggtcgacccagtccagcgccttattcgccgctgacagcggatcggcaaagccggtcagcgcttccccttcctcttcgttcattgccagaatagagacatgctcctgcaggaactcctgccaccacgccgggttatcggcaatcacgtatttggttccgagggttaacaccaccggcacatcgtgctttttggcatactcaatagccttcatcgtggcgtccggcatcggctcgcccggcttgcagcggaccaggtaagaggtcagcaccagcgccgaggcgccggcgatcaccgcttccggaatgctttcgggacgcagcttgttcatgtggcccgggctgatggcgaaggtgcgctcgccgctgtcaccgatcagggtaaagcagcggccaatggcgccgtcgacgccctgcagatagttcagatcggtgcggctggaggtattgcacaggtaacgataggcgtagccgccgatttcgatattgctgcacatcacgccaagcagcaccgagcgatcgtccgccagcaccgagtagttgtgcatggtattgccgatggtgccgccggcaaactgatgggtaatgagattgttgcgcaccagctcctggtacagcgcctcggcgacgtcatcttcaatcaccagcgaatggcccgcgctcaggccgtagcgcacgataaacgcctcatccactttcgcttcgatatccaccagcgtctggtcgataccgaccacccaggagacgctggattcattctccggctgaatttgctgcagcagcggatcgcgggcgttaacgggaaaatagtgtttagatttgcgtttaccgggaaatttcatagtggcgcttaaataacagggaacaagcgggaaatagtagcatattccccgccctgcgcgcgatcagcgataaggcgccgtcagattgaccatcatctcaatatgcgctgcgtccgcattaagcgccggaatatattcatattgcttgccgcctgcttcgaggaatatttcccggttctggacggcgatttcttccagcgtttcgagacagtcggcggcaaaccccgggcacagcacctgaatatgcttcgtccctttctcgccgagcatctttagcgtttcatcggtgtacggcgtcagccagggttcccggccaaagcgcgactggaaagtcatcatcacccgctccggcggcagccccagcgcggaaaccagttcccgcgtcgtatcgcgacagcgctgaggataatcatcgccctggttggcatagcgctgcgggatcccatgataggagagcagcagcagatccggttccccatggacagcgaaggaagcgcgcacgctggccgccagcgcatggatatagtccggatgttcggcatagtcgcgaataaacgagatacccggaatggcgcgctttttcgccagaatccgcgccagttcgtcccagacggcggccaccgtcgagcaggaatattgcggatacagcggcagcaccacgatgtgctccaccccctgcgccagtaagtcatccaccgcgctggccagcgacggtgaaccatagctcatgcccagcgccaccggggtatccggcagcctggcagccagcgcctgctgctggcgacgactatacaccatcagcggcgatccctcttccatccacacggactgatagagcttcgccacgcgcggggagcgaatcggcagtatgacgccgcgcagcagcggccaccatagcagacgagacgtatccaccacccgtttgtcgctgagaaattgtcgcagatagcgcttcaccgccccgggggtgggcgcatcgggagtgcctaaattggccagcaagatacctgttttcgtctgatgcattaccgcctcttaaccatttgaatcgcagccaattgtagctgaaatggcactaaacggaaccaatcatagcaaaaggtagaagtgagaggagttctcatcctgccgcagcaggatgagaaaaggctttatcagccgaggattttttccagttcggcgcgcacgtcagctaccgctttggtgccgtcgactttggcgtatttggtgttgcccgcctgcgcttctttggtgtagtagccgatcagcggcgctgtcatctgatggtattctaccagacgcttacgcacggtctcttcctgatcgtctttacgggtggtcagctcttcgccggtcacgtcgtctttgccttccaccttcggcggattgaatttgatgtggtatacgcgaccggatgccgcgtggacgcgacggccaacgatgcggtcgacgatcagttcgtccggcacgtcgaattccagcacgtaatcaacggtaatgcccgcctctttcatggcgtcagcctgcggaatggtccgcgggaagccgtccagcaggaagccgttacggcaatcttcctgggcgatacgctctttcaccagcgcgatgaccagctcatcggtcaccagcttgccagcgtccataatgtctttcgcttgcttaccgagctcagagccggattttaccgccgcgcgcagcatatcgccggtggagatttgcggaataccgtatttctccatgatgaactgagcctgagttcctttacccgcgcccggagcgccaagcagaataatacgcattacgaaaatcccctcaaaagtcgattcaatttttcaaaaacgctaaaccataccaccagaacggcgatggctcaaggaaggcggtgcggctgaaacggttaatggtgagatattttatgcaatccaatgtgaaatgccccgcctgagcacatcgctcagacggggcatttatcccgttcccggcgtcgcgtcgctcggccgggctactcgttcaggttcgcgtcaggaagccagcagctggttcatacggcggataaactggttcggatcttccagcgtgccgcgctcggccagcagcgcctgatccagcagcagttccacccattcgccgaactgggcgtcgtcctgggtatcggccgcgcgtttcaccagctgatgcgccgggttcagttcgaagatgtatttcacttccggcgccgcctggcccgctgccgcgaacagcttcgccatctgagtgctcatctcgtcggcgtcggtggtgacgatcgccggggtgtcggtcagacgatgggtcagacgcacctctttcacccggtcgccaagcaggtttttcacccgctcaacgaacggctccagcgctttttcggcttctttggtggactcgtccacttcatccgccagcttgtccagcgactcgtcggctttagcgacagactggaacgctttgccgtcgaactcggtcaggtagctcatcatccactcgtcgatgcgatcggagagcagcagaacttcaatccctttcttacgcagcagctcgaggtgcgggctgctcttcgccgccgcatagctgtcggcagtgatgtagtagatcttctcctgaccttctttcatccgcgagacatactcttccagcgacacggtctgcgcggaggagtcggtatgggtggttgcgaaacgcagcagtttggcgatcgcttcctggttgctcggatcttccgccgggccctctttcagcaccaggccgaactgtttccagaaggtttggtatttttcagcgtcgtctttcgccagcttatccagcatctgcagcgcgcgtttggtcagcgcggtgcgcaggttgcgggtcacgctgctgtcctgcaggatttcacgggagacgttcagcggcagatcgttggaatcgatcaggccgcgcacgaagcgcaggtagttcggcataaactgctcggcgtcgtccatgatgaacacacgctggacgtacagcttcaggccgtgtttatgatcgcggttccacatatcccacggcgcctgcgacgggatatacagcaggctggtgtactcctgcttaccttccacgcggttgtggctccaggtcagtgggtcgctgtagtcgtgagcgatatgcttataaaactctttgtattcgtcgtcgttaacttcggatttgctgcgggtccacagggcctgcgccttgttgattttttcccacgaaatcacggtttcgccgtctttctcttcccgtttttcaatctcaaccggcagcgcgatatggtcggaatacttgctgatgatagagcgcacgcgccagtcgttgaggaaatcatcttcgccttcgcgcagatgcagggtgatttcggtgccgcgatcggctttggtgatatcagctacggtatattcgccttcgccggcggattcccagaacacgccgttttccggcttgtcgcccgccgcacgggtacgcacggtcactttgtccgccacgatgaaggccgaatagaagccgacgccgaactgaccgatcagctggctatccttcgcctggtcagaacccatcgattcgaggaacgctttggtgccggatttggcgatggtgccgagatggtcgataacctcttcccggttcataccgataccgttatcggcgatggtcagggtgcggttgtctttatcaaacgaaacccgcacgcgcagctcgccgtctccctcatacaaatccggctgcgacagcgcgcggaaacgcagcttatcggccgcatcagaggcgttggaaatcagctcacgcagaaagatttctttgttggaatagagggaatggatcatcaggtgcagaagctgttttacttctgactgaaaaccacgagtttcttgtcctttcatctgattcaacctcaacaatgccattttaaatgggtaaaaaaccgttgagtgggagatggggacagcggggaaatttttcaagcggaggcggcgaaggccgcctccatttgttcagaaagtaatcttgtggcgaccggccagggagtgggacagcgtggtgccgtcgaccatctccagctcgccgcccaccggcacgccgtgggcgattcggctggcgtcgacgccatactgcgcgcacagctctgcgatgtagttggccgtcgcctcgccctcaacggtcgggttggtggcgaggatcacctcggtgatcgactccgcctccagccgttgctccaggcgatcgagcccgatgtcatcaggcccgatgccgtcgagcggcgacaggtgccccatcagcacgaagtagcggccggaatactgcccggtctgctcaatggcatagatgtccgccggactctctaccacgcagatctggccgttttcctggcgacgcgggttgctgcagatattgcacacctcctgctcggtgaaggtgcggcaatcggcgcagtggccgatctccgacatcgcacgcgtcagcgcctgcgccaggcgcatcccgccgctgcgatcgcgctgcagcagggtaaacgccatgcgctgcgctgacttcgggccgacgcccggcagacagcgcagcgcttccataagctgagttaacagcgggctggtttgcatcagaacggcatcttgaagcctggcggcagttgcataccggcagaaacggaagccatcttctctttctgggtctcttcgatacggcgcgcggcgtcgttgaacgcggcagccaccaggtcttcgagcatctctttgtcgtcttccagcaggcttgggtcgatctccacacggcggcagttgtgcgcgccgttaatgggcactttcaccagacccgcgccggattcgccggttacttccagctgagcgatctcttcctgcatcttctgcattttttcttgcatctgctgggcctgcttcatcaggttacccaggccgccttttccaccaaacataggcttctctctcagtcagtcatcgttaaaggtactgaatgccagtcagactggcattcaaatggggcgaatactctcttcatccagatcggcgtcgaagaaacgacgcagggtctgaatgttattatccgcgataatggcttcgcgcgcctgcgcgagcttctcttcataaatagcctgccgccactccagcggcgtacgcatcgcgggattatcgtcttccacgatggtcaattcaaccggcgtaccgtacaacacccccagcgcttcagccagcttttgctgcgcgctggcggaattgaggtggcgctggctgggacgcagatgcagacagacgcggctgccctcctgctctttccacgcgttgagcgccacctgctcgaccagcttcggtaccgccagctggctcacttccgccgcccagctgtcgcgctcgaccgcttcttcggcgagcttggccgccagctccggcgtcttctcatgctccagcgcctttttcagcgctttgggcgtggcgacttcgactttgctctcttccaccaccgtcgtcgccttccagcgataggcctctttcttcgccggggcctgctccagcgcggccgcggccggacgagcctggacgcgctcggtaatcgaactcagtcgctccagcgcagcgttattcaccggccgcgcgcgggaagcggctgccggttcactcttttttggggtggttgctccctgactgcgctgcaggtggctgcgggccgccagcacctggctggtggtcggcggcaaactctgcggcgactgtggcggcggcgcggcgggggcaaccggctgacgcggcgcgggcgcggcggcctgtgccggctgcacctccggctccggcagcggcttacgcggatgaaacgccagggcacgcagcagcgtcatttcgacgcccatccgccggtccggggcgtaaggcagctctttgcggccaatcagcagcgtttggtagtagagctgaacgtcgccgggcggtacggttcgcgccagttcgcgcatccgcacttcgaccgcggccatgtcggcgcccagcgccgaaggcgacagctgaaccatggcgatgcggtgcagcaggctctgcatctcgaccagcagcgcctcccactcgacgccgcgtgcggcggcgtcattgacgcccgccatgacccgctcgccgtcggcagcaaccagcgcttcaatcagcgacagcgcctgatcgtcatcaagggtgccgagcatggtgctcaccgatgcggccgtcagctgcccttccccactggcaatcgcctgatcggtcaggcttaaggcatcgcgcaggctgccatcggccgcccgcgacaacagctgcagcgcgcggggctcaaaggcaatctgctcttcgccaagaatatgctccagctgatggcggatctgttcaacgtccagcgccttcaggtggaactgcaggcagcgggataagatcgttaccggcagcttctgcggatccgttgtcgccagcaggaatttgacgtgcgccggcggctcctccagcgtttttaacaacgcgttgaagctgtgacgcgacagcatatggacttcgtcgatgagatagaccttaaagcggccgcgggccggcgcgtactggacgttgtccagcagatcgcgggtatcttcgactttggttcgcgaggcggcgtcaatctcaatcagatcgacaaagcgcccctgttcaatttcccggcagttatcgcacacgccgcagggggtggcggtgatgccggtttcacagtttaaccctttcgccagcagacgggcgatggaggtcttcccgaccccgcgggtaccggaaaaaagataagcgtgatgaatgcgccctaacgacaagccgttcgccagtgcggtcagcacatgttcctggccgacgacgtcagcaaaggtttgtgggcgccatttacgggctaagacctgataactcatgggctggctctgaaacgctggaaggtgaaatcacgaaggggtcatgctatcacagccccgcccgatcggcgaggctatgtggagggatttgcttagtggcccgggaacggcaccagacagtagcagtggatccccagcttctccaggcgctgttcgccgcccagatcgaagagattgataatgaaagcggcatcgtgcacttcgccaccgaggcggcggatcagtttgaccgtggcgtcgatagtgccgccggtcgccagcagatcgtcaaccaccagcactttatcgcccggtttaatggcgtcaacgtggatctccagctgatcggtgccatactccagctcataggtctcggcaatggtttcacgcggcaacttacgcggcttgcgtaccggaacaaagcccacgcccagcgccagcgcgaccggggcgccgaacaggaagccacgcgcctcagtccctaccactttggtaatacccgcgtctttgtagcgctcggtaagcagttcaatgctaagcgcgtaggccttcgggtcttccagtaagctggtgacatcgcggaaaagaatgccaggttttggataatcctcgatactctggatgctgttcttcagatattcaagctgctgtgcagttgcggtcataagtgtatgcctgattgaaacggtattacccacgggcgtgcaaaaggggccaaagaaacatttgtttaacctttgaccaggcttgcccgcgctcgaaaacgccagaatttactggctgtcggcaacaattgcaacaggcattattgcgcatcagtgcttttgttgctttgcgtcaaccaccggaatgcgccacataaagatcagcagacaggccagaatgaccaacagcatgatgcgcacccacgtaagcttaaccagccatagcgaaatagcaaaagtcaccacgatcatcgcaatggcgcgcggtttagcgccgcgaggcatggcgcggtactgttgccagtggcgaagatagccgccaaaccaggagcgatacagcagccactggtgaaagcgcggcgatgagcgggcaaagcaccaggcggcgagcagaataaacggcgtcgtcggcagcaacggtaagaagacgcccagcgtacccagcgctaccgccagccagccgataatggttaaaataacaggtggcataatgcgaatcgttatcaaacagatgaggctactgtagcacagttggctgacggaaaatggagggggttggtgaaaactgctcaacttttacaaacgctgaacgaccagctgagtgagctggccgcgctggtggcgccgctggcggagcacgcgaccctcagcccgcgctttgaccgccagctcttccacacccgcagcacgctgatgcaggcctatctggcggaagcccaacacaactttaaccagctccgccaggccgtcgagcgccagcagctgccgcaggtggtctggattgccgagcgtctggcggcacaaatcgccgcgctgcgccgtgaaaccgccacctggtccttgcgcagttgggaccacgcgtcgccaacgttgagccgctggcagcgccgtcgcctgcagcatcaggagtatgagcgccgcctgctggcgatgcgcgaccaacgccagcgtcagctggcgcaggcgaccagccttgacgagcagcagcggctggggaaagaagttgaagcctacagcggccggttggcgcgctgccgacaggcgctggacaagattgaaaacgtactggcgcggctgacgcgctaacaggagagcccgatgtcgctggaaaatgcatccgatgaggtcaaactggccgtcgatttaatcatgttgctggaatcgcatcagatcccggcgcaaaccgtgctgagcgcgctggaaattgtccggcgggattatgcaaacaagttaaaaaacgcggaaagcgggtcgcaaaacccagagaagtaggatgttgtctccggcagtgtgctggcagtctggtcctctgcgcatgacgccactggagacaatattgatggaaaaagtcagtcaaaccccacacgacgcggtgtttcgccagatgctcatgcatcaggcggtcgcgaaggattttttgcagttgtacctccccgcgccgtttctggcgatctgcgaactggattcgctgcagctggtctccggtagctttgttgaagaggacctgcgcgccagctattccgatatcctttactcactgcgcacgcgtcatggaccgggctatgtgtacgcgctgattgagcaccagagtaccccggacaagctgatggcgtttcgcctgctgcgctatgcgctggccgccatgcagcgtcatctggacgccggccacgacactctgccgctggtggtgccgattctgttttatcacggcaaagtgagcccctggccctgggcccgcaactggcaacagctattcgccgatccggcgctggcgaaggcgctctatagcaatgattttccactggtggacctcaccgtaatgccagataatcagatcgcccgtcatcggcggatggccatgctggagctgctgcaaaagcatatccgccatcgcgatctggccgagctgcaggtgccgctgattgcgctgatgacgcaaggctatctgacagaagcgcagctgaatacgctgctgcgctatatgttgcaggcgggaactacggaacatccgggggcgctgatccgcactctggcggcgcagtcgcccaggcataaggagctgatgatgaccattgccgaatggctggaagagaaaggccgtaaacagggacagcaagagggtgagcaggaagctacccgcagcatcgccgccagaatgctggcgcgcggcctcgaacgtcaaaccgtgcaggagctcaccgggctgagcgatgaagaactcgccgcgctggcgccctgatacagcaggggcggctttgcgccgcccctcttcgatcaggacgcggtggtgggcgccagatcgtcgcctttcccgtcccgtttcacttcggtgacttcatcgcctttttcattgcgcagatgaacttccagctggttaaaggcaatgttgatgtcattctcccggcacaggcggtcgatggcgcggttgagctcatctaccgtgtagctgcgatcgcgcagttctcgaacatacagacgcagttcatgatccagggtactggccccgaaggtggtgaagaaaaccgctggcgccggctcctgcatcactttcggatgatcgtgcgcggccttcagcagcacctctttcaccttatccaggtctgagccataggcgacgccgaggcggatcaccacccgggtcacggtgtcggagagcgaccagttgatcaagcgctcggtaacgaacgccttgttcgggataatcacctctttgcgatcgaagtcggtgatggtggtggcgcgaatacggattttgcttaccgtccccgagaaggttccgatagtgaccgtatccccaatgcgcaccggacgttcgaacagaatgattaggccggagacaaagttaccgaagatctcctgcagaccaaaacctaaaccaaccgacagcgcggccgccagccattgcagtttatcccaggagacacccagcgccccgaataccgtcatcgccccgatagcgataatcgcatagttgagaatggtggtgatggcgtaggaggtcccctgacgcatgttgagccgcgacagcaccagcacctccagcaaacccggcaggttgcggatcagcgcccaggcgaccattgacgccacaatggcgaacaacaaactgcccatcgtcacgctgcgcaccacgctggcccccgcctcggtaccgttgtagtgccagagggtaatgctgtcgaggtaggcgaaaacggtgatcaaatcagaccaaatcgcccagaacatcactgcgaacagcgcgaccatcaccaacatggtgatgcgcagcgtctgctggttgacctgctcgagagcgatagttggctcttcctgcggctcggcgccttccgccccttccttcaccagatgttgacggcgcgccagcgcgcggcgccaggcgatacgccgcgccgccacgctcaggccgcgcagcaccgtctggtacagcaggttccagatcatcaccagatacacggtctcgatccagcgtcccgccagacgcagcgtcgtgtagaagtagccggttgccgtcagcaccatcagggccaccggaacgatagacaacaccgtgatcgtcagcagacgcaggctgtgcgactctttatcgcgccagctttcccggcacatcggccaaaccagcaccgcgatcagcagtaagttgaagaaaatcaccaactgccccagcacgtcgtccatcaggttcagcggcgacagttcggaaatcaccgaccagaaattcagcggcagcagcgccaggctgacgcgaacaatctgccgccgccagtggctggtcaactgcgccggcatattaaagtggttgaccgcgacgccgttcttttccagcactttccagcacaggccaaacaccagccagaacatagccagctttttactgtacgcccacagcagtccgctaatatttaactgcatggtgagtaagatcagaccgatagccagaatcaacagcaccaccggtaaggcgcggatcagatcgatcaggatcgccttcggcgtatgcaactgggtatcgttgcgcagctgtcccacctgggaagcaagctttgcctgataatccttgagccactgcagacgccagcggatgaggccggcaatcaacagcagcggtaaaccggccaggaaagcgacaaacaccgcaggccacgctttttcccagttcacggtgattttcatcgccttaaactgacctttcagcgcctccgggaaggccttaatccactcccagtccatcggtttattgctgttcacccagaaaatttgctgggtcagaatttccttcagactgctcgagacgctcatcagctgctgctggttgatctgcaggttgatggccatcatcagctggttacccaactgtttgttgaactgatcaagcagttcgcgacgcatgtcgatcacttccagtagcgcggcgtggacttcatcgttcacttcgctgctgtgcccctcctccagtttggcgacaaaggcatcgctctggaacagcgcgtcgcgctgctggttcacctcaaactgttcaagccgcaggtcggcgatgcggttggtcatatcctgcagctcatccgccgacggtaatgtctgttgctgttggtaaagaatacgcgacagcagcaggctcccccgcagaactgaaatttgctctttaatatcccgttcagactgcagcgcgcggtcgagccagttcttgacctggatattgcgctgcaccagctggttaccgttctctgttgcctggatcagcttctcgctgagctgatggttaatatccagctcctgcttgaccagcgggttggcctgaatacgcgccgtttcgtcgggggtaaccgcctcctgggcggttttctcggtcagggtcagccgtttgctgttcacggcctcctgcagcagctgtagctgatgctccagccggttgctccaggcggtgacgtagtcacgctgcttctgcagggtatcctgcaggatagtgttgccttcgaggctcttgcgctgttgctcgatctgcgcgttgagcaatgcctgttgagcctgcaacagcacctgctggggcgggcgtagggtctcgtcgcccaccgaggtgccattcagacgattgcggatctgctgcagctgctgggaggcgttgaacatcgcattttgcacgcgttccggctgcgtttgcagggaaaccagttggctgttataggtcgccagatcgttttgcgcattctgtagatcgtccagcgtctgggtgacgcgcgactccagctgacgcagggagagcgtacttagcgttttgcgcgtcgcgtcgtcgttcgggacatcgctcaggttattgaggctctccaccgcctggcgcagcttcgccggcgcctgctcgacctgctgtcgcagctgtgccgtctcgcttttgatacgctcgattttatccagcgtttccagcgtctgagtcagatcctgctggaccagtttgtcctgcggagtcagttctttttgcttgtttaacgtattgagctggctctgcacctctgcccgatcggggagatccgcggcgcggccctggactgggctgaaaaggccaataaaacagagcagcgtgataataaagatgaacgtggcgcgttgcctggagatcgtgtgcagcatagttaatatgaatgaatgcaaatgccggagaataccgggggtcgtcgcaagcgcgcagaatagcacttctcagcgctggcgaatagcggcggacggcgctaaaaattcacgcccatccgcgcgctacctttaagctgacaagctctccgggccgcgtagcgtcgggcagaattgatacatctccagcagaatagcgacgtagtcccgcgcttccgcatgcaggtcgaacgaatcgggggcaaacagccagttttccatcagcccggaaaggtagctgcgcattaacacggccgcccgccgggtgagtaaattggcgggcagcagcttcgccgcgatgcattctttcaaggtctgctcgatacgctcataactcgccagggagagctgccgctgggcctgctgcaccacggtcatttcaccgacgaactcacacttatgatagataatctccatcattaatcgtcgacgttcttctgtcactgtcgcttcaagaacatagactagaatctccctgataactgagagtggatcgttggggaattttgcccgatactcaatttcgagatcgctaatactggcgtctgacagctcccaaatttcgttgaataaatctgatttattcttgaaatgccagtagatagcccccctcgttacacccgcagcttttgcaattgttgccaacgaggtagatgatacgccttgctgcgaaaacagacgcagagcaacatccagaatcagttgccgggtttcacgtgcctgttgtttggtttttcgtgccataggttaatgactttacagaggttacgtttacatacatttgtgaatgtatgtaccatagcatgaccataatagaaagactgtagtgggtttgtggttgtttgagccactgaacattttgaaattggacactcgaggtttacatatgaacaaaaacagagggttaacgcctctggcggtcgttctgatgctctcaggcagcttagcgctaacaggatgtgacgataaaccggctcaacagggagcccagcacatgccggaagtcggtattgtgacgctcaaatccgcacctctacaaataaccaccgaactgccaggccgcaccagcgcctatcgcattgcggaagtccgtcctcaggtcagtggcattattttaaaacgtaacttcgtggaaggtagcgatatccaggccggcgtctccctgtatcagatcgatccagccacctatcaggccagctatgacagcgccaaaggcgacctggcaaaagcccaggcggcggcaaacatggatcaactgacggtcaagcgttatcagaaactgttgggcaccaaatatattagtcaacaagactacgataccgccgttgcgacggcgcagcagagcaatgcggccgtggtcgcggcgaaagcggccgttgaaaccgcgcgcatcaatctggcctacaccaaagtcacctcgccgatcagcggccggattggtaaatccgccgtgaccgaaggggcgctggtacagaatggtcaaacgaccgccctggcaaccgttcagcagctggatccgatctatgttgacgtcacccagtcgagcaatgatttcctgcgcctgaagcaggagctagccgacggccgcctgaaacaggaaaacggcaaagcgaaagtggagctggtgactaatgacggtcttaagtatccgcagtccggcacgctggaattctcggatgtcaccgtcgatcagaccaccggctcaatcacgctacgcgctattttcccgaacccggatcacaccctgctaccggggatgttcgtccgtgcccgtctggaagaagggattaaccctgacgccctgctggtaccgcaacagggtgttacccgtacgccgcgcggcgacgccagcgtcatggtagtgggggaaggcgataaagtcgaagtccgccaggtcactgcttctcaggcgatcggcgataaatggctggtcactgacggtctgaaatccggcgatcgcgttatcgtcaccggcctgcaaaaaatcaaaccaggtgtgcaggtaaaagcgcaggaagtagcttctgatgataaacagcaagccgcaggcaacgcgccatcagaacaaaccaagtcttaacttaaacaggagccgttaagacatgcctaatttctttatcgatcgccccatatttgcatgggtgatcgccattatcatcatgctggctgggggattatcgatcctcaaattgccggtggcgcaatatccgacgattgcgccgccagcaatttccattaccgccatgtaccccggtgctgacgccgaaacggtgcagaacaccgtaactcaggttatcgaacagaatatgaacggtatcgatcacctgatgtacatgtcctcaaatggcgactccaccggtacggcaaccattacgctgaccttcgaatccggtaccgatccggatatcgcccaggttcaggttcagaacaagctggcgctggcgacgcctctgctgccgcaagaagtacagcagcaagggattagcgttgagaaagcgtccagcagcttcctgatggttgtcggcgtcattaacaccaacggcaccatgaaccaggacgatatttcggactacgtggcggccaacatgaaggatccgattagccgtaccagcggcgtcggcgacgttcagctattcggttcccagtatgcgatgcgtatttggatggatccaaacaaactgaacaacttccagcttacgccggtggatgtgatcagcgccctgaaagcgcagaacgcccaggtggccgcgggccagttaggcggtacgccgccggtgaaaggccagcagcttaacgcctcgatcatcgcgcagacgcgtctgaccaatacggaagagtttggcaacatcctgctgaaggtgaaccaggacggttcccaggttcgtctgcgtgatgtcgccaaaattgagctgggcggcgaaagctatgacgtagtggcgaagtttaacggccagccggcatccggtctgggtattaaactggctaccggcgcgaacgcgctggataccgccaacgctattcgcgctgaactggcgaagatggagccgtttttcccgtcggggatgaagatcgtttacccgtatgacaccaccccgttcgtgaaaatttctattcacgaagtggttaaaacgctggtggaagcgatcatcctggtgttcctggtcatgtatctgttcctgcagaacttccgcgccaccctgatccccaccatcgcggtaccggtggtcctgttaggcaccttcgcggtgctggcggcgtttggcttctcgataaacaccctgacgatgttcgggatggtgctcgccatcggcctgttggtggatgacgccatcgtggtggtagagaacgtcgagcgcgtgatggcggaagagggtctgccgccgaaagaagcgacgcgtaaatcgatgggacagattcagggcgcgctggtaggtatcgctatggtgctgtcggcggtatttatcccgatggcgttcttcggcggctcaaccggggccatctatcgccagttctccatcactatcgtttccgcgatggcgctgtcggtactggtggcgttaatcctgacgccggcgctgtgcgccacggtgctgaaacccattcagaaaggcagccatggcgcgaccaccggcttcttcggctggtttaaccgcatgtttgataagagcacgcaccattacaccgacagcgtaggcaacattctgcgcagcaccggtcgttatctggtgctgtatctgatcatcgtggtgggtatggcatggctgttcgtccgtctaccgagctcgttcctgccggacgaggaccagggtgtattcctgagtatggcgcagctgcctgccggcgccacccaggagcgtacgcagaaagtgctggatgagatgacgaattactatctcaccaaagagaaggataacgtggaatccgtgtttgcggttaacggcttcggtttcgccggccgcggccagaacaccggtatcgcgttcgtttcgctgaaagactggagccagcgtccgggtgaggaaaacaaagttgaagcgatcaccgcgagagcaatgggctacttctcgcagattaaagatgcgatggtcttcgcctttaacctgccggctatcgttgaactgggtaccgcgaccggctttgacttcgagctgattgaccagggcggtctgggccacgaaaaactgacccaggcgcgtaatcaactgtttggcatggtggcgcagcatcctgacgtgctgaccggcgtgcgccctaacggtctggaagatacaccgcagtttaaaatcgatatcgatcaggagaaagctcaggcgctgggcgtctccatcagcgacattaacaccacgctgggcgcagcctggggcggaagctatgtcaacgactttatcgaccgcggccgcgtgaagaaagtgtacatcatgtccgaagcgaaataccgtatgctgccggaagatatcggcaagtggtatgttcgcggcagcgatggtcagatggtgccgttctctgctttctcgacctcgcgttgggaatacggttcgccgcgtctggaacgctacaacggtctgccgtcactggaaatcctcggtcaggccgcgccaggcaagagtaccggtgaggcgatggcgctgatggaagagctggcgggtaaactgccttccggtatcggctacgactggaccgggatgtcttatcaggagcgactgtccggcaaccaggcccctgccctgtatgccatctcgctgattgtcgtcttcctgtgtctggcggcgctgtatgagagctggtcgattccgttctcggttatgctggtcgtccccttgggtgtggttggtgcgctgttagccgccaccttccgcgggctaaccaacgacgtttacttccaggtgggtctgctgaccaccatcggcctgtcggcgaagaacgcaatattgatcgttgaattcgccaaagacctgatggagaaagagggcaaagggctgattgaggcgacgcttgaagcagtacgtatgcgtctacggccaatcctgatgacatctctggcgttcatcctcggggtaatgccgctagttatcagctccggcgccggctccggtgcgcagaacgccgtcggtacaggcgtaatgggcgggatggtgaccgcgacgatcctggcgatcttcttcgtgccggtgttctttgtggtggttcgtcgccgctttagcaaaaaatcggaagatatagagcacagccatcaggttgagcatcattaatcttcactcctgaacaaagggccgctaccgcggcccttttttatcactggctggcaaggcacatattgccattgtttatttttcgttctgcatttaatatatattgatatggcgcaggctatttttagcagcttgttcaacaactcgggatcggcaaacactcatttaccaggaataatcctactatcattatccacgggtcggcggtttctgaacgcgacagctgcctgccttaaaccaatgattcataagatttctctatttctccggctgtgggccagcgcctgcgaaattaattcgtctatttttaagataatttctcgctgataattgtaatttttcgtaatagcacgatgaaatctgttggagagtggattatagttaaatcagcaggattactcagttagtgtcaggtcagttagtcgtgttcatcccacaacggtgtttgctagtcgtcgtttaaaccactcaaaaggggatgcgttatggacgaatactcgccaaaaagacatgatattgcacagctacgctttctctgcgaaacgctgtatcatgactgccttgcaaacctggaagagagcaaccatggctgggtcaacgacccgacgtcggctgtcaatctccagttaaatgaattgatcgagcacattgccacattcgctcttaattataaaattaagtatgcagaggataataagctgatcgctcaggttgacgaatatctggacgacacttttacgttgttcagtaactacggcattaactctacggatttgcaaaagtggaaaaaatccggtaaccgactatttcgttgctttgtcaacgccagccgggaaaacccggccagtctatcgtgttagaattattacaatcaaaaggtggaattatgtctgataagccattaactaaaacagactatttgatgcgcttacgtcgttgccagacaattgacacgctggagcgcgtcattgaaaaaaataaatatgaactgtctgataatgagctggcggtattttactcagctgccgaccatcgtctggcggaactgaccatgaataagctatacgataaaatcccgacttctgtctggaaatttatccgctaatttacgcgtattacgtggtctgctggccggacggtacgggtcagccgccatagggtatctttgtgatagacatcacatcattcagccaacagcaaccctgtaaccggtttcttttttatactgctacggccatcaacagtcaggtataaggaagacccatgagtgaagaaaaacgcaaaatgatcgccggtgagctctatttatctggcgacccaacgcttcgcgccgatcgcctgcgcgccagacagttgttgcaccgttataatcattccgccccggatgaccaggaacaacgtcagcatattctggccgagctgttcgctcgcgccggcgatgcgtatatcgagccaagctttcgctgcgactatggttataatatttttctcggcgccggtttttacgccaattttgactgcgtgatgctcgacgtctgccctatccatattggcgataactgtatgctggcgccaggcgtccatatttataccgccactcatccgctggacgccgatgcgcgtaatagcggccaggaatacggcaagccggtaactattggccacaatgtgtggattgggggtcgggcagtgatcaatcccggcgtgaccattggcgataatgcggtcattgcgtccggcgcggtagtcaccaaagacgtacctgcctgtaccgtcgtcggcggtaacccggcgcagatcattaagcgccttccgccgacaaatccgtaactgttatgcttttctgtaactgatctgttactttctccgcagaatattgcaacataaaatagccttcaggctgagcctgccgcgcctggtccgccgggcgcggcaggctcattgcagaattcgaggaccaagatgacagaaatacaacgcctgctgattcacaccattgacgaactcaacgtccaggaaaaacgcgataatcgcccgcgttttagcatcagttttatccgcaaccatccgggactgtttgttgccatgtatgccgcgtttctggcgacgctggtggtcatgctgcgctctgaaacgctggtagactcggtctggttgctggtggtgctgttcattctgttcaacgcctttttcttctttgacgtctatccacgctatcgctacgaggatatcgatgtcctcgactttcgcgtgtgctacaacggggaatggtacaacacccgctttgtcccccggcagctgatcgaccgtatcctgcagtcgccagacgtcgatagcgagcagaaggcgcagctcaaaaagatggtcgccaccaaaggcgagctctccttctacgatgtctttaccctcacgcgcgccggtgctgcgcaataaggcgatttagggtccgcagcgccgggagatagcgagaagcagaggtattgccatacccaagcaccagtccgctccgcgctcgctgcgggtcgagatagaaatgacttaacgcggcgggcgccagctgaaactggcgcgcctgctgcgcaagcgtccggtcattaacgccctccatcgccaccgtcaggtgcatcccccctcccccgccgagaacgtcgcacggcacggttatctcttgcgccagcgcctcgcgcagctgttgctgacgtttacggtacaggcggcgcatcgctgccagatggcgcgcatagtgtcccttctcgataaagctggccagcgcccgctgttcagcacggtgtcccccgcgcagcagcgcgccaatggcgtcctgagcagcatccgccagcgcgggcggcataaccataaaaccgatacgcaacgctggaaacagcgttttgctgaaggtgccgagatagaccaccggggcatcaggcaccattcccagcatcgccgggatcggttctccgctatggcgaaactcgctgtcgtagtcatcctccacaatccacgccccgtgccggcgggcatattccacgagcgccagacggcgcccggcgctcatgatgctcccacagggatactggtgtgaaggagaggtgaaaatgagccggggcggctccgcgacgccgttggcaatacacatcccttcatcgtcgacagccattcctctgacccgcagccccgcccgctggaagccactcctcgcccccaggtaccccggttcttccagccacacgctgtcgcccgggttggtcagtagcgaggcgcataagttgacgccttccagcgcgccttcggtaatgacgatctgccggatatcgcaccggatgccccgggagagcgccagatgacgagcgatagcctctcgcagcaaaggatcgcccgcggcttcgccataacccagcagcgcgctaccatcttcgcgtagcacgttatccatcagtcgccgccacagcggcagcgggaaatagtttaccgccggcatgcctggcgtaaatgccagcgtcggtgagtcgcggcgcatcgcggctggcagcctttgcagccgctcaggaagcacgacgggcggcatctgacccgcctcctggcggcaggaggcgagtggtgccacctgcgttccctgacggctccgtgtcaggtacccctccagcgccagctgttccagtgcggcattgaccgtattccgcgacaggtgtagccgttcggccatcacccgcgatccgggtaaacggcagcgggccgtcagggttccctgcaggatagcgtcacgtaaggtgtggtaaagggcgcgctgtaaggtttcgaccgtgcggttccgcatcccctgcgtcaacagcgtaaaaaacccctcgtccggtatattcatattgcctcctcgtggccccataaaaacatactctaatggcactttttatggaaccagcgagcgcgtacgctgcctgtaaatccccaataaggaaaccgcaatgtgcgaatataatcagtttggccaggcgctcggcgtcgcgctgcctgactggcagccgcgcccctggccgacacgacaggtattacagggcagccgttgtcgactcgaaccgctgactcttgctcatgccagcgatctgttcgccgctcaccagctggcgccagacgcccgcagctggacgtggctgctgcgtgaacctgagaacaaccttgcagaattcagtgcctgggtggagcaggtcgccacgctggcagacccgattcattttgccgtcgttgaccagcagcgagggaaagcggtcggctcgctggcgttaatgcgtatcgatatcgctcacggtgtggtagaggtggggcatgtgcatttttcaccgttactgagccgaacggccatggccaccgaagcgcactggctgttgatgcagtatgtctttgatacgctcggctaccgtcgctatgaatggaaatgcaacagtcttaatatcccatcagcccgggcggcaaggcggctggggtttcagtacgaaggacgttttcgccaggcgctggtgagtaaaggacacaaccgggacacggactggttttcggtgatagacggcgaatggccggagctggataacgccatgcgccaatggctggccgccgacaattttaccgccgacggccaacagcgccgctcgctggagagtttccgttaacggcgttttttgcgcccctgcaccgctttgaagcgggggttgctcttacagataacgtacagccgccctttgcgtttaaccagctggcaatccgggtggcgctgtttagcgctacgtaatgagttgacgacctgcatcatgctttccttttcgcatcaataaagccgccgaagcgctggcggaatcgggctgcactgccttcattggcgaaggttttttgtttgcccgtgtagtacggatgcgatttcgaggagacgtcgatcgtcacatacggaaaagtttcgccatcgagttcaatcacgcgatcggtgcggatagttgagccgactttaaaatactcattcgcgctggtgtcgtgaaacaccaccgtacgatagggaggatggatatgggctttcatgatgacctctttattacgttataacataacaataaggttacgccctgctgtgacaaagatcaaccctgctcaatttaagggtaaggtgataaggcgagtttccccgcctttggcgtcagggtgccagacggtgggcgatggcgcggagctgttccgcaatggcctgtagatcttttccctgctcgattcgggcgccgctggaatggcgtatcaccaggcgcgccggcagaatggatgaggtatgaggcgccccgctggtgctggcgaggatccgccgcaccgcctctttcccctgcaggtcgaggtcgagcgacacggtactcagcgccggatagaaaaaggagctttcgtaggtatcgtcatagccaataaccgacttctcacccggcaccgccacctgatgctgatggaaggcgctgagcacccccagcgccatctgatcattacccaccagcacagcgctgaaattaggcgtttcgcgcagcatctgcagcgcgccggcgtagccgctctgcgcatcccagttgccgtgcaggacggtcaccggcttcagaccgtaaccatccagggtctccagccagctttttaaccggagtttggccgagactgagctgtccggccccgccagcagggcgatctcccgatgccccatctcatagagatatttgacgctggcccgggtgccgtccgccgggttaaacgaaacgttaaacacggagctgtagggatcaacgtcgagaaacaggcagacgatatcatcgttgtcagcagcgattttctgcgcctgttcggtctccagcggcacgttgataatgactttatccacccgctgagatttcagctcattgatggaatcctggatgctttggttgacgctctcatcgatcatcgaaatcagaacctggtaaccttccaggttggcatagcgttttaccgctgccgccacctgggaaggcgcatgccaggccagagaaatagtcaccagcccgaccgtctggctctccttccccaccagctgctgcgccagccggtttggcacatagcgtaaggcctctatcgatttctccaccttgcgacgcgtcgcttcggatacattagctgatttgttgagtaccctggacacggtctggtaagagacgcccgcatggcgtgcgacgtcttccagagtagcgcttttagacttcatggtccggttccttatgttgttatcccatgattgtaacaggggccatttgaaaaaacgctcaccgccacctctcactgcaaaacaatagcgataaaagtattacgttcacaatacaacgaattgtgaatcatctcacccatcgcaacaaaaaccaccgtgattatttgcagttagtcacacaataatcatatctcatttgcctgaagttacatttaggcattttatgacaccagttatgtgaacgtaatacaaaacaataagaggatagagatgaacactacactgcgcgccctttcagtcgcgttagccgctgcgctaatcgctccttccgcgtttgcggccaccgccgcgatcccaacgatcgatttccatggctatatgcgcgccggggttggggtctccggcgacggtagcgaagcggaatggcaaaaaaataagctgggccgtttggggaacgagtcggatacctacggcgagctggagctgggctctgaggtctataagaaagatgacgtcagcttctatctcgacagtatggtcagcatggtctccgacggctctaacgataatgaaaccacgctgaacgatgatgcacagttcggcttacgtcagttgaacctgcagataaaggggctgatccctggcgatccgaatgcggtgatctggggcggtaaacgttactaccagcgccatgatctgcatatcatcgataccaaatactggaacatttccggctccggagccggggtggaaaactacaccctcggcccgggcgccgtctcgctggcctggatccgcggcgatgccaacgatgttgactatcgcgtcgatggcgacagcaacgtcaatatcaactatatcgatttacgctacgcgggctggaagccatgggcgggctcgtggaccgaattcggtatcgactacgcgatgccaaacaccaccaaaaaacaggatagctacggcggactgtacgatgctgacaacggcgtcatgctgaccggtgaaatcagtcaggatatgctgggcggctataacaaaaccgtgctgcagtacgccaacaaaggcctggcgcagaacatggtctcccagggcggcggctggtacgatatgtggaactacgtgaacgacgccaccggttatcgcgtgattaacaccggcctgatcccgattacagagaagttttctatcaaccacgttctgacctggggctcggcggatgacattaccgactataccgacaaaacgcggatgctgtcgctggtcgcccgcgggcagtaccagttcaccgactacgtgcgcctgattggcgaagtcggcggtttctatcagaaagacagctacaacaatggcaccagctacaaacaggccggtgagaaatacaccattgcgttgggcctggcggacgggccagactttatgtcacgtccggaattacgcatttttgcttcatatttgaatgattccgaagatggtaaaccgtttgaagaccagacggcgaataatacctggaatttcggcgtgcaggttgaggcctggtggtaatcgcgcacggctaagactcatacgttatttttatctcctgctgtaagactgttaattatcttccggtaaactttattgccactgctgtctttgtcttattttcgggataacctgctttcaggttatcccgttttatttatttccgggcggcaaaatgttcatccagaagctgacgcagcgcatcggactgtttaccgaaaatagcatgcacctgctgaccaagaataataacccctagcgcgccctgctgctgtaatgcttcggagtccacggccgcaagatggcgaacgctaacccgcagacgggtaatacaggcgtccacttgcgtaatattcgcttcgccaccaaaggcctgaataagcgcctcgatttgctgtttttccgcctcgcttaatggctgtgccggacgcgctggggagaaatagtgcaggaaggattttaaactcaccataataaactccaggtttaagataaaaaaaagcctgctcgtcagagcaggcgtggagaagaagaaattacgcgtgacgacggagaatacggcaatcccatgccgacagggtcagaggagccgataccgccgcgtcggtcaggcaatcccaatacccttgcggcagggtcagggtatggttttgcgcgctgtagttctgcaggaagataaatgcgttgtcaccgtcggtgcgcgcagtcgccaccacgccgggtggtaactccgtcgctatcgcccgcggcagggccagctccttgctcagggcggtaaagaaatcgcgctggaaggctaaatcgttgcgggaggccacatgccaggctttgcctttcccgaacgcgttcaccgtcacagccggccgtccggcataaaaatcatcccggtaggtggccagcgcctgggcgctctcgatatggatcagttcgcagagatggcgcacctgataagggccctgcagaccgcactgattcccggcaagcccctgcaccagattaaactcgccgtcattcaggcagtcgatctcttccgcccagatccccagcagattgcgcagcgggcccgggaagccgccgagatagcagagatcggactcattgacgataccggtccagtaggtggtcaccaggtggccgccgttggcgacaaacgcctccgcccgaccggcaaagccgtcgcgcaccatatataacatcggggcaatcactaactgatacggcgttaaatcgacatcggcgtcaatcacatcgacggcgatgccctgctcccagaacgggcggtagtgctcgttgaccgtcttctcatattccatcccaagattgcgcggcccctgggcgtcatccagcgcccagcggttctgctggtcgaagataatcgctactttcgcctcggtgcgacagcccctcacctccggcagcttgctgaggatctcgccgagctggcagacttcgcggccaatgcgggtatcaatatgtccgacgtggtcgaccactgcgccgtgaaatttctcaaccgaaccgcggcttttccgccactggaaatactgcaccgagtcggcgccatgcgccaccgcctgcagcgaggaaagaatatgcattcccggcttcttcagtttgctggtcggctgccagttggtggcgcccggggtggactccatcagcacaaacggtttgccgcccttcaggctgcgcatcatgtcgtgatacatcgcggtgtaacaggccagcgcggtttcgtctttatcgcggtgccacatcggatagctgtcccaggagatgaaatccagcgcctccgccagctgccagtagtcgtaatcgtagaaatactccataaagttggtagtcaccggcagggaggcattcgccgccttcagcggagcaatttcatggcggcagaaatcagtcacctgagcggtgttaaagcgatgccagtcaagattgagaccgtggatcgacatctcgccctgcggcgcaggcgattcaatctgcgaccagtcagtataggtatgactccagaaggtgctccaccaggcctggttgaggttctccagggtctggtaacgcgccttcagccagtcgcgaaaacggttctggcagagatcgcaatggcattcaccgccatattcgttggaaatatgccagcccagcaccgccgggtgtgaggaataacgttctgccagcagggtattgatttgcagggttttctcgcgatagaccggtgacgacatacagtggttgtgacggccgccgtgcagggccggcacccgatcgcgacccacccgcagaacctgcggatagcgctgcgacatccacgccggacgcgcgccgctcggcgtggccagaaagacatgaatgccggcggcctacagtttatcgaggataatatccagccaggcgaaattaaataccccttcgcgtggctccagtttcgcccagctaaatattcccaccgacatcacattgcattttgcctgctgcatcatggcaatgtctttatcaataatatcggggtcattctcccattgctccggattataatccgcgccatgcagcagcgtactaaccttcggatgtaaaggtgcaaatttattcataataaacttcctgaaaaagacgacaaaaaattaattaaaaacttttaccgacggcaatacttttccctggcaatcaaatagcgcctgattttcacgtgcattaccctctttccactcgtcgtggatatatttcatccccgccggggtggcccaggtatttcccggcacggcaatccatgtaggctcccaatagaaaatacctttgccacgctggtctggcacatcaaccaccgcctgcattaaatcgtgaatatagttatattgcccctgtacgctggcgggatatcccccatccttttcctcttttgcctggaaactattttccgcgttatcgcagttggccagggtataggcataggccgcctcgacgacgatgacgtctttgttatagcgtttgctgatgtcatccatattggccttcagggcgctgatcgggccattccagtaggtgtacatcgacagaccaatcacgtcatacggtacatggcgcttgtcgatctcatcaaaccaccagcggaaggtatcgttcttggtcccttcggccagatgcagcatgattttcacctgctcgccctggcgcaggttctccttcaggccagcgatagccgcgttcagcaggccagccagccggtcgaactcgccgcccccctgcccccagcttttcccttccggccacaggatgccgccgttgatttcgttgccgatctgcaccatatccggcaggacgcctgcctgcttaaagcgggcgatggtatcgcgggtatagtcatgaatcgccgttttcagctgcggataatccatcttttcccaggctttcggcttgaactgcttgccgggatcggtccagaaatcgctgtaatgaaaatcgagcagcagtttcatcccctgggctttcgcccgtttcgcgagggtcagggtggtggccaggtcgttatttccgccgccatagccctcaccgctcgccgattgcggatccacccacagacggaggcgaacatagttgacgccgttctctttcagaatagcgatcggatccttgcgctgattattctgatcgtagaacgtcgccccgtgcttttcggcgtccagcagcgtggagatatccgcgcctttgataaagtccgccggcatgccctgaaacgcgcgggttgcaagcgcgtccgcggccagagaagaggtggagaaactgcatgccagacaaaccgcaagccatgcgggtgtgaatcttttcatgtgcttatcctttagtactgcccgaggtcaggccggacacgaagtatttttgtagcgccaggtagaggatcgccaccggtacggcgatcagcaccgcccccgccgcgtaggtggtgtagctggcacccattttttgcgccaccaggttatacagaccgataggcagcgtgtatttatccggggtacgcaggatggtgctggagaggatgaaatcccccagcggcccagtgaacgagaacagcgccaccaccgcgaggatgggcctcgacaacggcatgatgatctcgataaagatgcgaaagctgctggcgccatccatgcgggcggactcatccagatctttggggatcgcgtcgagataccccttcatcagccaggtattcatcgggatcatccccccgacgtagatcagcaccagcgccaaatggctgttaatcaggccaagcagttgcgacaggacaaagatggcaatcagcgcggaaaactgtgggatcatctgcagcagcaggaacagcatcagcccgttctgccgccctttaaagcggaagcgggagaaggcgtaagcggtaaagctaacgctaatcagggtcagcaccatagtcaggaagctgattttcatcgagttccagtaccaggtgaggtaattcacattgccattgaacagatcggcatagtgctggaacgacacattttccggaatgattgaggtactgagcaggctattgccggcgttcagcgacgccccgaccgtccagaccagcggatagataatcaccactgagaccagaataaccaccagccaggtgagagagagccggatccacttttcgcgtttaatactgggtgattgagccatgttgcttcccttacgccatgtcgtcatttttgaaggatttggtggcgcggaactgccacagcgccaggccgacgacaaagatcgacagcaggatcgtgatggtcgccgcgatggcgtactgcgacgaagacatcgtcagcttatagatccacgacaccagaatatccgtcccgccggcgttagagcctgccaccgcagggccgccgttgttgaacaggtaaatgatattgaagttattaaagttgaaggtgtactgggtgatgatgatcggcgcgatcgcatacagcaccagcggcagggtgatggtgcgcagacgggtaaaggcgctggcgccgtccatcgtcgccgcttcatacagatcgtccgggatcgcctgcaacacgccggtggtcatggcaaagacaaacgggaagccaagccaggtctgcatcatgatcagcgccgttttggtccagaacggatcggtgagccatgccttcggactgatgccaaaaaaggacaggatcgcgttgttgatgaccccgaaggagtcgttgaacataccggcaaaaacgagaatggtgacaaaccccggcaccgcccacggcaaaataaagatggtgcggatcagcggcttaaagcgcagatctttttggttcaccagaatcgccaacaacacgcccaccgtacactgcagggtggtcgccagcagcgtccacaccacggtccactgcagcacatccaggaaagtggagcgccagatggagagggtgaaaatattaataaagtttttcagccccacccagtccaccagcttcgccggcggggtgtggtacaggttgtagttggtgaaggcgatggcgaaaccgaacagaatcggaaagatcaccacaaacaccagcagaataaagcccggggtgatcatcaggtacggaaagccgtcgctcagcagcatctggtactgcttacgcacgctgttgagggcgatcccctcatcgcgttttttgccgttgagccacgcatcccgcagcgagagaaaatagatcagcacgccgaaagcgacgatcagcacgctgataatcccctcggctaacaggaagatagagttatcccgcggtacctcttcacccagggtatataacccccacaacccctcacgcaggaaatcataaaaaatccccataaagctgctcagcagcaccaggaagaccagccctttcagccactggcgatgataaaactgaccgaaacccggcacgattgccagcagcaggccgcaccatgcatggcgcccgggcccgcgtgcgtcgctaaaattttcgctggaatggatgctcacactcgactccttctacaaacgggaggtccccctcccgctcggtgacttcacgtgacggtgaattactgattgctggcctgcatcgcttcgatctgcatcgtgatctgtttcaccgcgttatcgagcgcggcctgcggcgcctgcttaccggtgaggctcagttcaagcgcggcgttggccggcccccacacttcccccatctcgggaatgcccggcatcgccaccgctcgcgccgactggatggcgacggcgctggccttttggtcgtttttaatcaccggatcgtcaatcatcgccttcagcggcggaatttcgccagtggcgacatagcgggctttcacatactgcggctggttgatgaactcgataaactgttgcgccagcgctttgtctttactccaggtcgatactacatagcctttgacgccgaggaaggagctcatcggcttgccgtccggcagggtcggcaggggcgccacgccatagttaatgccagcggcttcatacggctggaaagcccaggggccgttgatcaccgccgccgcttttttctcggtaaccagggaatcgatggcattcagcccgttatcgccgaggatccccgccggaaagaccttctcggcatagaattttttcaggaaggtgacggcttcgacggcgccgggggtattgagacccacctgctgcgggttaaagccgccgctgtcgtttttagcaaagatatagccgcccatcgggccaatcgccccccagctgtaatagatctggtcaaacttggcgagcaggccgtatttgttctgctcgcgctgggttttcgagtagtccagccaggcctgcaggctgtccagcggcttgtcgatcaggtccttgttgtagataagcaccagggtttccaccgccttcgggatcccatacagcgcgttgtccatgcggaaggcattgatggaggctggcgtaaaggcatcctgtttcgcctgatcgacgctgagcggcgagagtagtccctgaaccacggcgccgccgagctggtcattcgggatcaccagcacgtccggcccaatgcccgccgggccgtcgaggcgcagtttttccagttgctgggcgtagggcatctcctggagattgaccttcacgttgtactgcttttcaaaatcgctaaccgcggttttgatgccagcggattttttaatgtcctcccagacgttgagctgcccggcggcatgcgcctgcaggctggcgagttgtcccgccgccagggtggtaaggatcagtgcagcaagcgtgttctttttcattatcaacctcatgtgaaggtataacaatttaatggtttttatttgaattccgtctgccagttagaaaaataaatcttttcaaactgccgtattatttggaaaacatgttctgatgcgcttttgttatacgctacgctttgatcgttgataaaactaccataagctgccagttgtgtgatcatccttgcagaaatgaaacgtccctgtatggcgcaaaatccgcggaagttatagtcagggcatgattttactgctgttgaacatcgtcacaccgatttgttacacgtaatacaaatcacactcaacatagcgataagccaacggcaaataacagctactcactccggggaatgtggatgtccaatatacgactgaggaatgtcaccaaaaggttcggcagcacggtgacgctgcaccaggtcaatctcgatattgaagatggcgagtttgccgtcttcgtcggcccttccggttgtggaaaatcgacgctactgcgcatgattgccgggctggaagaggtcagcgaaggagaagtactgatcggcgatgaggtgatgaatgatgtcgtgcccgcccgccgcggcgtggcgatggtcttccagtcctatgcgctctatccgcacatgacggtggcagagaacatgggctacgggctgaaggtgaataaagtgccgaaaacggagatccgtcgccaggtggaaatggtggctaaaacgctgcagctctcgcacctgctggatcgtaaaccgaagcagctctctggcggccagcggcagcgcgtggccattggccgggcgatcgtgcgtaatccccgggtatttatgttcgatgagccgctctctaaccttgatgcggagctgcgcgtcgatatgcgcctgcatattgcccgtctgcaccaggagctgaagaccactatggtgtatgtcacgcacgatcaggtggaggcgatgacgctggccgataaaatcgtggtcatgaactacgggaaagtcgaacaaatgggttcgccgatggcgctgtactacaatccggtcaacaaattcgtcgccggctttatcggctcgccgaagatgaactttctgccggctatcgtcagcgactggcagccggaacgcttaacggtcaccctcgcgcaggaccatcagctggccctgaatatcgccacccagccgctgaagcccggcgctgcggtgacgctggggatccggccggagcacctcaccccggaaatcaccaccggtaccgtggtggagtttcaatgtgaagtggtggagcgtctgggcaacaatacctatctgttcggccagtgctacggccacgacaacgtcaaggttctgctgcccggcgacgtccatttccgcccctggcagaaaattaatctggctttcgatgagcgcttctgcatggtgtttgatgagaacgacctgcgcatcagcgctgatatcccggcaccggatgcacactagctaacatattgctgtcatctgcgcagcgtatgctgcgactgaatgccggaacacaccctgcccggcattcacaccctcatttttattctgctacatcggaatcatccttctctcccggcatcgcagcctattgtgatgccggctttttccccaaacgacgcgttttctcccgctgcgcccgaattatctttcgcatatactgatgacacccggcgaacgataaggacacaggcatgaggacccggcatctgatggcgctgtttacaggagtgctgatactggccatcatcctgcccatttcactcagcatctggcaggcggcgcggcaggccaaaatgcagttctatcgtgaactggatgactattccaaccgtatcgtcgttcggacgctgcaggttgccgaccaggcccgggaagcgttacgagaggctgacgcacacaccgccgcctcctgtagccctgaacatctgcttacgctccgccgcatcgcctatacccatcgctacattcaggaagtgctctggctgcgtgattccgtgccgcaatgctcctccctggaagaccatagcgtcgcggtcaccttccccccgccggaccacattgcccccgacggctatcgcacctggctgacctcaattaacgatcttggcctcgatcatcagatgacggccatgggcagccggcagcacatggtgatgatcgaccccgtctcctttattgatgtcgttcccgccagcgaagagaagatccataccatgctgtttggcctggaccaccagaaaatggtgatcagcagtcagccgctgccggcgaaagtctggcaacgcattaaagatccgcatgtggatatgcttactctggataacacagtctaccggatccagcgcattcccgagctgggctctggcatcgtaacctggtcttcaaccttgccgctgcagcagcgcattcgacagcagctgttcttctggctccctgccggcattttcaccagcctgctcgccacctggctgctgctgcgtctgctaaggcacctgcgctcaccgcgcaacagcatgctggacgccctcaattccgaagcgattcaggttcactatcagccgattatttcgttgcaggacgggaaaattgccggggcggaggccctggcccgctggcagcagcccgatggcacttttttatcgccggatatctttattcccctggccgagcagaccgggctcatcacgcagctgacggaagatatcgtcaggaaaatttttgccgatctcggcccctggctgcggcagcggccggaagtgcacatctccatcaacctgtcggtagatgatttacgctcgcccaccctgccgacgttgttgcacaatcagctacagcactgggggatcgccgccgaacagatcatccttgaaatcaccgagcgcggttttgtcgacccggagacgactatgccggtgatcgctcactaccgtcaggctggccatcggatctcgattgacgatttcggtaccggctactccagcctgagctatctgcagaaactggacgtcgacacgctgaaaatcgataaatcttttgtcgataccctcgagtaccggccgctgccgccgcacattattgaaatggccaaagcgctcaatctggccaccgtcgccgaaggggtggaaaccgaaagccagcgcgactggctgcgccagcatggcgttcagtacgcccaggggtggctttacagcaaagcgctgccaaaagagcagttcattctgtgggcagagcataacctccatgcgcattaagcggcgggtggcttgagcggaacgtcagggggcgctacttcagataggatttaatcacctgcatcaccgtctccagatccgcttcgcgctgcgtctcgtcaggctctttcaccacatggtcggtaagatgcccctgaataacctgcagcatcatgccgttgaccgcgccgcggatcgccgccagctgctgtaatatttcagcgcactcatgctcgcgattaagcattttctctaacgcggtactctgcccctgaattttcttcagccgggtcagtaacatctttttgtgtcgaactgtatgtgacattgcacgatccaccgtttcattctgtccgggattaccgacctgcgtggtcagcaacgcctgccagcataccatgatcctttttattagccgctttatctactggggggtagtattttactactgggggggagtaggataatcgcacttttggcaaggatcccgatatgaacgatttcacttcccttctgcagcagggcaatgcctggctgtttatacccagcgcaatactgctcggcgcgctgcacggcctcgaaccgggccattcaaaaacgatgatggccgcctttatcgtggcggtacggggaacgttaaaacaggcggtactgctggggctggcggccacggtttcccatacggcggtggtctggctgatcgccatggccggcctgtggtttggccgcggctggaacgcccaaacctctgaaccctggtttcagctggtctcagggattgtcgttgtgctgattgcctgctggatgctctggcgcacctggcgcgaatcgcagcctcacacgcaccatgagcaccaccatgaacatgagcaccaccatgaacatgatcaccaccatgaccatgatcaccgccatgaccatgatcaccgccatgaccatgatcaccgccatgaccatcaccatgcgtcctcatccgccgcgccgctggtggcggaggagtggcaggacgcgcatcagcgggcccatgctcaggagatcaaccggcgctttgatggccgccaggtgacgaccgggcagatcgtgctgtttggcctgaccggggggctgatcccctgcccggcgtccattaccgtgctgcttatctgtttacagctgaagaaattctcgctgggcgccacgctggtgctgggctttagcgttggtctggcgctgacgctggtggcttccggggccatcgccgccctgagccttaaacatgccacccgccgctggccgtggcttaacgacctctcgcgcaaggcgccctggttctcaggcttactgattattgtggtggggatctacatgatgcttcatggcctgagcggcctgtaagcgatgaaaggccctctccgtgatgaagagggcgatgggttaattcaggagactatttcccggggagggctgaccgcgttgcggctgacgggctggctgaaccacggtaggcacagctggatcagcggcccaatcgacagcgcgtagatgacggttccgacgccaaatttgccccccagcagccagccaatcagcagtacggaaagctcgatcgccgtccggataccgcgcagtgaccaaccagtgcgagcatgcagaccggtcatcaagccatcgcgcggcccggggccaaagcccgcgccaatatacatcccggtagcgatagcgttcagcacaatcgctcctaccagcagcgcactgcgcgccaccagcgactccagcggcggcaggacggccagcgtggcgtccgccgctagtcccagcacgatgacattgctcaccgtgccgagccccggcatttgccggatcgggatccacagcagcagtaccgccgcgccggtcaggataatcaccgtaccgaaactgatccccagctgtttagccaccccgagatggaaaacatcccacggatcggcgccgagattggcatgcacgaagagcgccgtggacacgccgtaaagcaccagaccaatatataactgcagcaggcgacgaagcatattttttcctcaacatcattgcgaatgccctcatcatcagcaaaaatggactgataattaatggccagttttggaaaagtggatcgctatgtcagcccgacgctttggaacccaatcgctggtacgcctgctcggcaactggcaggagaccagctcacgcacgccgctatggcgccagctggcggaagcgctccgcctgctgatccttgatggtcgcctgacgctgcaaacgcgcctgcccggcgagcgcgagctggcggcggccctgaacgtcagccggaccaccatcgccagcgccctcggccagttgcgggaggagggctttctctacagccgccaggggagcgggtcacgcattgttttgccggaacgccccgccgatcttcctctgcctgccggcatctcatctacgcttaatctctctactgccgccctcagcgccgggccggaggtccatcaggccttccagcacgctatgaccctgctgccgccctatctcgcacagactggctatgaccagcaggggctgccggtgctgcgggaggcgattgcccggcgctacagcgaacgcggtctgccgacgcggcccgatgaggtgatggtggtcaacggcgccctcagcgccttcgcgctgatcctgcgcctgttcaccgggccgggcgatcgggtggttattgacgcccccacctatccgatggccatcagcgccattcagggcgcctcctgccgccccgtcggggtcgcgcttccgcagcagggatgggactgcgatggactggcggcgactattgcgcagactgcgccgcggctggcgtggctgatgccggattttcacaaccccaccggacgctgtctggatgcccccacccgccagcgggtcgcggacatcgccgccaggacgcgaacaacgctggtaatcgacgagaccatggccgacctttggtataacgcgccgccgcccccgccgctggccagctttaatcccgatgccgcggtgctcaccattggttcggccgggaaaagcttctgggggggactacgtatcggctggatccgcgccagcgcgcggaccatcgcctcgcttattcaggcccgcgattcgctggatttgggtacgccgctgctggagcaactggcctgctgctggctactggaaaatgccgccacactgctgccgccgcggcgggatatgctcaaggcgcgccgggacatgtgcgaaactctgatggcggaatattttccccgctggcggttttcgccaccggaaggtgggctctctttttgggtggaacttcctgacatgctggccaccctgttctctgcgcgtgcggaaagccaggggatccatatcggcaccggtacgcggtttgggctggaaggggcgttcgatcgctatttacgtctgccgtttacgctgccggatgaagcattgcgccgggccttctccacgctacaaccgctgtggcaaagccttgctgaacagaaggaaaatacacgtttgcgaaaaataatataagaaaatagcgacgggctgacttcagcccgtcaaatgaccttcatccatgaggtatatgagatgtttttataaaattgcctggctatcctgccctctggttatggcaacccaatgacagaaagaaggcaatttcattaatgctggcgcggaataggaaaccctttcagggaaataataaagccatcttcatcttttttgattttagcgccggtgtcacaccagtcggaagcaatgcgaaagaactcatcactaccgatattccagttcaggcggacgtgttttacgtatcctgagcgcaacatatcgcaagcttcgctatagttgctggctgtagagaattgttgtttcattttttcttcttcagaagttttcttaatgctttgatttctttaggggtaagtggcgtcgcttcctcttcggtatgctggctgtcaatgtcctcttccgtcacccccgcctcacctgctgactcctccagctgaaaagccagctgcagcagcttttccgttgccgttcccaggttctcgttattaacttccgcataatgacgcaacttttcttttagctctgcgtcaatttttacattcaaaaccactgtggtcatagctacgcttcccgtgcaataaaatcatcataattaatacacgaagttaacatgctgatccagagatatattttacagcatgagcctggcaacaaattcccatcagtaagatgcgctttatttatgacatgcaaatgacattaatatttcagtagtatttcagatttatgacaagtaaatattatggaataaaagaaggggggtttaacaacaaaaactaatatgcgatctttatcagaaattaattattgcaggaataaaaaccggacaaatataagggaaacaccaggcgggagaaatgggtgggggccctgccagctacatcccggcacacacgtcgtctgctctggctgcttccttccggacctgacctggtaaacagagtagcgttgcgggagaaccaacagagcccccattgagagcgttagttgcctaacgcgctggcgcattatccctgctgacctggtgaattgcaagctcacaccgtccgcctgctggtttattgcgcaataacgcgaataaaaccagccactcacggtcagcctgtgagattgcgagcctgcgctcagcacacatccgggttatccaccatacttatcctcttcgtcctcttttatcaccagtacattgtctcgacggtaatcgaatgactgactcatcaccacagaccatcactctgcctttacctgctattgaagggatgaccatcgcctttcagggcgtaaactacctgcgtcctgaaaaaatgctcgacttcgcgaccatcagtcccgcgccggtgcgggcggttacgccgctggcgctgctctattccaccgtcggcgtgctgcgccaggtggagctacgcaagctgccggtctatatcagcggtcgggtggtgtaccctatctcgtcgttaaccatgccgggcctgcgcgcgaggctgatcatcaacgccacttcgcagcggttgaaatttcttgaaagtctcatcgccagctcagcctcggacaatgtccatggcatgcagatcctcggcctcgctctgacgttcaccgtcgaacaggccgcctgacccaggccggctgtacagctcctggcttagcgcttatgctgacgttttgccggtaacaggacagaaaatggctccgcacgacacatttccccaacgcgtctggcacatcgtggcgtcgataccggaagggtatgtcacgacctacggcgaggtcgcccggctggcaggttcaccgcgcgcggcgcgccaggtgggcggcgtattgaagcgcctgccggaagggtccaccctgccatggcatcgggtggtcaatcgccatggcgatatctccctcaccggccccgatctacagcggcagcgtcaggcgctgctggccgagggtgtgcaggtctccggcagcggccatatcgatctccagcattatcgctgggtttattgaaggcaaaaaaaagcccccatccgggggcgtagcgagcttactgggcgacaggaacggcggtctgctggaccggaaccagcgtcaggtcggcatgagtgccgccctggtttattaccgtctgcacggtatcggtaataaacatcaactggccgttaaccgtgatcgccgcgcttagcagaatgcgagcgttcggttgaatatctgccgggttgtaaggcagcgcaaagttaaatggcgcctgtttgccttcggtacgcaccgctttttgcgacaatacgcgggctggcgcatctgccagagaagcatccgacagggtcaccgtcagtaccgcatccggcggtaaagcgattctctggcggatattaatcgtccccgtgacgctcggctgctgctgcgccacgctcagcgtcgcgataccgtaagggtcgggcgcggccgcctgcgtcgaagaattgttcgagtggtgattagcacaggcggtcagcgtcgcggcgacggctaaggcactaaacatataggcaaatttcatgatgttctccttatcatcccttaatacccaggaggatgttccgccgcttcgccggcaggaactttcgtgtcgtcaataagtgtggcacagatctcagatttgttcctgttaactggtcgttattcagattattacacccatcggaccacttgcgattccaggttatacttggccacattacgcgcgctgcgccgctattgttaattgaggataagtatgagtcaggcactctctaacctgctggcattattagatctggaaaaaattgaggaagggttgtttcgcgggcagagcgaagacctggggttacgtcaggtttttggcggccaggtagtgggtcaggcgctgtatgcggcaaaagagaccgtgcccgttgagcgtctggttcattcgtttcacagctactttcttcgccccggcgatagccagaagccgatcgtttacgatgtggaggtgctgcgcgacggcaacagcttcagcgcccgtcgggtcgccgccatccagaacgggaagccgattttctatatgaccgcctccttccaggcgccagagaatggctatgagcatcagaaagcaatgccggccgccccctcccctgacggcctgccttcggaaaccgatatcgctcgcaagctggcgcatctcctgccgccgcaggtgaaagacaaattcctctgcgataaaccgctggagatccgtccggtggagtttcataacccaatgaaaggccatatcgccgaaccggtgcgccaggtctggctgcgcgccaacggcgccgtccctgacgatctgcgtattcatcagtatctgctgggctatgcttcagactttaacttcctgccggtggcgctgcagccgcacggcgttggtttccttgagcccggcatgcaggtcgccaccatcgaccactctatgtggttccaccggccgtttaatattaatgaatggctgctttatagcgtcgaaagcacctcggcctccagcgcccgcggcttcgttcgcggcgaattctacacccaggatggcacgctggttgcctcaacggttcaggaaggggtgatgcgcaaccgcaacgcataaaaaaagcctcccggacgggaggcttttcgctatcaggagagaatggcttttttatcaggcgttataggcgttttcgccatggctgttgacgtccagcccttcgcgctcctgctcttccggcacgcgcagcccgacggtcatatccgccactttgtagccgatgaacgccacaacgccggaccagaccacggtgatggcgatactttccagttgccccagcagctgatggcccatggtgacgccttccgcataaccgacgccgcccagagaagtcgccgcgaagataccagtcaggatacagccgacgatgccgcagacgccgtgaacgccgaagacgtcgcaaggatcatccacacgcagccagcgtttcagcgcagtcacgccccagatacccgccaggccagaggcgataccgacgatcagcgccccgccgacaccgatataaccacacgccggcgtaacgccaaccagaccggcaattgccccggagcaggcgcccagcagtgaaggtttgccgcgcagagcccattcgccaaaggtccacgccaggatagccgcagcggtcgccacgacggtgttaacgaacgccagggccgcaatttcattcgctgcgctggcagagccggcgttgaagccgaaccagcccacgtagaggatagcggtgccagtgaacaccatcggcaggttatgcggtttgaacgcttctttgccgaagcccacgcgtttgcccatcatataggcgccgaccagcccggcgaccgcggcgttgatgtgcacaacggtgccgccggcgaagtccagcgcgccatgggtcgccagcagaccgccgccccaaaccatatgcgcaatcggcacgtaggagagtgtcatccacaccaccacgaagatcagtaccgcggagaaacgaatacgttccgccagcgccccgacaatcagcccgacggtgatgcaggcgaacgagccctggaaggccacgtggatatactgatagaaggtgcccatcagcgctttcagctcaatatttttcagcatcacccagtcaaagctgccgaagaagctgccgccggtgccgaaggccagggtatagccataaatcacccacaatacgcagaccaggccaaaggtgacaatcacctgagtcagcatggacagaacgttcttaccgcggatcaggccgccgtaaaacagcgcaatccccgggatagtcataaacagaaccagcgcggtgcaaatcatcataaacgcgttatcggctttgtccgccaccgcaggcgcggccatcgccagccccggcagaagggctaatgcccccagacccgatttcattgttgccattttcattgtttcgttccccatcactgtgtggtctggaaattacagtgccgcttcgtcagcttcgccggtacggatgcgaatgacgcgctgcaattcagcgacgaaaattttgccgtcgccaatttttccggtgtaagccgctttgctgatgacatcgatgacttcatccagctgatcgtcggcaatcgccacatcaatcttcacttttggcagaaagttgacgctatactcggcgccgcggtagagctccgcgtgacctttctgacggccaaatcctttgacttcagtgaccgtcaggccctgaatgccgatggaagacaaagcttcacgcacgtcttccagtttgaatggtttgattaccacggtaaccagcttcataagtcccctccagtcagtattcggtaatggccgcagctaacacgatggatataaagcaagggctatgccagaaatgaaaaaaggccgcaaagcggccctttgatggcaaaaaacaggggacaggtcaggcaatatcctgcgcaacggcgcctggcgcgcaaaaatgcaccacaacggtgcatttgatgtaacgtttttgcaccatcgcaggccgcccagcgttccctgcctgctggtggtgcatcaggcgctgagcgactcctctctggcgctggccgccagctcttcgccggccagctgcagctgatacatctgccagtagcggcctttcgccgccagcagctgctgatgggtgccccgctcgacagcctgacctcgatgcagaaccaggatggtatcggcctccacaatggtcgacagccgatgggcaataaccacgagggtggtatgctggcggaccttcgccagcgcctgctggatcgcctgctcggtaccggagtcgatgtttgccgtcgcctcatccaaaatcagtacctgcggggtgtccaccagcacgcgcgccagcgccagcagctgcttctgcccgacggagagattattgccctgctcgcccagttgggtgtacagcccatcgctcatgctgcgcgccaccgccgccagctgcaccgcctccagcgcttcccaaacctgcgcctcactgatgtcccggcccagcgcgacgttggcgtaaacggtatccgccagcactacgggatcctgttgcaccatcgcgatgccccgacgcaacgcgctgtggctgagggatgcgagcggtcgaccatcgatgcggatctcgccgtgggttaacgggtaatagcccatcatcagactggcgagggtactttttccgctgccggtatgtccgaccagcgccacgaagctgcgggagggaatatccagcgtgatatcctggagaaccagacggtccccccggtaagcaaaggagagatggtcaatttccacccgaccgctgctcagcggcgcgtcatccgcaccccacgcctggcgcgggcgatccatcagctcgaaaacgcgctcgccggcgaccaccgcctgctgcagcatcgactgctgggtggtcagctcgataagcggctcgttaaggcgtccaagatagctgataaacgcgtacaggaccccaacctcgatcgtgcccaccgcgctaaagccgaacagcatcagcagcccgcacagcaccagcgaggaaaaaaggctcagcagcgggcgcagcagaaaaccgtccaggcgcagcgtctgcatccgcgccagatagtgggcatagctggcctcgcgcatccgttcgccaaagcgcgcctgctggcggaactgctggatgacgcccatgccgttgatcacttcgttgaagccatcgttgatgtcggcaagccaggcgcgcacccgccgcacgatcggcgtgctatagcgctgatagataatcatcacgatcagcaccgccgggaaaatcgtgatcgccaccagcgccatccgccaggcgaggctaaacatcgccaccagcatcgcgccgatcagcgcggcgctgcgcagtaccgtagccaccaccgtcacgtacagatcgcgaatgacttccgtatcgttggttacccgtgagataagctgcccaaccggctgggtatcaaactcgctgagcggctgatgcagggcggcatccatcacgtcgctgcgcaactgctggacgacgccgaccgcggcgcggttaaacagcagcgactggttatagtgcaggagcgccgccagcagctgcaggccgatataggctaccgccaggccggccaccagcttcagcggcagcgtatgtttcgccaccatgttgtcgatgaaatagctaataagcagcgggccgctcacttccgccgccgccgcaatccacatcatcgccaccgcgatggccaacggcttgcgccacggtgaaccataggccagcaggcgtttaagcgtcggccagagttcagtaaagctacgcatccagggcctcctcttgcgtctgcggaacctcgtcgagcgcggcctccagctgctgatatcgatacatgtcgcggtaccagccgggctgcacggccagcgcctcgtggcggccgcgctgggcaatatgcccatgctgcagtaccaaaatttcactggcctcagtgagcgccgacaggcggtgggcgctgataatgaccgtccgcccctccccccactggcgcaggttatgcaggatctggtgctcggtgcggccatccaccgccgataaggcatcgtcgaggatcaaaatttcggcctccagcagcagggcgcgagcaatcgagatgcgctgtttctggccgccggagagcatcacgccgcgctcgcccacttcggtctcgtagccctgaggcagacgcagaatgtcgtcatgcacgctggccagttgtgcaacccgctcaatctgcgcctgcgtcgcgtccggttttcccagcgcgatattattggcgacggtatcggagaataaaaatggcgtctgattgaccaccgccaaccgggcgcgccagctgtcgagctgcagaatcggcagcggcagatcgtgaaagcggatctcgccgtgagtgacgtcaaaatggcgctgcagcagcgccagaatggtgcttttgccggcgcccgtcggcccgcagatgcccagcatttgccccggctggagagtaaaatttacctgctccagcgaaggtttgctcgcctgcggatagatgaaatcacggatagcaacctgcaggacgccgcggcctgccggcaccgcctcggtcccgtcatccaccgccggcgcctcttcaagcatcgtgcggatacgaccataggccgcgctaccgcgctccacgatgttaaacatccacgccagcgccagcatcggccagatcatcaggccaagatacatcacgaagctggtcagctggcccagggtcaggctgccgtggatcaccatccagctgccgccgccgatggccagcaggttagcggccccgatggcgatatagatggtggggtcgaagcgggcgtcaatgcgtgccacgcgcatgtttttcgcgccggtatcggcagcatcggcagcaaactgcgccgactggcgatcctccagcccaaacgccttaatcatgcggatgctggtcaggctctcctgcgtgcgatcgttgaggctggaaaaggccgcctgagcaacgcgaaaacgttcgtgaagcgcatcgccgttgcgtttgatcgccagggccatcagcggcatcggcagcagcgccagcagagtaagctgccagctaatctgcgtcgacattacaatcaataccgcacagcccatcaccagggaatccacgagggttaatactccttcgccagcggcaaacaccacccggtccacgtcattggtggcgcgggcgataagatccccggtgcgatggcgcaaatagaacgccggatgctggcggctcagttgccggtaaaaatcttcccgcagctcaaccgccaactggtaagaagcaccgaacaacagcacgcgccagacatagcgcagcaggtagaccatcaccgcgatcagcaccagcgcgccgatccacatccacaccttctccgcggtgtaaggttgttgcgtcacgccgtcgaccacaatgcccaccaccttcggcggaataagctgcaggacggcaataatgaccagcagggcaattgcgccaagatagcggcgccactcccggcggaagtaccagctgagttgagcaaataatcgcaagcaataaaatcctgattttgtaatgggttacggcgcaataccgttattcgacaggcaaggcggtggtatattttatctgttccatggcaaaactcgaagtgacatccgacagaccaggcacactgttcactaaacgtttataaaagtcgtcatagcgtttcatatcagccacctgcacccgtagcaggtagtcatactcccccgccatccgccagaagccgagcacttccgccatctgcgtcacttcgctcacgaactgacagtaccagtcgctgctatgatgctgagtcttgatcaggacgaacgccgtcagccccagccccaccttttccgcgtccaacagggcgacgcgcccgcggagaatgccctcgtcttcgagccgtttcaggcgtttccagcagggcgtggtggtcagattaacggcatcggccagcgcctgcaaagagagggtgcaatcttcctgcagtagcgccagcagcttacggtcaattttatctagcattgggcatcctcagagaaaattttgctctcataatggtaatccacaggttaaatggcaacaatttttcctgcgctttccgctaagctaggcacaaaatgacaaacaggaaatcacgatgaatagcgcctgggttaaacatgccattagcgaaatcaacgcggactatcagcgctccgccgacacgcacctgatccgtctgccgctgcccgcttttccgggcatccacctgtatctgaaagatgaaagcacccaccccaccggcagcctgaagcatcgcctggcgcggtcgctgtttctctatggcttgtgcaacggctggatcaaagaaggcacgccaattatagagtcctcctcagggtcaaccgccgtttcggaggcctatttcgcccgcctgctggggctgccgtttatcgctgtgatgccctcctgcaccgccagacgcaaaatcgaacagatcgagttctacggcggacgctgccattttgtgcagagcgccggcgaaatctacgcggcttccgaaacgctggcccgcgagctgaacggccattatatggatcagtttaccttcgccgagcgggccaccgactggcgcggcaacaacaatatcgccgacagtattttccgccagatgagccatgagccgcacccgcagccgtcatggatcgtcatgagcgccggcaccggcggcacctcagcgaccattggccgctatattcgcagccagggctacgagacgcagctgatggtcgttgatccgcagaattcggtgttcctcgattactggcagacccgcgacgccagcctgcgcagcccggtcggcagcaaaattgaaggcatcggacggccgcgcgtcgagccgtcgtttattcccgacgttgtcgatgagatgctgcgcgtgccggatgcggcgagcgtagccaccgccctgtggctggaaacgcagcttgggcgcaaggtcggcgcctcgaccggcaccaatatgtggggcgtattgcagctggccgcgcggatgcgcgaggaaggtcgcaccggctcgatagtgacactcctgtgcgacagcggcgagcgttacctggaaagctattacaacccgcagtgggtggcggacaatatcggcgatattgcgccctggcaggcggagatcgccggtctggtcgaaaggcgataaaaaaagccagatagaagcctatctggcttgctggaaggggctctctattcgggggaataaggaagatcaggaatatccagcaaatgagttaaaaaatgggagactgcctgattccggcagtcgccaattaccggcagatgcggcagctcggctatcagctgcggcatcgcgttgcccatgatgaacccccgcccaacgctgcccagcatctcgcggtcgttcatcgcatcgccgacggccatgcactcctgcagggtgaagcctaaatgctggctgagcaccgccagcgccgcgcctttattgcagccaaccggcagcacctccggacagtccattgccgagaagcagagaaatgcgcgatcgcccagcgtctcattcagctggatccgcagacggcgcaaatcgtcatgatcgccgcagaaacagatcttggtgacatgctgcgccgacatacgctttagatcgcacagttgatagtgaaagccgctgaatacatgcgcttgcaacaattcaggccttgcctggccggtaaaccagccgccatcgttaaagacgtgcatgctggcctgggtatcccatttgccgtgcagcaccgcttccgccgcctcgggagcgagatcctggcgataaagctcctccccttccagcgaatggatgcgcgtcccgttgccggtgatcagaaatgcatcaagggaaaattcgccaatcacatggtgcatctccagcacatggcggccggtggcgaaggtcaaggtgatatcgcgctcacgcagccgtttcagcgcggaaagcgtcttttctccaagacgatggtccggcatcagcagggtgccgtccatatcaaatgccgccagttttgccatggtatattccccgatgtgtgatgggcttcgcttgtgttgcagtatcacctgggatatacggaagtaatagtgaatagatattattaattgttccgggtttacagcggcccggtggacgacggcccccatgcgactcttacaccgtttaaatcaataccagcgcctatggcaaccctcagccggggcgccgcagcaggtcaccgtcggcgaactggcggagcgctgtttttgcagcgagcgccacgtccgtactctgctgcgtcaggcgcaggaggccgggtggctaagctggcaggccagctccgggcgcggcaaacgcggacagctcttatttcacaaaaccccggaaagtctgcgcaacgagatgatggagcaggcgctgaacaacggtcagcaacaaaccgcgctggagctggcgcagcttgccccggtggagctgaaagccctgctccatcccttcctcggcggtcagtggcaaaacaatacccccacgctgcgtattccttactatcgcccgctggagccgctgcgtcccggctttctccccggccgcgccgagcagcatctggccggacaaatctatgccgggctgacgcgcttcgacgaaggcgacaatatgccgatcggcgatctggcgcaccactggcaggtctccccggacggcctgcgctggcatttttatatccgctccacgctgtgctggcacaatggcgatacggtggaaaccgcgcagttgcgacagcggttactgctgctgcttgagctgcccgccttgcggaccctcttcgccagcatcagccgtatcgatgtcacccatgcccagtgtttaacaataaccctgcatcgccctgactactggctgccgttccgcctcgccagctactgcagcgtgctggcgcatcccgacgatccggccattggctgcggaccgttccgcctgaagcggtttagtccggaactcgtccgcctggaaaaccatccccgctaccacctgcagcatccgctgatccaggcggtggagtactggatcactcctcagctctttgaccgcgatctcggcaccagctgccgccatccggtgcagatcaccatcggcgatcgcgaagagctgcataatctgcgtcaggtcagcaaccgtatcagccttggcttctgctatttgaccctgcgccacagccctcggcttagcaaagcgcaggcccagcggctggtgtcgataatccatcactcgtcgctactggatacgctgccgctggaggaggatctgattacgccaagccatgaggtgctgccgggatggtccatcccgcagggaccggcaaacaacgcggtaccgctgccggccaggctcaccctgctctatcatctgccggtcgagctacatgcgatggccgaacagctgaggcaacgtctggctctgctgggctgcgagctgacgctcctgttccacgacgctaaaaactgggaaggctgccagcatctggggctggccgacctgatgatgggcgaccgtctgatcggcgaagcgccggagtacgccctggaacagtggctgcgctgcgatatgctgtggcctaatttgctgaccggggcgcaatatgctcatctgcaggcgacattagacgcggtgcagtctcagcccgacgctcgcagccgcaacgatgcgctgcgcaacgtatttaacagcctgatggaagacgccatcatgacgccgctgttcaagtataactatcggatcagcgcgccaccgggggtcaatggtctgcgcctcaacgcccggggctggttcgacttcgccagcgcctggctgccggcctcgtcgacgtgagagagctggtgatggagggcgtctggcgctaccatatcgcctttattcatttagtcaggaattgccatgaaacgcgccgtagttgtcttcagcggaggacaagattcaaccacctgtctggtgcaggctctgcaacagtatgatgaagtgcattgcgtcacttttgattatggccaacgccaccgcgcggaaatcgacgttgcgcgcgaactcgccctgaaactgggcgccgtcgcgcataaagtgctggacgtcactctgctcaacgaactggcagtcagcagcctgacccgcgataacattccggtaccggactatcagcctgatgccgagggcattcccaacacctttgtccccgggcgtaatattctgtttttaaccctgacggcaatctacgcctatcaggtaaaagccgaagccatcatcaccggcgtgtgcgagaccgacttctccggctacccggactgccgcgatgagtttgtcaaagcgctgcaccacgccgtcagcctggggatggcgaaagacattcgctttgagacgccgctgatgtggctgaataaagccgagacctgggcgctcgccgactactggggtcagctggatctggtgcgccgggaaaccctcacctgctacaacggcattaagggcgatggctgcggccagtgcgccgcctgtaacctgcgcgcaaacggactcaaccagtatctggcggacaaggtcggggtaatggcggtgatgcagcaaaaaaccggactggcgcaggcataatctccggggatcgatttaccggagctttgactcaaattccccggtggcgcgatgcttaccggggctacgggttcatcacctgccgtgggccagccactcgcacgacggttgtcagcgcaggttcatctggtcaagtttcgcacgcaattccccttccagcggcagcgccttctgggttttcaaatcgatacaaacgaaggtaatcagcgcatcggccactacttcgccattggggttgagggtgaccacctggcttagggtgccgcttttgccgttgagttgctccagtttgctgctcaccgtcagcacatcgcccagtaccgccggacgacgatagttaatattgatattcaccaccacgaaggcgatgtttttctccatcatccactgaaacgcggggctgttttccaggccgtcccagcgggcttcctcaaggaactccaggtagcgagcgttgttcacatgctggtagacgtccagatgatagccgcgaactttaatttgtgtctgcatagcactaatgcctttctgttattgttgcttatgaggtaagaggtcacaccacttgatgcaacctctttatcctggcaaaaaatcaccgctgtgcaaggtctggcataaaatttacagcgtcagatgggctaaattgcgctccaccaacgcgctccccattcccgggacctgcttcagatcatcaagggttttgaacggcccgtactcttcgcggtagctgacaatggcctgggcttttttcaatcctacgccattcaacgcctgcgccagctgttcggcgctggcgcggttaatgctgacctttgtcgccccgttgtcagactcgccgggcaccgcttccgccttcgccgaagaggacgcctgcacattttctttattcaccgccgctttgccgctggcgggtgccgccagcgccccctgtacccctaccgcaaaaaccagaacgcccgcggccatcagtgcttttattccatatttcatgctgatatctccttgtgtgtagacagcaaggtcacgatagcgtcagtgcggatggtcgacaaaaggcaaatcacagaaatggaaagggccgcgaaagcggcccttgaggattacatcgtgttgctcatttttgcgagacgacgcgaaattactgctgctggtcgatgctgtcgccgagcttaattttcgccgccttgcgcaggttgctcatcagcgcttcgagagcgatttgggcattgttctgggtgatcccctgaaccatggccttcttctgctcttccggcatgctgccggctttcacctcatccagcgctaccagcaccacatcgccttgcatattgctgcccacgccgtagaccggtttcccctgctgcggcagcggcagggtaaatgccagctggctcagcggatcctggccggtacgagaaagcgtctgcggcgcgccaaagctcaggccagccgccttcatcgcttcatcgcctttgccgtctttcagcgccgccagcagcttgtcggcctccagtttcgcctgctgttccgctttattgtgcttaacgatatcgctaacctgtgccttcacttcggcaagcggcttcaccgcctcggctttgtgttcgctaatgcgcagaacaaaagcgcgatcgccgtcaacggtaatgatatcggagttgctgcccggcgcgccgttctcacccaccagaccgccgttgaaaatagcgtcagcgaccggtttaaagttcagctcctccggcaggttatcgcggccaaaccagccggtttctacgaccttcagcccggcgacctgcgctgcgctcgccagcgattcattatcgttgctggccgcatcgctcaccttctgctgcagcgcgtagtaagcatccaacgctttttcctgcttcactttcgccgcaatgtcattacgcacgtcagccagcggcttcacctgcgccggctggacgtcgtccagacgagctaccaagaagccaaccgaggatttgatcacgccagacagctggcctttctctttcagcccggcatctttcagctcaggcacggtagaggcatcttccatccaccccatatcgccgccgttgcgggcagagataatatcggtcgatttttctttcgccagcgtggcgaagtccgctcctttttgcagctcggccagtaccgctttcgcatcggcttcagttttggtctgaatcacgctgtagcggttgcgctgcggctgagtgaactgatccttgtgctggtcgtaccatgactgaatctcgtcgtcagagacgctctcctgcatgctggcggcatccattttgatgtagctgacgcggaactgctccggcgccataaaacgggcctgattctgctgccagaaggcgttgatttcctcatcgctggcggtctgttttgccgccagggcatttacgttgatggtcgcttcgcggaccacccgctgttgagataccagcgccgccagctgatcggactcgcccggcagcatgaagtcggtacccgcaatggcgttaatcagctgctgcgtggtcagctggttacgcagcgcctgggcgtactgatcggtggtcatccccatctgggcgacaataccgctgaaacgctggttgtcgaacttaccgttcgtctggaacgcctgggtctggaagatcgcctgcttcacctgctcatcgctgatgctgaggcccagctcgcgggcatactgatccagaagcgactcatcgatcaggcggttcagcacctgctggcgcatggttttcatgtagttttcgttcgccgccagctcggagaattgatcgccaagctgctgctgcatacggttacgttcgctggcgacggcgttttcaaactgcccacggccaatctcctggccattcacttttgcggcatagtttttgccaccgccaatcaggtaaccactcaccccggtcaaaatgaacgagacgataatgataccgaaaataatcttgagcacgacgctgttggcggccgtgcgtaggttgtccatcatggtgtaacaacgctccgctgtagatgactttagctcgcgcagcatagcacgtgatggccgccgcgcgtgaggacgtattttgacaagaaaacagggtgattgtcagcccacaagtggcgataaacacacataaagtggtctgaaaaggcaataaaaaaggcacatctcacgatgcgcccttgtacttcgtcacattccctgacgggaaagccgatcagttcaccgcgtctttcagcgctttaccagcacggaagcccggcacttttgcggcagcgatagtaatttctttacctgtttgcgggttgcgaccagtacgggcggcacgttctttaacagcaaaggtaccaaaacctaccagcgcaacgtcatccccagcctgcagagattcagtaacagaagcgattaaagcatctaacgcacgtccagctgcagctttagaaatgtccgcacccgcagcaattttgtcaatcagttgagatttattcactgttctcttcctctctttataatttatatcgcacctgagtccttcatagtgcgaccgcgcagcagttatatcaggactgtcatgcccttacaacagcagttgtcgatgacccccctgccagcgatctaagttagctacacaaaaaaaggctggcaagtccgaaatgacttaccagccctatttttattagcgcaatttgcgcagaatcactatttcgcgttcacaacctgcatgccgaacggttcgttctgcagcgcaagtgtcagaacttcctcgattcgtttcaccggatggatatccaaatcggcgataccgttatccggaatttcttcaaggtcgcgtttgttctcatcaggaatcagaacagtcttactgccgccgcgatgcgccgccagcagtttttccttcagaccgccgatcggcagcacctgaccacgcagagtgatttcaccggtcatcgccacatcagcgcgtaccgggttaccggtcaggcaggagaccagcgccgtgcacatggcaatacccgcgctcggaccatccttaggcgtcgccccttccggcacgtgcacgtgaatgtcacgcttctcgtagaagtcggcgttaatgcccagcttaccagcccgcgaacgtaccaccgtcagcgcagcctgaatcgactcctgcatcacctcgcccagcgagccggtgtaggtcagcttgcctttgcccggcacgcaggcggtttcgatggtcagcagatcgccgcccacttccgtccacgccagaccggtcacctgaccgacgcggttctcactatcggcgcggccatagtcgaagcgctgtacgccgagataatcatgcagattctcaccgttaatttcgatgtgtttcagcgatttatccagcagcagttgcttaacggccttgcggcacagcttggagatttcacgctccaggctacgtacccccgcttcccgcgtgtagtaacgaataatgccgataatggcgctatcgtcgacggtcagctcgcctttcttcagcgcattacgttcgatctgcttcggcagcagatgacgtttggcgatgttcagtttttcatcttcggtatagccggagagacgaatcacttccatacggtccaacagcggcgccggaatgttcatggagttggaagtcgccacgaacatcacgtcgctgagatcgtaatccacttccagataatggtcgttaaaggccacgttctgttccggatccagcacctcaagcaacgcggaagccgggtcgccgcgcatgtcggaagacattttgtcgatctcgtccaacaggaacagcgggtttttgacccccactttcgccattttctggatcagtttgcccggcatcgagccaatgtaggtccgacgatgaccgcggatttccgcttcatcgcgcacgccgccaagcgccatacgaacgtatttccgtccggtcgctttggcgatggattgacccagcgaggttttacctacccccggcggtcccaccagacaaaggattggccccttgattttgttcacccggctctgcaccgcgagatattcaaggatgcgatccttcacgcgctccaggccatagtgatcggtatcgaggatctcctgggcctgacgcaggtcttttttgaccttactgcgcgcattccacggcacctgcaccatccagtcgatgtagccacgcacgacggtcgcttccgcagacatcggcgacatcatcttcagcttctgcagttccgcttcggttttttctttcgcctctttcggcattttcgccgcgtcgatcttacgcttcagcgcttcgttttcgtccggggcgtcgtccatctcgccgagttctttctgaatcgctttcatttgctcgttcagatagtactcgcgctgggatttctccatctgctttttgacgcggttgcgaatgcgcttctcaacctgcagcagatcgatttccgattccatcatcgccatcagatattccagacgttcgttaacgtcggacatctcaagcacagactgcttgtcagccagcttcagcggcatgtgcgccgcgatggtatccgccaggcgcgccggatcgtcgatgctgttcagcgacgtcagcacttccggtgggatcttcttgttcagcttgatatagccttcaaactggctgatagcggtgcgaaccagcacttcctgctcgcgttcgtcaatcgccggcgagtcgagatactccgctttcgccgagaaatgctcgccattatcagacagcgcagaaatgcgagcacgctgcagcccttcgaccagcaccttcacggtgccgtccggcagcttcagcatctgcaaaatagacgccacggttccaacggtgaaaagatcgtttacacccggctcatccgtcgacgcttctttctgcgcaaccagcatgatttttttatcatggtccatggccgcttcgaggcaacggatagatttttcccgccctacgaacaggggtatgaccatgtgcggataaaccaccacatcgcgcaatggcaatacggggatttcaatgcgttcagaacgctcaggattcatagagctctctcttagtttaaagtccgccaggtagccgacgacgccacactccactgcatcgtcgttaatatgtaatccagtatatggggatgtattccacacattcaacggcgggaatgcaggaaaaataaaaggggagataaaatcccccctttttgttaactgcttgagtgaaatggttaattattcaccagatgcctgctgagcttccggtttgccgtagatcagcagcggtttgctctgaccggcgataaccgactcatcaatgaccactttttcgacatcttccatcgaaggcaggtcatacatggtatccagcagcgccgcttccacaattgagcgcaggccacgagcgccggttttacgcgccatcgctttcttggcgatagcgtccagcgcttcgtcgcggaattcgagctctgcgccttcaaggctaaacagcgcctgatactgcttggtcagggcgtttttcggctctttcaggatctggatcagggcttcttcgctcagctcgttcagggtcgccactaccggcagacggccgatgaactccgggatcagaccaaacttgatcagatcttccggctcgacctgagccagcagttccccttcgctcgctttgtcggacttcgcttttaccgtcgcgccaaaaccaatgccggagccggtttccacacggtgggaaatcactttgtccaggccagcgaacgcgccgccgcagataaacaggatcttggaggtatcaacctgcaggaactcctgctgcggatgtttacgcccgccctgcggcggaacggcggcaacggtcccttcgataagcttcagcagcgcctgctgcacgccttcgcctgacacgtcgcgcgtaatcgacgggttatcggatttacgcgaaattttgtcgatttcgtcgatataaacgatgccgcgctgcgctttctgcacgtcgtaatcgcacttctgcagcagtttctgaatgatattttcgacgtcctcacccacatacccggcttcggtcagggtagtggcgtccgccatggtaaatggcacatccagcaggcgcgccagcgtttccgccagcagcgttttaccggaaccggtcggcccgatcagcaggatgttgcttttacccagctctacaccattgctggtatcgccattgcgcagacgcttgtagtggttgtataccgcgaccgccaacaccttcttcgcctgttcctgaccgatgacgtagtcatcaaggtggtggcgaatctcgtgcggcgtcggcagcgcgctgcgctcgcggtgcggcgccacttctttaatctcttcgcgaatgatgtcgttacataaatcaacgcattcgtcgcagatatacacggatggcccggcgatcagcttacgcacttcatgctggcttttgccgcaaaaagagcaatacaacaatttgcccgatccatctttgcgtttatctgtcatgagtccaaacctctttttaagttctttgtgccgcacacgacgacgcaaatgccattctcaggcgcaagccgccatatagcgttgtgccgcccttcattagtatatacacaaaatccttcgcgctacatcgagccggtagcgaagccaccggccgcaagcctgccagacaagcggccgaataaaagccaaccgctcgcacagacgtggcgagaaggatgaagcgtaaagcggcacccttgcgccttgggcatcaattacgatgggtcaaaatagagtcgaccagcccgtactccacggcttccgcagcagacaggaagcggtcacgctcggtgtcacgctcaatctgctcaagagactggccggtatgatgcgccatcagctcattcatgcgtcctttcaccttcaggatttcacgggcgtggatctcaatatccgtcgcctgtccctgatagccgcccagcggctggtggatcatcacgcgggagttcggcaggcagaagcgcttgcctttcgccccggcggtcagcaggaacgcgcccatagaagcggcctgccccatacagatggtgctgacatccggcttgatgaactgcatggtgtcataaatcgacatcccggcggtgattaccccgcccggagagttaatgtacaggtaaatatctttttccgggttttccgcttccagaaacagcatctgcgccacgatcaggtttgccatgtggtcttcgacctggccggtcagaaaaatgacgcgttccttaagcagacgggagtagatatcaaaagaacgttcaccacgtgaggtctgttcaatgaccatcggcaccagggccatatggggtgcaaagttgtctcgttcgccactgtatgacatttccgtctcctggagtaattttaaaatacctgctgcactgattgtaaccttacggacggattatcagccacagtttctatccgctgaatgcgtcaccgcctcttcaatacgcgtgcgattgcggatgcagttgcctcccccggtaatggggatggtgttgccatatttcaagcataacaagcttttgctgtaacgctatcatggttaatgcgttttcgcaccgtgcctgtggctatcattatcttaaaaaaaaacccgccgcctttcggcaacgggtttttgctcgaaccttaaacgatagcggcgaaattacgcctgctggttcatcagttcgttgaaggaagtggctttttcagacactttggctttcgccagcacggcttcaacagcctgctcttccagcgccacgttgcgcatgttgtccatcagctctttgttcttgctgtagaactcaacgacttcagacggatcttcgtacgcagaagccatctcttcgatcagggcttttacgcgctcttcgtcagctttcagctcgttggtgcggatcacttcgcccagcagcagaccaacaacgacgcgacgtttagcctgctcttcgaacagctcgcgcggcagttccagagcctgtttctcgttgccgccgaaacgctgagcagcctgacgacgcagcacgtcgatttcgctgtcgatcagggcagccggaacgtcgatctcgttggctttaaccagaccttcgatagcctgagacttcacgcggttacgcacagcgcctttcagctcgcgttccatatttttacgcacttcagcgcgcaggccagcgacggaaccatcttccacgccgaaacgtttgatgaactcttcggtcagctcaggcagttcacgctcttcgactttcttcagattgataacgaacttagccgctttacctttcaggttttctgcgtggtactcttccgggaaggtcacgtcgatggtgaactcttcacccgctttgtggcctttgataccgtcttcgaagcccgggatcatgcgaccctggcccatcgccagtacgaagtcagaggctttgccgccttcgaactcttcgccgtcaacagaaccggtgaagtcgatggttacgcgatcttcagcgtcaaccgcgccttctttttctttccaggtcgcctgctgcttgcgcagagtttccagcatggtatcaacgtcagcgtcggtgacttcaacaaccggtttttcaacttcgatcgcgtccagaccctgcagttcaacttccggatacacttcgaactctaccgcgtaggtgaagtcttcgcccagtttgtattcgcccggaacgtagttcggcgcgccggccggattgattttttctttgatgatcgcgtcaacgaaatgacggctcatcaggtcgcccagcacgtcctggcgaacggaagcgccatagcgctgagcaacaatattcatcggcactttgcctttacggaagccgtcaatgcgaacttttttcgctacgttgaccagctcgcttttgacagcattctcgatgctgtcagcggcgatagtaatcgttacacggcgcccaaggccctgagtggtttcaactgaaacttgcatcttgttacctcaaaaaaatcacagtgctcggtcaactctggaagcgcgtgtaggtggcttcgcagaaccgggatgccctcttcaaatcagaaacacattccctgtcgtcagaatcatcccgaagacattcatatataagacgcggcattatagcggcatcacttttgtgagtcgagaacggttgtcgcctggtgctgcggcatttttcacatttcccgctcaaatttgcccgcaaaagcgctgactttgcgcattttccaggcaaaacaaaacggcccgtaggccgtttttgctaaatctgcaagcaacatactggaaaagcgccagcggttgcaaatgggatttctaagcgatactccctgcgccgcggcacggcggcgaagcaaataccgtatcctgtaatgcttcccattctttaatcgtgtaggtgtgcagcgccagggcatgcaccgtattcgacagctcctcggttagcgtgccgtagatcatacggtggcgattgaggaaacgctcgccagtgaagcgatcgctcactaacaccactttaaaatgactttcagagcccgcagggacgttgtgacgataactttcatccacgacttcgagatacatcgggtcgaacgctgctctaagttttgcttcgatctgttcacgtatcatcatgaattttctcctccgacaacgctgagatgccgccactccatttaaatgttagccgcttttaccgcttccattaggagaaaacaacaaaaaattagcattgttctgatattttcattcaaaagtatcacgtttactggctctggtcgccagatccgtcggggaacgagccattaaccgtggcgggacgctcagaaaaccgccagcacgatggatttacacgcgttgccacttccccttgccgttggcaatgctatgatggcggtaattttccttataacaacaccatgcgttgagacctgaacatgcttaagaagattcttttcccgttggtcgccatgtttatgctggcaggatgcgccacgccgccgaccaccattgaagtatcgccgaaaatcacgctgccgcagcaggatccaagcctgatgggcgtgaccgtcagtatcaacggcgccgatcagcgtccggaccaggcgctggcgaaagtgacgcgtgataatcagctggtcactctcaccgcctcccgcgatctgcgcttcctgctgcaggaagtgctggagaaacagatgacgtctcgcggctacatgattggcccgaacggcgcggtcgatctgcagatcatcgtcaacaaactctatgctgacgtctctcagggtaacgtgcgctataacatcgccaccaaagccgatatcgccatcatcgccaccgcggcaaacggcacgaaaatgaccaaaaactaccgcgccagctactccgttgaaggcgccttccaggcctcgaacaaaaacatcgctgatgccgtcaacagcgtcctgaccgataccatcgccgatatggcgcaggacaccagcatccacgatttcatcaagcaaaacgcgcgttaatgctatcgcgaacccggcctccgccgggttcgtgctttatgctatgtccagtcattacttacgcatttttcagcagccgaaatcagccattttgctgatccttggcttcgcctccggtctgccgctggctctcacctccggtaccctgcaggcctggatgacggtggaaaatatcgatctgaaaacgatcggttttttctcgctcgtcggccaggcctatgtctttaaattcctctggtccccgctgatggaccgctacacgccgccgtttcttgggcgtcgtcgcggttggctgttgaccacccaggtattactcctgctggcgatcgcggcgatgggctttcttgagccggtcacccaattacgctggatggcggcgctggcggtggtgatcgccttctgctcggcgtcgcaggatattgtgttcgacgcctggaaaaccgacgtgttgccagcagaagagcgtggcgccggcgccgcgatcagcgtgctgggctatcgcctggggatgctggtctccggtggactggccctgtggcttgccgaccgctatctcggctggcaggggatgtactggctgatggcggcgctgctggtgccctgcattatcgccacgctgctagcgcccgaaccgagcgacgttatcccggttcccagatcgctcgagcaggcggtagccgaaccgctgcgcgattttttcggccgcaacaacgcctggctgattctgctgctcatcgtcctttataagcttggcgatgcgtttgccatgagcctgaccaccaccttcctgatccgcggcgtgggatttgacgctggcgaagtgggaatggtgaacaaaaccttaggcctgtttgccaccattctcggcgccctgtacggcggcgtcctgatgcagcggctgacgctgtttcgggcactgctcattttcggtttgctgcagggggtctctaacgccggctactggctgctgtcgattaccgataagcacctctattccatggcgaccgcggtattctttgaaaacctgtgcgggggaatggggacggcggcatttgtcgcgctgctgatgacgctatgtaataagtcgttctccgccacccagttcgcgctgctctcggcgctctctgcggtcggtcgcgtatacgttgggccgattgccggctggtttgtcgaggctcacggctggtcgaccttctatctcttctctgtcgttgcggcggtgccggggattgccctattgctgctgtgccggcaaacgcttgagcatacccaacgtaccgcaagctttatgccgcgtagtgagttcccgcaggcctatgcgctggcgctggggatcctgactctgggctgcctgctgctcgcggtgtggctggcgctgctgatcctcaacgcgctggattatacgtcgttctccttcctgtccggcctgctggaggttgccgcgctcaccgccgtcggcgggattttgttcggcggcctgcttgactatctggcgctgcgtaaaacccgcctgatttaaggatccagcatcattattagccgttgtaattacgaaacgtaattataacggcttattaacgcttttatattgtccgccgcgctatttgttgttttgtgcgtttttgatttctggaaattattgacagttttcgttcgattctttaaataatttaaccgattcagctccgggaattttatttttcgttttcacaatgtcttttatttgataattaaatgttaaacaattgttctaatttatgggtggttatgcccattagccgctaagcactccttttcttatccctttcgttatcaatcccgcgaaaatcaggctttgcaagcgattaagtaacactacgttacatatgtgacaaaccaagcagaagccgctaacacagaactgacagagatccaatcatgtttacagtaatgcaaccttaccgtaaaatgcccatacactttaaacgccaccagatcccgtggaattgaggtcgttcaatgagactcaggaaatacaataaaagtttgggatggatgtcattaatcgcaggtactgtattactcagtggttgtgattctgcactccttgacccaaaaggacagattggactggagcaacgctctttgattctgacggccttcggcctgatgatgattgtcgttattcccgccgtcttgatggcagtaggatttgcctggaagtatcgcgcgagcaataaagatgcgaagtatagcccgaactggtcacactccaacaaagtggaagctgtggtctggacggtacctattctgatcatcctgttcctggccgttctgacctggaaaaccactcacgcactggagccaagcaaaccgcttgtccatgacgagaagccaatcaccatcgaagtcgtatcgatggactggaaatggttctttatctatccggaacagggtattgctaccgttaacgaaatcgccttcccggcgaacgtaccggtacacttcaaagtgacctctaactcggtgatgaactcgttctttattccgcgcttaggtagccagatttatgcaatggccggtatgcagactcagctgcacctcattgctgacgaagctggtacttatgacggtatctccgctagctacagtggcccgggcttctcaggtatgaagttcaaagcgattgccaccccggatcgggcgactttcgatcagtgggttgcaaaagcgaaacagtctccgaactccatggactccatggccgcgttcgagaaagtggctgtgcctagcgaatacaacaaagtggaatatttctctaacgtgaaaccggatctgttcaaagatgttgtgaacaaattcatgtctcacgagagcatgaacatgtctaaacctgaaggcgagcacgctgctcacgacgggatggaaggcatggacatgagccacgcggaaaccgctcactaaggggccgaggaagaaaacgatgttcggaaaacttacactggatgcagtgccctaccacgaacctattatcgtggtaacggtggctgcgattatcattgggggactggcgcttctggcagccatcacttacttcggtaagtggtcctacctatggaacgagtggctgacttctgtcgaccacaaacgtctcggtatcatgtacgttatcgtggcaatcgtcatgctgctgcgtggctttgctgacgccatcatgatgcgtagccagcaggtgctggcttcggccggggaagccggcttcctgccgcctcatcactacgatcagatctttaccgcccacggcgttatcatgatcttcttcgtggcgatgccgtttgttatcggtctgatgaacctggtggttccgcttcagctcggcgcgcgcgacgtagccttcccgttcctcaacaacctgagcttctggttcaccgttgtgggcgtgattctggttaacctgtctctgggcgttggtgagttcgcgcagaccggttggctggcctatccgccgctgtcgggaattgagtacagtcctggcgtaggggttgattactggatttgggcgctgcagctctccggtatcggtactaccctgaccggtattaacttcttcgtgaccattatcaagatgcgcgccccgggcatgaccatgttcaagatgccggtattctcctgggcatctctgtgcgctaacatcctgattatcgcctcgttcccaattctgaccgtcaccatcgcgctgctgaccctggatcgttacctgggcacccatttctttaccaacgatatgggtggcaacatgatgatgtacatcaacctgatttgggcctggggtcacccggaagtgtacatcctggttctgccggtgttcggggtcttctccgaaatcgccgcgaccttctcgcgtaagcgtctgttcggttacacctctctggtatgggcaaccgtctgtattaccgttctgtcgttcatcgtttggctgcaccacttcttcaccatgggtgctggcgcgaacgtaaacgccttcttcggtattactaccatgattatcgcgatcccgaccggggttaagatcttcaactggctgttcaccatgtatcagggtcgcatcgtcttcaactcggcgatgatgtggactatcggctttatcgtgaccttctccgtaggtgggatgaccggcgtgctgctggcggtaccgggcgcggacttcgttctgcacaacagcctgttcctgattgcgcacttccataacgttatcatcggcggcgtagtgttcggttgcttcgcaggtctgacctactggtggccgaaagcctttggctttaccctgaacgaaacctggggcaaacgcgctttctggttctggatcatcggcttcttcgtggcgtttatgccgctgtacgtgctgggcttcatgggtatgacccgtcgtctgagccagcagatcgatccgcagttccacccgatgctggttattgcagcttgcggtgcggcgctgatcgcctgcggtattctgtgccagctgattcagttctacgtgtctattcgcgaccgcgatcagaaccgcgacctgaccggtgacccgtggggtggccgtacgctggagtgggcaacctcttctccaccgccgttctacaacttcgctatcgttcctcaggttcacgaacgtgatgccttctgggaaatgaaagagaaaggtgaagcgtacaaacagcctgctcactatgaagaaattcatatgccgaaaaacagcggcgccggcatcgtgattgccgccttcgctacggtatttggtttcgccatgatctggcatatctggtggatggcgatcgccagcttcatcggcatcgtagcgacctggattattaagagctttgacgaggacgtggattactacgtaccggttgcagaagtcgaaaaactggaaaaacagcatttcgatgagattaacaaagcagggctgaaaaatggcaactgatactcttgcgcatactgcccacgcgcatgaacacgggcaccatgatacaggaccgatgaaggtattcggtttctggatctacctgatgagcgactgcattatcttcgctacgctgtttgctacctatgccgttctggtgaacggcacggccggcggaccgacgggcaaagatattttcgaactgccgttcgttctggttgaaaccgcactgctgctgttcagctccatcacctacggcatggcggctatcgccatgtacaaaaacaacaaaagccaggtggtttcctggctggcgttgacctggttgtttggcgccggattcatcgggatggaaatctatgaattccatcacctgatcatggaaggctttggtccggatcgtagtggcttcctgtccgcgttcttcgcgctggtcggcacccacggtctgcacgtgacctccggtcttatctggatggcggtgctgatgttccaggtttcacgtcgtggcctgaccagcactaaccgcacgcgtatcctgtgcctgagcctgttctggcacttcctggacgtcgtgtggatctgcgtgttctcggttgtctatctgatgggggcgatgtaatgagtcattctaccgatcatagcggcgcttctcacggcagcgtgaagagctacatgacaggatttatcctgtccatcatcctgacggtcattccgttcgccatggtgatgagtggctccgcctcgcatgcggttatccttggcaccattctggtgaccgctgtggtgcagatcgtggtacacctcgtgtacttcctgcatatgaacagcaagtccgatgaaggttggaacctgaccgcatttatcttcaccgtaatcatcattgcgatcgtggttgtcggctccatctggattatgtggaacctgaactacaacatgatgatgcactaagagcggcgagtatgtttaagcaatacctgcaagtaacgaaaccaggcattatttttggcaacctgatctccgtgatcggcggtttcctgctggcctccaaaggccacatcgactatccgctgttcgtctggacgctccttggagtatccctggtggtcgcctcgggttgtgtattcaacaactacatcgaccgggacatcgatcgtaagatggaacggacgaaaaaccgggtgctggtcaaagggctgatctcgccagaagcttcgctggtgtacgccaccttgctgggtattgctggcttcatgctgctgtggttcggcgctaacccgctggcctgctggctgggggtgatggggttcgtggtttatgtcggcgtctacagcctgtacatgaaacgccactccgtctacggcacgctgattggctcactctccggcgctgcgccgccggtgattggctactgcgcggtcaccggtgatttcgacagcggtgcggcgatcctactggctatctttagcctgtggcagatgcctcactcctacgccatcgcgattttccgctttaaggattatcaggcggcgaatattccggtgctgccggtggtgaaaggcatttcggtcgccaaaaaccatattacgctgtacatcgtcgcctttgccgtggcaaccctgatgctctcgctgggcggctacgccgggtataaatacctggtcgtggcggcagcggtcagcgtctggtggctgggcatggcgctgcgtggctataaagtggccgatgataaagtctgggcgcgtaagctgttcgtcttttctatcgtcgccatcaccgcgctgtccgtgatgatgtccgttgactttatggtgccggattcacatagtctgctggcttacgtgagataattacgcactcccgtacgatctaaagccccgtatttacggggctttttctttcctgtttcatcatcgctttctttctcatttcatacttccctcccctcttccgacgctttcccgctatctttcatatcaaaaaatgaggaaaaattgagccagcacacaccgggcatcactcgcgccgcacggtcctgcgatgctacctttcgccggggctcttgcccctttgggaaataatcactacaaggaattgcaatgaaagagttaacactgaacgaaatggagtatatctccggtggctttaatctgttcggcgcagccagcggcttcgccagctttgtcgccaactctggcgtcggcttcacctcttttgttctgacctccggcaccgcatttgcctccttcgtcggcgacagcgcgatggcgtttggttccttcctgaccggacagtcaaactgggaaacctttgtgaccgccggaaaggaaaactggggaagctttgttaacaccgccggcaacagctggaatactttcgtgaataacgcggccagcgactggaacacctttctgaccaaagcgtcggcctaagcgacgtctatcttagggcagcgccactggctgccctgtttaacccaccagcatcgcctgcgcgctgtagagcagatcgaggtgatcgcggcataacgcttccagcgaagtgcgcgattgatgactggtcagactcagcgccccccaccaggtcccttccctgtcggttaacggcaccgccagcaccagcatgccaatctcaaactcctgctcaatggtggcgtatccctggcgccgtacctgggcgattttctccatcagcgacgcaatatcggtcaccgtatagggggtacgttgttcccgggttatgcgctgcaggacggtctcacactctgcttccggcagcgaagccagccacaatcgccccccggcggtacagaaaatgggcacccgctccccaagccgcaccgacgtagagttgaacggcgtatgccgactgcgggcgatatagaccagttcatcttcatccaccacccccaccgaggcgtgctcttcggtccggctggcgatgtattcgacaatcggccgtaccatgcgaggaaactgcgccgaatcgacataggcctggccaagccgcagcgtctttggggtaagccagtaatagcgcccgtcggtttgcagatagcgctcatgcaggagcgtcagcagaaaacgtcgcgcggcgctttgcgtcaggccgctcattttcgccgtctgggcgacggtgagctttgggcaggttttggaaaaaagctgaattagcgccagccctttttgtaaaccgacgatcagatcgcgtggatgaatggtgttttgcatattcgctcacatttttgcaacatcattatcgatttcctgcgattatcgcagcgatggtgcgattaacaaccaacatgtccgaattctgcgttgtcgctcccagcttccactgaaatactttcacaacattcatttaacaaatgaggtttgaaatggtcagtggaactacccaggttgtcgccgtgattggtcatccgatcgcccaggtgaaatcaccggataacttcaaccgctactttgccgaacagcacatggacagcgtcatgatcccggtggatatcgtcccggacgcggtggccgcctacctcaacgccctgcgcggctggcagaacatgaccggcgtgctggtgacggtgccgcataaacaacgcgccgccgcgctggtcgacgacctcacgccgcgcgcccgccgactcaacgccgtcaatgtgatccgcaagctggcggatggccgcctgcagggcgatatgctggacggcgtcggctttcagctcgccgccgaggcgcagggttttcagccggcaggtaagcaggcgctgctctccggttgcggcggcgtcggcagcgccatcgcctggggactgtgcgaggcggggatccgtcggctggccctgcacgatcaaaccccggccacccggcagcgcctgcatgaccttctggctgaggcctttccggcggtgcaactgagcgcgctgccagacaccctttacggcctcgatctactggttaatggctcaccggccggcatggccggatttgatgagctgcctctaccgcaggcgcttctggatacgctcgacagcaccactcatgtggccgacgttgtcaccgccccggtgatgacgccgttgctcactttcgccgccgcccgtggttgcaaagtacagaccgggccggaaatggcgctggcgcagatgaggctgatgggccagtttatcggcgccatcccgcaggctcagggagcggcggcatgaagagctgggatgtgatcgtcatcggcagcggcgcggccggttttgccgccgcggtcaccgcctgctgtaaagggctgtcggtgctgatgctggagaaagccgaccagttcggcggcacctcggccatctccggcggcgccgtgtggctgcacgataccgaccaggcgcgcgccgagggcaaaagcggtagcgccgaggcgatgaaaacctacctgcgaaccattatcggcgagggccagtaccgcgaagatcttgccgaagcgtttgtcagcgccgggcgggaagcgctggcctttctcgagcgtgagggggcagtaaagtacagcctgcgtccgctctcgcccgattactatccggatgaacccggcgcagtcgacgtaggtcgtgcgctggaggtggtggagtatgacggccgtgaactgggggacgcgtttcgcgacctgcgttcaccgccgccggggatgctgctgtttggcgggatgatggtcaaccgcgtcgatattcaacattttctcgacatgcgccgctcgctgcgctccctggcccattgcacccgactgctgctgcgctatgcccgcgaccgggtgaagtaccctcgcggcacccgcctggcgatgggcaatgcgctgattgcccgcatggcgactacggcgctgcgtaaaggcatgagcctgcggctgaatgtcaatgttctgacgctgtgcgaagcgcaaggcgcggtccgcggggtggagattgagtatcaggggcaaaaagagacgctgcacgcccggcgcggggtggtgctggccgcaggcggcttcgccgcgggcgcgctggcggcgcgctatcggccacatacccgcgagcatttcaccatgtcgccgccggccaacgatggcgccgcgctgcatctcgcggcggcgcttaacgctcgcgagggagccgatcgggcctccaactttttctgggcgccggtatcggtgctgacccgggccgacggcagcgaggagcgcttcccccatctggtaaccgatcgcgcaaaaccgggcgtgattgccgtcaatcagcgggcggtacgcttcgtcaacgagtccagttcctatcaccatttcgccagcgcaatgcaggatgcagcggaaaatgccccctgttttttactctgcgacgcccaggcgatgaagcgttatggcctcggactggcgcgcccggcgccggtcaataatgacgccctggtcgccgctggctatctgcacaaagccgataccctggccgcgctggcgcaacagcttggtctggatgcccaaaccctgagcaaaacggtagcccgctacaaccgcgacgccgcgcagggcgtggatcgggaatttgctaaaggcggcaacagctataaccgggcgatgggcgatccgggccatcagcctgacgcctgtaatgcccccctgctcagcgcgccgttctatgccatcaaactttataccggcgatctggggacctcacgcggcctggtcaccaccgccgatgcccaggtcgtcaataccgaaggacaccccatcccggggctgtacgcggtgggaaacgacatggattcgctgatggccggcacctatccgggccccggcatcaccctcggcccggggctgacgtttggctatctcgccgcctgccatctggcacaacactccacccactaatcaggaaaacatcatgatctacgaaaaacgcacgtacaccatcaatccgctgaaaatggccgactggctggcgctgtaccaaagcgatgccctggcggtgcaaaccgaccatctcggccagctaatcggcttcttttttaccgagatcggcgtggtcaatcaggtagtgcacatctgggcttatgaaagcctggacgatcgtctggtgcgccgcgcgcggatggcccaggacgaacgctggcagaccttctcgcgtaaaaatcgcgaactggccgccgtggaacgcctcgagtcggtgctgatgcgccccaccgctttttcacctctgcagtaaggagtccaacatgagcgggcctgtgaaggtggatgtgctggtggtcggctccggcgccgcggggctctctgccgcggtgactgcggcgatgcacggcgccagcgtcatggtggcggagaaagcgtcagtgctcggcggaaccagcgcctggtccggcggctggctgtggatcccccgcaacccgctggcgcgggcggagggcatcgacgaagcagccgacgcgccgctgacctatctgcagcatgagatggggggcgaagccgccgatattcgtctgcaaaccttcctgcgttacgggccggagatggtggaatttttccatcagcggacggcggtgcagtttctctcgggcagcgccatgccggactttcacccgtcgccgggtgcggcgaacggtgggcggtcggtcaccgcgcaaccctacgatggccgcctgctcggcgactggctccatcgcctgcgtccgccactggaaaccattagcctgggcgggatgggcatcgccggcggcgcggatatggcgcattttttcaatgccacccgctcgccgcgctccgcgctgtatgctgcccgccgcctgctgcgccacggctggcagcggctacgcgccggacgggggcagcatctggtcaatggcaatgcgctggtcgcccgtctgctgcgatccgccctcgacgccggcgtgcgttttcagctcaatgccccggtggtccggctgctgcagggtccgccgggcgtgtccggcgcggtgttgcgcagcgacggcggggagattcacgtcgaagctggcgccgtggtgctggcctgcggcggttttccccacgatcgccagcggctggcgcaggtggtgccccacgcggcggagggttacggccatttctccgccgcaccgccggacaatcagggcgaggggatcaggcttggcgaatccgtcggcggccagttcgacacttccctgcgccacccgctggcctgggcgccggtgtcccgcgtcactctggccagcggccagcagctaatgtttcctcatctggtggagcgcgccaaacccggggtgatcgccgtcctgcccaacggcaaacgttttgttaacgaggccgactcttatcatgactttatcgccgccctgctggcggccacacccgcgggcgacacgccgcaggcctggctgctggccgatcgtcgcgcgctgcgtcgctacggcctgggccacgccagaccgttcccgttcactcccaccgcctggctgcgtaccggctatctgcagcgaggaaacaccctggcggagctggcgaagcagtgcgctatcgacgccaatgcgctggcggaaaccgttgaacgctttaaccacttcgccagcgctggcgaagacgtcgattttcaccgcggggcatcagcctataaccgcgcccagggtgaccatcaggtgacgctcggaccgctgcgcgaagggccgttctacgcggtgcgcattctgcccggctcgctgggcaccttcagcggattgcaaaccgacgaacacgcccgggtgctggatgaacagcagcagccgataccgggtctgtacgccatcggcaacgacatgtcgagcgtgatgcgcggctattaccccagcggagggatcaccctcgggcccgccatgaccttcggctatctggtgggtaaaaacctggcaaaaaaaacaaatataaacaataacataacttgatttccacgaatggatgcaccctaactctcttcacctgcaactgtaccggagccctttatgaacaagcgtaccctatcgctcgccgcgctgaccctgctcgatgtccctccccccgaacaggtgcggattgcggccagaaccggttttacccacgttgggctgcgactgctccccgccacaccgaccgacccggactacgacatgctgggcgataccccggccgtccgggcgacgctcgccgcgttgatggaaactggcatccgcgtgtcggacgtggagatcgtccgcctgacccccgggtttaccctcgacgatcggctgcagcgttttatggagaccgccgcgcgtcttggcgccggacaggtgttagtcgccggcaatgatgacaaccttcagcgcagcgctgacaacctcgccatcctcgccgcggccggtcgtccatttgggctgaccatgaatcttgagccgatgccctggactcagttgcgcaacatcgccgcagcgcaagcactaatcgccgccagcgggcgggaagacatcggcattctggtggacgctctccatttctggcgcgcgggagaatcgctcgccgccctctccagcctgcccgcgcatcatctcaactatatgcaactctgcgatggcgcggcgcagaggccggagagcgagcaggaacttatccgccaggcccgctcggcgcgcaacgtgccgggggaaggcggtctggatctgcatggtctgatgtcggccctgccggcgacgctgccggtctctctcgaagtgccgcttgacggcgagcaaggcgccctgccgcctcttcagcgggcgcagttactgtttgatgccgcgcagccctacctgcgcgcctgcgcataaggaatacgctatgacacagactcaacgcctggatgtcagagagttaataaatcgtaacccgctgagccgatttcagaagctgattatatttctcggcttttgcgtcatcgctctcgatggttttgatatcgcgatcatgggctttatcgccccgacgctaaagctggaatggggggtaagcaaccaccagctgggtctggtgatcagcgccgcgctgatcggcctcgcgctgggggcgattttctccggcccgctcgccgactggctgggacgtaagaaaatcatcatcaacagcgttttcttcttcggtttctggaccatcgccaccgccttctcgcacaacgtagaacagatgatgttctttcgctttatgactggcctcgggctgggcgccgcgatgccgaatatcgggacgctggtgtcggaatacgccccggaacgccagcgttcatttattatcaccgtcatcttttgcggcttcaccttcggcgcggcggcgggaggattttcggcatcgtggctgatcccccagtttggctggcactcgctgatggcgctcggcggtattctgccgctgctgtttgcccccctgctcatctggctgctgccggaatcggttcgttttctggtgatcaaacaagcgcccgcggcgcgcatacgcgccattcttaaccgtctctatcccggacaaatcagcgacaacgtgaggtttatcctgccggcgcagccggcggccggcaacgcgatgcgcattgtcctctcccgccagtacggtttcggctcgctgatgctatggctggtctactttatggggctgttcctggtctatatcctcggcagctggctgccaacgctggttaaagcggtaggaatgaccgttagccaggcggccatcatgacggcgatctaccaggcgggcggcaccctcggctcgttgtttgccggctggctgatggacaggatcaacccccatcgcgcgctgggtataatctacgccgttggcggcctgttcaccatggcgatgggctacgccgcgggcagctttgccttgctctgtatgctggcgtttatcagcggcgcctgcctgaacggcgcgaataccggcatgaacgccctctccgcccgctactaccctacacaggcgcgggcgacgggatccagctggatgcacggcgtcgggcgcatcggcgccattctcagcgcctttgccggcgccgagatgatggcgctcaacctgccctttgaaagcgtctttttgatcctcggtatcccggcagccctcaccgtcgcaggcctggcggcgaagggcatctttgcggccggtcatcctcccgtcgcttcaacttcccccgcgtctgtgcgcggagcgtcatagcggcatctggtccccggtgcaatcggcggattgcaccgccttcagcagctaataaagaaaatttatttcatattttgttgaaacgaaaaaacgcccgcaacaatctggacgactccggcaggcgatatcccgccctcaccttttcaaccaagcgcaaaagaaactatcgctaattcgatccccctcgcatatatggataataaattccacaacacaattgaaacagaacaaacatttccttaagttgaagtcagtctatccggatgcgcgttgccgcaggcgtcggcattgagcgcctcagagtgcaaatgatttcaaaaaggagagcaccatgttaaacggcctgaaacccttatcccgttccctgcgctggggcatggtcggcggcgggggaaccagtcagatcggctacagccaccgctgtgcggcgctgcgtgacaatgtttataccctgctggccggcgcgcttgacgtcgatgccgagcgcgggcgcgcgttcggtgagcaactgggcatcgcgccggagcgctgctacgccgactaccagaccctgtttcgcgaagaggcgcagcgccctgacgggatcgaggtcgtctcggtcaccaccccgaacaatacccatttcgccattaccaaagcggcgctggaggcgggactccacgttatctgcgaaaagcccctctgctttaccgccgaagaggcgcgcgagctggtggatctgagcaaaaaacagaacaaaatcgtcggcgtcacctacggctatgccggctatcagatgatccagcaggcgcggcagatgattgccgatggactgctcggcgagatccgcatcgttaacatgcaattcgcccacggcttccataaccaggccgtcgagctgcaggcagaatccacccgctggcgagtaacgccgaagtttgccgggcccagctatgtgcttggggatctggccacccatccgctgtttgtcgccgagaccatggcgccgcagctcaatatcaaacggctgatgtgctcccgtcagagctttgtttcctcccgcgcgccgctggaagataacgcctttgtcctgatggaatatgacaacggcgcggttggatccatgtggaccagcgcggtcaacagcggcgccatgcactcgcaaaaagtgcgcatcgtcggcgaaaaagcaagcatcgaatggtgggatgagcatcctaaccagctcagctatgaggtgcagggcgagccggcgcgcattctggaacgtggaatgccctacctgtcgccgaacgcgctggcggatgaccgcattggcggcggccatccggaagggctgttcgaagcctgggccaacctctatcgccgctatgcgcaggcgattgacgccacggaccgcgacgatcgcgccttcctgcaagacttctggtatccggacgtcgaagccgggctgcacggcgtctattgggtagagcagtgcgtcaaatcggctgacgctggcagccagtgggttgactttactttaccttaattttccccctcgccagtggagtccccctccactggtttattgatttttaccaacttgtcgcatcgcgcaacagccccgtaatatctgttaaacaaacatttatttacgcttcttaccccccgccgctacactaggcgcagtttttatattgaggtggtaatgaacgataacaaaatgacgccaggggaactgcgcgcgacctggggtttggggactgtattctccctgcgcatgcttggcatgtttatggtcctgccggttctgaccacgtatggcatggcgttgcagggtgccagtgaagcgctgattggcctggcgatcggtatctacggcctggcgcaggcggtgttccagatccccttcggactgttatctgaccgtattggccgtaagccattgatcgtcggcggcctgcttatcttcgtgctcggcagcgtcatcgccgcgctcaccgactccatctggggcatcattcttggccgcgccctgcagggctccggcgccatcgccgccgcggttatggccctgctgtccgatctcacccgcgaacagaaccgcaccaaagcgatggcctttatcggcgtcagcttcggcgtcaccttcgccatcgctatggtgctggggccgattgtcacccaccagctgggtctgcacgcgctgttctggatgatcgccatcctggcgaccgtcggcatcctgctcaccctgtgggtggtgcccaacagccataaccatgtccttaaccgcgaatccgggatggtgaagggctgctttagcaaggtgctggcggagccgcgcctgctgaagcttaactttggcatcatgtgcctgcacattatgctgatgtccacttttgtcgccctgcccggacaactggaggccgccggcttcccggccgccgagcactggaagatttacctggtcaccatggttatctcgttcatctcggtggtgccgtttatcatctacgccgaagtgaagcgcaagatgaagcgcgtcttcctgctctgcgtcgccatcctgctgattgcggaaattgtcctctggggcgccggaggctacttctgggagctggtggcgggcgttcagctcttcttcctggcgtttaacctgctggaagcgctgctgccgtcgctaattagcaaggagtctccggcgggctacaaaggcaccgcgatgggcgtctactccaccagccagtttctcggcgtggcgattggcggcgcgcttggcggctgggtcgatggtttctttgattcgcaaaccgtgtttctgctgggcgccctgctggcgatgctgtggctgctggtggccagcaccatgagcgagccgccgtacgtcagcagcctgcgggtggaggtgccggacggcgtggtggtcgacagcgcgctgcaggcgcgtctgctgagcgccagcggggttcatcaggcgctggtggtacccgaggagcgtgcggtgtatatcaaaatcgacagcaaggtcaccaaccgcttcgagatagagcagctcatcaaaggggtataaaaaaagcggggaattccccgctttttgctgtctgcccgccgccttagtcgcggaagtttttgaactggaacggctgtcccagatcgccaccgcgcaccagcgccatcaccgactgcagatcgtcgcgggacttaccggtcacgcggatctcttcgccctgaatctgggcctgcactttcagcttgctgtctttgatcagtttaacgatcttcttctgcaccgcgctttcaatgccctgcttcagcttcgcttcaacaaaccaggttttaccgctgtgcacgatatcttccggtacgtcgagggaggtgccttcaatgccgcgcttgagcagcttggcgcgcaggatatccagcagctggttcacctggaagtcagactcgctcagcactttaatggtcttgttggcgtcgtttaattcaaaagtggcttcaacgccacgaaaatcaaaacgcgactcgacttcgcggctcgcgttgtccaccgcgttacgggcttcctgaagatcaacttcagagacaatatcgaaagatggcatcttttcctctccttccgtttcttttgcgttgcataatacctgcaacgcggcataactcaacttgttatcccggaagcttagctgattacgcaacgctcgcgctattttccccgtgatgtccgacgatgcgaaaagcgacgagatagactttagccatcagcgcctgggatagcggcagatgaggaggaacaatgaaagtaaccgtactgggatgcggtgcgctgggacaactatggctgaccgcgttgtacaaacagggacatgaagtccagggctggctgcgcgtaccgcagccattctgtagcgtcaacgtcattgaaaccgatggctcagtgttcaacgaatcgctgacggccaacgaccccgattttctcgccagcagcgagctgctgatcgtcaccttaaaggcctggcaggtgtcgaatgcggtaaagcacctggccgggatcctgccggacaccacgccaattgtgctgattcataacggcatgggcaccgtcgaggagctgcgcggcgtgaaacagccattgctgctggcctccacgacccaggcggcgcggcgcgatgggaatgtcatcatccacgttgcccagggcaccacgcatatcggaccggcaaaaagctacgagggggactacagctatctcgcagaagttctgcagagcgtgctgccggatgtcgcctggcataacaatatccactcggccatctggcgcaagctggcggttaactgcgtgattaaccctctgaccgcgctcaaagggtgtaaaaacggcgatctgcgcgactatacgcaggaagttgcggccatttgtcgcgaggtggcggcggtgatggagcgcgaaggtattcatacctcggcggaaaacctgctattttatgtcgaacaggtaattgaaagtacggcagaaaatatctcttccatgctgcaggacgttcgcgcccagcggcatacagagatcgactacatcaccggttttctgctcaaccgcgcccgcgcccacggcgtcgccgtaccggaaaacgcccgcttatttgaattgatcaagcgtaaggagaatgaatatgagcgcgtcggcactgatttgcctcgcccctggtagcgaagagaccgaagcggtcaccactatcgacctgctggtccgcggcggagtaaaggtgaccaccgccagcgtcgccagcgacggcagcctgaccatcgtctgttcgcgcggcgtcaaactgctagcggatgcgccgctggtcgaggtggccgatggtgatttcgatatcatcgtcctcccgggcggtatcaagggcgcagagtgcttccgcgacagcccgctactagtggaaaccgtccgccagtttcatctctctgggcgcattgtggccgccatctgcgccgccccggcgaccgtgctggtaccccataatctgttcccgatcggcaacatgaccggttttccggcgctgaaggaacatatccccgccgagcagtggcaggataaaagagtggtctgggatccgcgggtgaatctgttaaccagccagggtccggggacttcgattgatttcgccctgaaaatgatcgatctgctggtggggcgcgagaaagcgtatgaggtcgcctcacagctggtgatggccgctggcatctataattactacgaagcctgatagccggtccgcgccgcgggctggcaccccttttcctgaggagtcgcagcatgtcccggagcgcaaccgattctcgcgatcttgttatcagccgcctgctcagcgcgcccgcccaagccctgtggcgcgcgtgggccgacccggcattactccgaacctggtggtgccctaagccctagcaaaccgaggttctggcctttgattttcgcgccggcggggcctttcacaccgtgatgcacgggcctgacggtgaacgcagcgataaccccggctgttttcttgaggttatcccgcaacaaaaaatcgtcatgacctcgatgctgacggcggattatcgccccgccgtttcccccttcgcgatgacggccatcatcacctttgccgatgaacaggtcgggtgtcgctatacggctacggtgctgcatgccgatgatgaaacccgcgagcagcatgagcagatgggatttttcgagggctggaatatcgtcatcgatcagctcaatgacctggcgctgaccctgcgctaatacactcccctgccaatagtaaaaaggccttccatcagggaaggccttttgcatcataacaatctgttacgggcgataaactttcacgttgctgaagccctgctcgcgcaaataaagcgcctgcagacggctcatcaccccgcgctcgcaccacagcagccaggttttgctctgatcgagatcgccaaatttggtgcttagcttgtagaacggcagggaaacaacttcaaccccctcgaccttcagcggcttgtcttcctgctcgtcgatggagcgaatgtcgaggatcgcgtcattggcgccaaagccggtcacggtttccacttccaccaccgtctcttccgtctgctgggcgatctcgcggatatcgatattgctcgcctcttcaaccactttatcaaggatgctgaaatcgaagtgttcttcttccgcttcaatcttcgccttcaccgccttcacggtcggactcttggagatcacgccgcaatattccggcatggtgcgggcgaaatcttccgtgccgatctcacgcgccaggtcgatgatgtgctctttatcgtgcgaaatcagcgggcgcaggatcagagtatcggagacattatcgatcaggcgcaggttagtgagggtctgactggagacctggccgagcgcttcgccggtgaccagcgcctgcacgccatagcgttccgcgacttttgacgcggcgcggaccatcatgcgcttgagcacgacgcccatctggccgtcgtccactttttcaaggatttcgccgactactggctcaaagttaatcgccacaaagcgaacgcggtgtgagctgccgaagcggttccacagataatgcgcaacctggcggacgccaatctcatgggcggcgccgccaaggttaaagaagcagtaatgaacgcggcagccgcggcgcatcagcatgtagctggagacgccggagtcaaagccgccggagatcagcgacagcacatcttcctgggtgccgatcgggaaaccgccgatgccttcatagcggcctttcaccagaagcaggcgatcgttttcaatctcgagattgacagtgacgtccgggtcggtcagcttcacgcgcgccgtttcaatatgctgattcagaccgccgccgacgtagcgttccacttcaattgaggtgaattcatgtttgccgcgacgcttcactcgcacgcagaaggttttgccttccagcgcctcgcgccacagcggcagcgtctgctcgaaaatatcgtgcagcgaggtgaacggcacgtcttcgacttccagaatatggtggatgccggggatacgggtcagcgcatcgcgaatagccgggcgttgattttcatctttcgcgcgaacttcgatatgatcccaatgacggacgacggccagcgtctcatcatagtttttgagaacgttacgaatgttcccggttaagattttaatgaagcgcaaccgcacagattggcttttgatggtgatttccgggaacaatttaatgataaacttcatagcgacaatagttcgttggcaagcccgacggggctataagcaaaagttgtaaagcagcgcacaccggtgcctgcatcctgggcgcggagtatatcaccattgcgcgttatttgcttacacgcgtgacttcgttaccatacccggtattgccgtcgcgacataacaagagtctacattcactatgccaaagaaaaatgaggccccggccagctttgaaactgctctgggcgaactggagcagatcgttaaccgtctggaaagcggcgatttgccgttagaggaagcgctaagcgaatttgagcgcggcgtacagctggcgcgccaggggcaaagtcagctgcagaaggccgaacagcgcgtgcagatcctgctggcggatagtgaagattccccgaccacgccttttacgccggacgctgaataaatggatttcccgcaacaattgcaggcctgtgtggaacaggcaaacgaagcgctgcgccgtttcatcgccccgcagccctttcagaacactccgctggtggaagcgatgcattatggcgcattgttaggcggtaaacgcctgcgtcccttccttgtctacgccaccggcgagatgttcggcgtgtgccgtaccacgctggatgctcctgccgcggcggtcgaatgcattcatgcctactccctgatgcatgatgatttgccggcgatggatgatgacgatctgcgccgcggcctgccgacctgccatattaaatttggcgaagccaacgcaattcttgcgggagatgccctgcaaacgctggcgttctctatactgagtgatgcgccgatggtcgacgttcctgaccgggaccggctggcgatggtttccgaactggcgcaggccagcggcgtggcgggcatgtgcggcggccaggcgctggatctgcaggccgagggacagcaggttgatttacaggcgctggagcgtatccatcgccataaaacgggcgccctgatccgcgccgccggccggatgggagccctgagcgccggcgaacgcggccgcgctgccctgcccgcgctggatcgctatgcggaaaatatcggtcttgccttccaggtccaggatgacattctcgacgtggtaggggatactgcgacccttggcaaacgtcagggtgccgaccagcaattgggtaaaagcacctatcccgccctcctgggtcttgagcaagcccggaagaaagcgcacgacctgatcgctgatgcccgccggtcgttagatgagctggccgcacaatctctggatacttcggcactggaagcgctcgcgaattacattattcagcgcgataaataaacaaaaaatgagtctctgatgagttttgatattgccaaatacccgaccctggcgctggtagattccacccaggagttgcgcctgttgccaaaagagagcctgccgaagctatgtgatgagctgcggcgctatctactggacagcgtcagccgttccagcggtcactttgcctctggcctcggcacggtggaactgaccgtggcgctgcactacgtgtataacacgccgttcgatcgcctgatctgggacgtcggccatcaggcctacccgcataaaattctgaccggtcgccgggacaaaatcggcaccattcgtcagaaaggcggcctgcatcccttcccgtggcgcggtgaaagcgagtatgacgtgctgagcgtcggtcactcctccacttccatttccgcgggtatcggggtggctatcgccgccgcgaaagaggataagcagcggcgcgcggtgtgcgtcattggcgacggggcgatcaccgccggcatggcgtttgaggcgatgaaccacgccggggatatcaaacccgacctgctggtggtgctgaatgacaatgaaatgtcgatttccgagaacgtcggcgcgctgaacaatcatctggcgcagctgctctccggtaagctctactccaccctgcgcgaagggggcaaaaaggtcttctccggggtgccgccgattaaagagctgcttaagcgtaccgaagagcatatcaaagggatggtggtgccgggcacgctgtttgaagagctgggctttaactacattggcccggtggatggccatgacgtgctcggtctggtcagcacgctgaagaacatgcgcgacctgaaaggcccgcagttcctgcatattatgaccaaaaaaggccgcggctatgagcccgccgagaaagacccgatcaccttccatgcggtgccaaaattcgaccataccagcggcgtactgcccaaaagcagcggcggcctcccttcctactcgaaaatcttcggcgactggctgtgtgaaacggcggccaaagacaacaagctgatggcgatcacgccggcgatgcgcgaaggttcagggatggtggagttttcgaagaaattccccgatcggtactttgacgtcgccattgccgagcagcatgcggtcaccttcgccgccgggctggcgattggcgactacaagccggtggtggcgatctactccaccttcctgcagcgagcctacgatcaggtgatccacgatgtggctatccagaagctgccggtgctgtttgctatcgaccgcgccgggatcgtcggcgcagacggccagacgcatcagggagcgttcgatctctccttcctgcgctgtattccggatatggtggtaatgaccccgagcgatgaaaatgaatgtcgccagatgctgtacaccggctaccactacagcgacggcccctgcgcggtgcgctatccgcgcggtagcggcaccggcgcgacgctcgagccgctggcatcgctgccgatcggcaaaggggtggtgaaacgtcagggcgagaaaatagcgatcctcaactttggcaccctgctgccggaagccgcggcggtagcggacaaactcaacgccaccctggtggatatgcgctttgtgaagccgctggataccgcgctgatcctccagctggccggcgagcacgacgcgctggtgacgctggaagagaacgccatcatgggcggcgccggcagcggcgtgaacgaagtgctgatggcccaccgccgggcggtaccggtgctcaatattggcctgccggattattttattcctcagggcactcaggaagagatccgcgccgacctcggccttgatgccgccggtattgaagccaaaatccgcgactggctggcataattgccccttccgctcctgctatgcttaagggatacccttgatgaatagcaggagcgcactatgcactatatccccctcggtgatactgccttacgtgtttcccgactctgcctcggctgcatgaccttcggcgagccggaccgcggcagacacgcctggacgcttccggaagagagcagccgcccgcttatccagcacgccattgaaggcggcatcaacttcttcgataccgcaaatagctactccgacggcagcagcgaagagatcgttggccgcgccctgcgcgactttgcccgccgcgacgaggtggttgtcgccaccaaggtgtatcaccaggtcggcgatctggcggaaggactttcccgggcgcagatcctgcgctccatcgacgacagcctgcgccgtctcgggatggactatgtcgacctgctgcagatccaccgctgggactataccaccccgattgaagagacgctcgaagcgctggacgaggtggtgaaagccggcaaagcgcgctatatcggcgcctcgtccatgcatgcccgacagtttgcccaggcgctggcgctccagcagcagaacggctgggcgcgcttcgtcaccatgcaggatcactacaccctgatttaccgggaagaagagaatgagatgctgcccctgtgccaacgtaacggcgtagcggtgatcccatggagtccgctggcgcgcggcaggctaacccgcccctggggtgagaccaccgcccggctggtctcagatgagttcggcaaatcgctgtacagcaccagtgaagaaaacgatgcgcagatcgccgggaagctcgcggacgtggcggaagaactcgacgccagccgcgcccaggtcgccctcgcctggctgttaagcaaacccggcgtcgccgcgccgattatcggcccgtcgcgtcaggaacagctcgatgatctgctgcaggcggtggatttgacgctctccccggaacagatcgacaagctggaggcgccgtatcagccgcatccggtggtgggatttaagtgaaaggcgtggtttccccggcagcgtagcgttgccggggagaggcggttaaagcagaccgatgggccagtgatggccaatgacgtacagcacgccagcggagatcacgccggcgacgatgtcgtcgaccataatccccattccgccgtggatattgcgatcaaaccagcgaattggccacggcttccacatatcgaagatacggaaaatcacgaagccggcggccacccactgccagtccatggtcggcagcgccatcagggtgatccacatcccgacgaactcgtcccagacgatgctgccgtggtcatgggtgcccatatctttggccgtgcgatggcacagatagacgccgatacagatgctcatcatcaccaccagcgagtaaagctgccaggggagaaaggtcatcagataccagaacgggatcgccgccagcgagcccatcgtccccggcaccaccgggcttaagccgctgccaaagccagtcgccagcagatgccacggattacgcatactcaggcggctaagcgcctcgtctcgactacgcaaagtgatcgtatccctttaaatcaagcgcaaccggcttaccgtcgcggataaactgcagcccttcgctctccggcgcaatctgtccgatacaggtaaaacgcgcgccaagatggccaagagccacgtccagcgccccgcggttcagctccggtacggtaaagcacagctcgtaatcttccccgccggcgagcgcccagcgcagcgcctgctcagaatcaacctggcgcagcatcgcatcggagtacggcatggcatcgagatcgatacgtgcgccgcagccgctggctttgagaatatggcccagatcggagatcaggccgtcggagagatcgatagccgatgtcgccaggtcacgcagcgcctggccctgcagcacgcgcggcatcggccgcagatgacgggccagcaggtaggcggcgtcagacggttcatccaccgttagacgattctgcagtaccgccagaccggcggcgctgtctcccggagtgccggtaacatagatccagtcccccggcttcgcgccagcgcgtttcatggcgcgtcccggcggcacaaagccgtggatacccagcgtcatggagagcgggccacgggtagtgtcgccgccaatcagttgcatatcgtaatagtccagctggacaaacaggctgtcgctgaaggcttccagccagacttcatccacctccggcaaggtcagcgccagcgtgagccacgccggttccgcgcccatcgccgcgaggtcgctcaggttcaccgccagcgctttataggcgaggtcggcagggtcgatatcgggtaagaagtgattgcccgccaccagggtgtcggtgctgattgccagcgtttttttctcgggaatatgcaggagcgcgcagtcatcgccgatgccggtttcaacatcaaggcgggcgcttttaacgcgatcaaaataacgggcaatcagggagaattcgccgcatgccatacgttatgcctcagcaaaataataaataaggccgggctgcgaggcgaccctcgcaaaacccggcctgcagtttacttcttgtggggacgaattaccggagccgctttgtccagcacgccgttaacgaacttgtggctatcttcagcgccgaaggttttcgccagttcgatagcttcattgatggcaactttatacggtacgtcatcacgtttggacagctcaaacagcgcgatacgcagcaccgctttttcaacctggcccagctcttccagctggcgggacaggtagggcttcatcaggccgtcgaggtacgcgctgttagtcgccactccggacagcagttcgcggaaatacagaacatcaacatcttttacgtcctgttccgccaggaactggtattcgacatcagcgatgtcgttgtgggataactgccaggagtagagcgcctgaacggcacactcacgggcgcggcgacgagcagcaggtttcacggaattccccttacaaaaatcaggccttgatggctttcaatacgttaatcatttccagcgcggtcagcgcagcttctgcacctttgttaccggctttggtgccagcgcgctcaatggcttgttcaatactttcagtggtcagaacaccaaaggctaccgggatttcgctgtcctgagcgacatgcgccaggccattgctggcaccgcctgccacatattcaaagtgggcggtaccgccgcgaatcaccgtccccagcgcgatcaccgcgtcatatttaccggttttcgccagtgcgccagccgccagcggcagctcatacgcgcctggaacccaaacgacggtgatgttttcatcttttacctgaccaatgcgtttcagggcgtcaatcgcgccttccagcaggctgtcattgataaagttgttgaaacgcgcaatggtgatggcgacgcgagcgtccggggtagcaacgttagcttcaataatgttcatactcttccttcgggttcatgtgccccgcaaggggggcggattttatcatattattctgagcgctgcttcctaataatcaggaaagcctcacgcagtggttaaatgcaggcagacatccgggccaacctgacgtatctcattgaatttaaaatggggggcctggctcagctcttcaagccccggcagcgcgcataatccacgcgccgcattgcctaacagtttaggcgcaatatagacgataagctcgtcgaccaggcccgcctgcagcagcgccccggcaagcgtagcccctgcctcaacccagacgctgttgatctgctgtttgccgagcagcatcatcagcagcaccagatcgagatggccgttatgctccggaaccagcagcgtgcgggcactttccggccactgccgttcatcggcgcgcaggcgggcaaacagcgtttcccccgcctgctgcacaatacgatgctcaggcgtgacgcggttctggctgtcgatgacgacgcgcagcggctggcgcaaattctcttcgggataaagcgcctgggtatcggcgctcagctcctgccagcgcacggtcagcgccggatcgtccgccagcacggtggcgctgctggtcaggatggcatggctctgggcgcgcagacgctgcacgtcgcgtcgcgcctgcggggaggtgatccactggctttcgccgctggccatcgccgtgcggccgtccagcgaggcgcccagcttcagctgcacccagggaaaaccggtgcgcatccgcttcagaaagcccttattcagcgcttccgcttcgttcatcatcagcccatggctgacctcaatgccggcctgctgcaggcgatacaaaccgcgccccgccacctgcgggttcggatcctgcatcgcggcgaccacgcggctgacgccggcggcaatcagcgcatcgcagcatggcggcgtacggccatggtggctgcagggctcaagagtgacgtaggcggtggcgccgcgcgccttttcgccagccatgcgcagggcgtgcacttcagcatgcggctcgccggcgcgatagtgaaacccctcgccgacgatctcaccgtctttcacaatgacgcagccgacgttagggttaggatgggtagtaaagcgaccgcgcgcggcaagcttcagcgcacgcgccatgtacatttcgtcctgcatggcttagtcctgtaagcgggcgatctcttcgccgaattctttaatatcttcgaagctgcgatagaccgacgcgaagcgaatataggcgactttatccagctttttcagctgctccatcaccaggttgccgatcattttgctggccacttcgcgctcgccggtgccgcgcagatgagtcttgatatggttgaccgccatttccacgtcgtcggcgctaaccggacgtttctccagcgctttcagcatcccgctgcgcagcttgtcttcgttgaagggttcgcgcacatcgttactcttcaccacccgcggcatcaccagctccgccacttcgaaggtggtaaagcgttcgttacagaccaggcactgccgacggcgacgcacggaagagccttcccccaccagacgagagtcgatcactttggtatccacggcgaaacagaaagggcaatgcatagcgcgtcctgacaggtagttaaactgaagagtagtttaccgcgaagtgaccggactacaaagaaagagcttttgagacaaaggatctatgggagatgaggccggtttggctaccattaagcatcctctgtaaacggaatcctgaccatgacaagacgttacctgaagctcgccatcgcgggctgcctgttcaccctgaccgcctgcgcccagcaaagcgaaatccgccagatgcaccagagcgtgagtacgctgagccaggagatgacccagctcaaccagcaaacgatcaaaatcacccagcaaaacgcgctgaacgccaaatccacccgcggcgtctatctgctgccggaggccaagaccccggcgcggctggagagccagatcggcaccctgcgcatgtcggtgggcagtattaccccggatggcgatgggtcacgcctgaccttacgcattcagggcgaatccaacgatccgctgccggcctttaccgccaccgtcgcttccggacagatcaccggcaccacccatagctatcaggaagtcaatgttcaggatcagctgattagcgcgccggccagcaccctcgcccccagcgatgtcgatatcccgttgcgcctcaatgtaacgccagataaagtcggttttattcgcgtacacgatatccagcccgccgccgcccagtaagccttcagccgggccagccccgcccggctacgtcctgccccgtcgttcttatccacttacaacttttcgcaagagttcattagaaatcgttctgcagcgcgattttcagtagcattttgtcaagaaatgcatagaatcgtgaacgcaatcgattacgcatgttctggttatgtgaaacaacacgtatttttgtgagcaatgattcctataatagacccccacagaaagacgaaatatttagaaacgcttcggcacttcttttaacgccttcaggctcaatttaaacagtggcattactatgaaaaaaacattactggcagcgggtgcggttgtggcgctctccactacttttgccgcgggcgcggcagaaaacgacaaaccgcagtatctgtctgactggtggcaccagagtgttaacgtggtgggcagctaccacacccgttttggaccgcagatccgtaacgatacctacctggaatacgaagcgttcgccaaaaaagactggtttgatttctacggctatattgatgccccggtattcttcggcggcaacagcacggcaaaaggtatctggaacaaaggttccccgctgtttatggagatcgaaccgcgtttctctatcgataagctgaccaataccgacctgagcttcgggccgttcaaagaatggtatttcgccaacaactatatctacgatatgggccgcaacgactcccaggagcagagcacctggtatatgggtctgggtaccgatatcgataccggcctgccaatgagcctgtcgctgaacgtctacgccaagtaccagtggcagaactacggcgcctccaacgaaaacgaatgggacggctatcgcttcaaagtgaaatactttgtgccgctgaccgacctgtggggcggttcgctgagctacatcggcttcaccaacttcgactggggttctgacctcggcgatgacaacttctacgatctgaacgggaagcacgcgcgcaccagcaactctatcgcctccagccacatcctggcgctgaactacgcgcactggcactactctatcgtcgcccgttacttccataacggcggccagtgggctgatgatgcgaagctgaacttcggcgatggtccgttcagcgttcgctcgaccggctggggtggttacttcgtggttggctacaacttctgattgctgatacagcaagacagcgcccgggccgcagctcctgctgcccgggcttttttatttctcccgcacctcgcaccggaccttgcgcagaaaatcgcttaacgagcggtcggcgcactcgctgaatcgacgttcggtccttctgacctccagacaacggtcgaggcgaaaattgcggtaatcattgcgcagttcgcaccaggccaccagcagccagcgctccccccagaaaaacagccccagcggcagcacttcacgccacgtcacctgaccggattcatcctggtagtgaagctgtaatacctgctgattggatacggcctggtggataacgtcaaaatgggttttagcatagcgatgcgcgccaaggtcaggggcaaacaggcgagtctgctccgcctggcgccgacgcgcctccggcaggatcgccagcattttttcctgggcggactccagcgactgcgacagcgcctcaccgccccaggtttttagcagccgaatcgcagcgatcagcgcctcggattctttggtggtcagcatcagcggcggcagatcgtagcccgccagcagccggtagccgctgcccgcttcgccctccaccggtacgccggagagggagagatcgcgaatatcgcgatagacggtacgctccgacacgcccagccgctccgccagcagcgcggcggtagtgagccgcctgccgcgcaggatctgcacaatctgaaataaacggtcggcgcgtcgggtcatgtctcacttcacaaaagttaaggttaagccggctggtgcaggccgacgcggttgccctcgctgtcggtaaacagggcgatggtgccaatatcattcggcagcgtcagcgggccgaagacacaggccccacccgccgaggcaacgcgctccagcgtggcggcaagatgatcagtatgcagataaataatagcgccctgcgccgagggcgcgataccttcaaatttggccagcgcgccgccgggggccggatcctgatgcgggaacaccgccagctcggcgcagtccatggtttcgcgacgcagcgacacttgcatcaccggctcataaaacgcgacggcgcgatccatatcggcgaccggaatttcaaaccagttaatcacgttgttcatacttcctcctgctcgttagtgagttcagaggcagtgtatgggagggctcctgacagcatactgtcagcaggttttgtcgcgggcaaaaaaatcccggccgcaagggccgggatagctttatctcaactgaaccggattacggcagaatagacggctgatccgccccttctttctcaaccttctgctggatcagatgctcgcgcttcatgcccagcttcaacgccagcgcggaggcgacgtagatagaggaagccgtaccgatggaaacaccgatcagcatggtcagcgagaagccttccagaatcgggccgccgaacaggaacagcatcaggatcaccatcaaagtggtaccaggggtgatcaaggtacggtgcagcgtctgggtcaacgacacgttaaagatctcatacggcgtaccgcggcggatcttacggaagttttcacggatacggtccgataccacgatactgtcgttcagcgagtagccgataaccgacatcaacgaggccacgatggtcaggtcgatctcgatatggaacagcgacagcacgcccatggtgatcaccacgtcgtgcgccagggcgataaccaccccggcggccagacgccattcgaagcggaagccgacgtagatcaggatacagaccagcgccgcaatcagcgccagggcgccggtttgcgcgaggtccgcgccgacgctcgggccgacaaactcaatacgcttcactgccgcattctggctggtcgattcgttaatcaccgtcacgaccttgctgcccagctcctggctgccgttggcgtcatgcaccggcggcatacgtaccatgatgtcgcggctgctgccaaagttctgcacctgcggctcttcaaagcccgctttctgcagggaatcgcgcatctggtccagatcgaccggtttctcaagggtaatttcaatcaccgtaccgccggtgaaatcgagcccccagttaaacccgcgaacgccgatgatggcgatcgacacaatcagcagaaaacctgaaatgccgaaggcccagtagtcccagcgcataaagtcccagactttacggccgtggttcaattgttcaacagtatattcctgtgcaacaacgcactcctcagatagacagctttttaacgcgcttgccgccgtacagcaggttcacgatggcacgggtgccgacgatagcggtaaacattgaggtcgcgataccgataccggtggtaatcgcaaaccctttaatggcaccggtaccgaccgcgtacaggatgatcactttgataagcgtcgtcacgttggcgtcgaagatcgagctgaacgcgccgcgataaccttcgtcaatcgcctgctgaacggtacgcccgttgctcagctcttctttgatacgctcgttgatcagaacgttagcatcgaccgccaccgccagggttaacacgatacccgcgatgcccggcatggtcagcgtcgcccccgggatcagggacataatgccgacaatcagtatcaggttggcaatcagcgccgaggtcgcaatcaggccgaacttcttatagaagaggatcatgaacaggatagagaccaccagaccggccagacaggcttccagaccctgcttgatgttctgcattcccagggttgggccgatagtccgctcttcgacgatctgaatcggcgcaatcagcgcgccggcacgcagcagcagcgacagctgacgcgcttcgttcggattgctgataccggtgatacggaagctgttacccagacgcgactggatgttggcgatgttaatcacctcttcctctttcgccaggatagcgcgaccgttagcgtctttcttaccgctgtctttatactccacgaacagggtcgccatcggcttgccgatgttgtccttagtgaagttagacatgatgttaccgcccgcgctgtccagcgagatgttaacctgcggctggttgtactcatccatgctggaggtcgagtcggtgatatggtccccggtcaggatcacccgcttgtacagcactaccggctggccttcacgcgtctgcttcacttccgagtcgcccggcacgcggccagaggcggcggcggactggtccacgttagtattgaccagacggaactcgagggtcgcggtcgcgccaaggatttccttcgcacgcgcggtatcctggatacccggcagctcaaccacgatgcggtcagcgccctgacgctgaaccagcggctcggcgacgcccagctggttcacacggttacgcaggatattaatgttctgctgaaccgcgtactcacgggcttctttcaggcgctcatcggtcatcaccgctttcaggctgttgtcaccctgagaggaaataaccagatcgcgatggcgagggctgagataagagatagcctggtcgcgcgccgcgctgtcgcggaagacgatgctcagaccgtagttgtcttctttacgcacggtcgcgtaaggaatgcctttgtcgcgcagctcgctgcgcaggctatcgatgttctgttcctgcagtttgcctaacgcggtgtccatgtcgacttccatcaggaagtgcacgccgccgcgcagatcaagacccagcttcatcggctcggcatagagcgccgccagccagcgtggggttgccggagcaaggttcagcgccacgacgtatttgtcacccagcacgttaagcagcgcttcgcgcgcgcgcagctgggtatcagtggtgtcgaagcgcgcaagaatagcgccctcttccagtgccacagacttcgcggttattttttcttcttgtaaagttttctggacctggatcagcgtttgctcactggcggcgacgccgcgcgcgccagtgatttgaacagccggatcctcaccatacaggttgggaagcgcatagatcaggccgacgacaatgacgacgaccagcatgacgtacttccacaaaggataacggtttaacacggcagttccctttgggaaaagttagattacagcgccttcatggtgcctttcggcagaacggcagcaacgaagtcacgtttgataaccacttcagtggtatcgttcagcgcgatagcaatgtagccagtttccgctactttggtcacgcgaccgaccagaccgccgttggtcagcacttcatcacctttggcgatggagttcatcaggttcttatgttccttggtgcgcttctgctgtggacgcaggatcatgaagtaaaaaatcagaccgaacaccaccagcatcagaatcagagacatcgggctgccctgcgccggtgcacccgttgccgctaccgcatcagaaataaaaaagctcattgaaattccctcattattaaaattaatcaacgttcaaaggaggcacggtgcgcccctgacgttggtaaaaatcggtcacgaagctctctaatttaccctcttcgatagccttgcgtaaaccagccattaaacgctgatagtagcgcaggttatgaatggtattgagacgcgcgcccaatatttcgttgcaacggtcgaggtgatgcaagtaagcgcgtgaataattgcgacatgtatagcaatcacactcggcgtccagcggcgcggtatcgcttttgtgcttcgcgttgcggattttcaccacgccgtcggtgacgaacaggtggccgttacgcgcgttgcgcgtcggcatgacgcagtcgaacatatcgataccgcgacgtaccccttccaccagatcttccggcttcccgacgcccatcaggtatcgtggtttatcggccgggatctgcgggcagacgtgctccagaatacggtgcatgtcttccttcggctcaccaaccgccaaaccgccgacagcgtagccatcaaagccaatctctaccagacctttcaccgagatatcgcgtaaatcttcgtaaacgctaccctgaataatgccgaacagcgcatttttattgccaaggctatcgaaacggtcgcggctgcgcttcgcccagcgcagagacatctccattgagcgcttggcgtaatcccagtccgccgggtacggcgtacattcgtcgaagatcatcacgatgtcagagccgagatcgtactgaatctccatcgatttttccggatcgaggaaaatcggatcgccgttgatcggattgcggaagtggacgccctgctcggtgatcttacggatatcgccaaggctgaacacctggaaaccgccggagtcggtcaggatcggtcctttccactgcataaaatcgtgcagatcgccgtgcagcttcatgatctcctgacccgggcgcagccacaggtggaaggtgttgccgagaataatctgcgcgccggtggcttccacctcttccggcgtcatccctttgacggtgccgtaggtgccaacgggcataaaggccggtgtttccaccacgccgcgctcaaacaccaggcgaccgcggcgggcgcgaccgtcggtggtatccagttcaaatttcatgcttgctcctgcgtcagaaaaacagtccgacgttttcatactcgccacggaatgattccgtagctaaaaaatgcgttatggcgtctacaagccggcgtaccggccttttcagggacgctcagaaatagccagcggattgtacgtgataaacatcgcatccccgtagctaaaaaagcgatatttctgctcaaccgccaccttataggcgttcatggtgtgctgataacccgcaaacgccgacaccagcataatcagtgtggattcagggagatggaagttagtcaccagcgcatcgatcacctggtactgataacccgggtagatgaaaatctgcgtatcgtcgaagaacggcgcgatcagcgcgtctttcgccgcctgcgccgcgctctccagcgaacgtaccgaggtggtgcccaccgcgatcacgcggttgccgcgcgctttcgccgccagcaccgcatcgaccacctcctgcggcacttcggcatattcggagtgcatggtgtgctcttcaatgctgtcgacgcgcaccggctggaaggtgcccgcgcccacatgcagggtgacaaacgccatctcaacgcctttggcgcgcagtttgtccagcagcggttcgtcgaaatgcaaaccggcggtcggggcggctaccgcgcccggcctggtgccatagacggtttgatagagctcgcggtcggcgtcttcgtccgggcggtcaatatagggcggcagcggcatatggccgatcccgttaaggatctccagcaccgggcgctcgtcgttaaactccacttcaaacagcgcgccatgacgcgccagcatcgtggccttaatgctctcgtcatcgcccagcagcagctcggcgcccggcttcggcgcttttgaggcgcgaatatgggccaggatgcgcttatcatccagcatccgctccaccagcacttcaatcttgccgccgctggccttgcggccgaacagacgcgccgggatcacccgggtgttgttaaacaccagcagatcgcctggattaagcttatcgagaatgtcggtgaaggtgccatgcgtcagcgcgcccgtcggcccgtccagggagagcaagcgacagctactgcgctcaggcatcggatagtgggcgatcagagattcgggtagttcaaaagcaaaatcggtaacgcgcatgacggtaactcagactgaataaagaggcgggtagtctagtgccggggcggtctggctgcaacctttacccctccggatgaatgacataatctatattccaaatcattccgaatgccgccatgcggcaaccgaatgccttaccggtggcaaaggtgccgcgcgcggccagacagcatgccattcggccaccgaggcgccgttcagcgcaacatcggtgtttccacctgcccgctcgtatttaaaggatgtcgttttatgaattttctcgcccacctgcacctggcccatctcgccgacagttcgttgcccggcaacctgatggccgacttcgtgcgcggcaacccgcagggcgactatccggcggagatcatcgacggcatctttatgcatcggcggattgacgtgatgactgacaacctggcggaagtcaaagaggcgcgggagtggtttcgcccgcagacccgccgcgtcgcccccatcaccctcgacgtcatgtgggatcatttcctgtcccagcactgggcgcagctctcccctgacctgccgctggacgagttcgtacgctacgccgagcggcagatcgtccccatcctgcccgactcgccgccccgcttcgtcaatctcaatcaatatctgtggtcggagcgctggctggagcgctatcgggaaatggattttattcagcgcgtgctgaacggcatggccagccgccgtccacgtctcgaggcgctacgcgactcctggcaggatctggatacccattacgaccgtctggagacacagttctggcgcttttatccgcagatgatgcgccaggcagaaaacaaacagctgtaatagccacgtcattgataggtaaaagctggctgaacgattgttagcgcctctttgtgttattgccgggcaggctctatacttgcccgcgttgcgttccaaataaccttagtaattacaggagaatcaaatggttctggtcactcgtcaagcgccggattttactgcagccgctgtgctgggtaatggtgagatcgttgagaaattcaatttcaaacagcacaccaacggtaaacctaccgttctgttcttctggccgatggacttcaccttcgtgtgcccgtctgagctgatcgcgttcgacaaacgttacgaagaattccagaaacgcggcgtggaagtggttggcgtttccttcgactccgagttcgtgcacaacgcatggcgtaacaccccggtagaccagggcggtatcggcccggttaaatacgcgatggttgctgacatcaaacgtgaaatccagaaagcttacggtatcgagcatccggacgaaggcgtagcgctgcgcggctctttcctgatcgacgctaacggcgtggtacgccaccaggtggttaacgacctgccgctgggccgtaacatcgacgaaatgctgcgtatggttgacgccctgcagttccacgaagagcacggcgaagtctgcccggcgcagtgggaaaaaggaaaagaaggtatggccgcctctccggaaggcgttgcaaaatacctgaccgaaaacgtctccagcctgtaatcggcacgcgttttaataaaaggctcgctcaggcgggccttttttgttagcggcgtcaaaatttaagaaaatgacccgccgatatttgtgaccagcgatacacttctgccgaaaaaattcgccctacctctcactttttctctggcaaatttcagcgtcaaaatacaaagccttcataacagcctgaaaagcatataaattatttatatcgttttctgccggtactttgccgtcgatgtgatccccatcaatatttaaaaccgcggatgtgatctcatccatcattttcatcaatgtatttggtcatgatttaactcaggaacaggaatacgttcaggagctgaggatggaaattatttttgacccgtcgttaatcgcccttaagcagaatatttcccgtgcggaagaggccatcgaactggcgggttcattacttgccaggcgccagatttgcagcgccgaatatgtcaacgagatgctgacggtatatgaagattttggcgccgccatcgtgatagatgacgggattgccatgccgcatgcccggccggaaaaaggggcattacagaccgggttctcacttgtcaccaccgccacgccaatctccttcggccacgatgagttcgatccggtttccgtggtcatcgcgatcgccggcgccgatgctgacagtcatatcaaaatgatccaactgatagcctcgctgatcgagtcagatattgtgacctttcttcagcaggaaaatgacgttaattcagtcttacatttcattcaaaaacaaatggagtagtcattatgttagttatcagaacggtttgtggtaacggtattggcagctcattgatggctgcgaataatgtgaaaaagatctgtgacgaattaggcatcaaagcggacgtcgcctcggtcgattttgctaacgccgtcggggaaaaagccgacctttacgtcacgatcaaagaactggcaaatcaatttccggcccactgtcatgtcgccatcattcgcagctacgtccataaagcgaagatcgccgaggatattaccgacgcgctgatgaaaattgctgcgactcactcttaatcagcatagagggaacgaccatgcaggctattcttagtttcttaacggaaatattcagtcaacccgcctttttaatggggcttatcgcctttgttggtttagtggcgctgcgctcccctggcaataaactgcttaccggcacattgaagccgattttaggctatttgatgttgagcgctggggcaggcgttatcgttgccaatctcaatccgctgggcggtattatcgaggccggatttaatatccgcggcgttattccgaacaatgaagccattgtctccgtcgcccagaagatgctgggcgtggaaaccatgagtattttactgttaggctttattttcaacctgattatcgcccgctgtaccaagtataaatatatctttctgaccggccatcattcgttctttctcgcctgcctgttctccgccgttctgcaggcggcggagttccagggctggatgttgatcctgatcggtggattcctgttgggctcatggtcggccatctccccggccatcggtcagcgttacaccaggcaggtaaccgaagacggcgggatcgccatgggccatttcggctctctcggctactacctctcggcatggatcgccagccggaccggcaatccggcaaattccttcgccgataccgaaatttcagaaaagtggggctttctgcgcgataccacggtcaccaccggtatcgtgatgtttgttatctactttgtctgcagcgctgtcgccgggtcggcgtacctgagcaccatcaccgaccaaaacatgctgatcttctcggtgctgaccggtctgcagttcgccgttggcgtagccattgtctataacggcgtgcggctgatcctcggcgatctggtgccggcgttccagggcatcagccagaagctgatcccggactccatcccggccgttgactgcgcggtgttcttcacctttagccccaccgcggtggtggtgggattcatcagctcctttgtgggcgggctggtcgggatgctcttgctcggcgggctgggcatggcgctgattattcccggcatggtgccgcacttcttctgcggcggcacgtccggcgtcttcgccgacaaactgggcggtaagcgcggatgtatcatcgcctcctttatcggcgggatcttcctcgccttcctgccggcgatgctgctgccggcgctcggcaacctcgggtttgaaaacagcaccttcgccgctttcgacttcgcggtatggggcatcattatcgggaatgcgttcacccagtttggtcagatcactatctatctgatttgtctggcgctgctcgtcgcgctgctggcgcctttctgcttccgtcacgtccaggtggtgggcaacacgctcagctatgaggagctgacggcgaagcagaaaaatgaataagcgaggtcatttttcccggcgggagggccacgctttccgccgctgacaaataatcaggagtggttatggctattttgtccattggatttgcttgtttcgatcagtttttctttctcaatgaatggccccaggagaataccaaaaacttttgtcatgattttattgaaagcggcggcggtccggcggccaatgcggcctggctgctgggattatggggcgaggaggtttattacattggtcatctgcagcaggacctttacggtcagcgcattatcgatgagtttgccgaggcgggggtggataccagccaggtggttttctccgatgacatgatcaccccgctggcctcggtgctggtcaatcgcttaacgggttcgcggacgattattacccgcaagatgcaaacgccgccttccctgacctacgagcaaaagctcaaactggacgacctcgccgagcgactgattgccagcgaggagccgggcaccattttaattgacggccatgaggcggaaatcagtgaatatttaattaagaaactgcccaacgccagggtcgtgatggacggcgggtcactgcgcgccagcaatattaaactggcggcctggactgactattttgtagtgagcgaacatttcgcccgcgattatatgagctatcgctcgctgagcaccgaagcagaaattaaagcggccctgattgagttgaataaaatttgccgcggtgaagcatttattacccttggcgaaaaaggctgcgcttttttaaaaagcggtatgctgcagatcgtcccgtcctggctgtgcaatgctgttgataccaccggcgccggggatgtatttcacggcgccttcacctatggcgtccattactcatggcatatcgataacattattttatttgccagcctgaccgccgccatttctattgagaaaaaaggggttcgggaatcgatgccggacctggcggtcgtccaccactcgttaaatagctacgagagaaacttaacgcaatattttgaagaataactgcatttaataaatatcaagaggtgaatatgttagtgtcgatgaaggacatgcttcagcatgccctgcgggacggctacgccgtcggtcagttcaacattaataatctggaatgggtcggcgccgtattaagcaccgcccagcagtgccgctcaccggttattttgggggtgtccggcggcacggttaagcatatgctcgggttaaaatgtattcatgacattgtggttaacgccatggagtatttgcatattgatgttccggtggcgctgcatctggatcatggcacctcccgggaggcctgcgaagcggcgatcgccgccggcttcagttccattatgtttgatggctcgcatctgccgttcagggaaaacctggccattactcgccacctggtgacgctggcccacagcaaaggtatctctgtggaggccgaactggggaccatcgccggcagtgaagacggcattgtcaattccgaagtcatctacgccgatccgcaggagtgctacaccctggtgacagaaacccaggtggattgcctcgccgccgcgctgggctccacccatggtctgtataaaggtaaagcccggctgggatttaccgagatgaaagccattgccgagcaggtgaaggttccgctggtgctgcatggcggcaccggtattgccgatgaggatatgcgccgggcgattgcctgcggcaccgccaagattaacgttaataccgaaaatatgtacgcctggtgccaacaggtgaaagcaattttcgccgccgacaccggacacgatgtgaacgatccgcggaaagtcatcgcccagggactgcagccggtacgcgagatgattgcccgccgcatggcgctctttggctcagagcagcgctattgacgccgggcctgcggctgaaaccaccgccccgacgctgccggggcggtggcgtcaggtatcaaaaggcaaagcaggaacagcccagcacgccccagaaggcctgctcgtcagagaccggaatcgacgacttacgcgcaatatcatgctgatggccgtggacgccacagctaccgcagcactggtgcatctgcaccatggcgccgattttagccgtcgccggcggagcggaacggtaatggcctgggaccttcaccaccggcgaccactccggcagcaccggaataggcggcggcgccagcggcgagaagtgaccggcggcgtacaccactttgccgtcaaccaccgtcagcaccgactcaatgcctttgatctcctcttccgcgacgctgaagtagtctttcgacagcaccaccagatcggcaagctgaccggcggccagacggcctttcttgccctgctcgctggagaaccaggcgctgcccgccgtccacagctccagcgcgacatcgcgcggcaggcggttggcgtcgtcatacatcgccatcccgccaacggtgcgcccggagaccagccagtacagcgcggtccacgggttatagctggcgacgcgggtcgcatcggtgcccagccccaccggcacgtccagcgccagcatctttgctaccggcggggtatgtttcaccgcctctttgccgtagcgatcgacaaaatattcgccctggaaggccatccgatgctgcaccgcaataccgccccccagcgccttcacccgctcaatgttacgctcggtaatggtctcggcatgatcgaagaaccagtgcaggccattaaacgggatatcgcggttcaccttctcaaacacgtccagcatccggctgatggactcatcgtaggtggcatgcaggcggaacggccagcgatgctccaccagatggcgtaccacccgctccagctcatcctccatgccttgcggcagatccggccgcggctgcaggaaatcttcaaaatccgccgccgaaaataccagcatctcgccggcgccgttggcgcgatagaagtcagtcccctgccccggcttcagcatgtcggtccagcgttcaaaatcctccagctcctgcttcggccgctgagtaaacaggttgtaggcgatgcgcacggtcatctgatctttcgcgtgcagctgttcgataatttcgtaatcttccggatagttctggaagccgccgccggcgtcgatggcgctggtcagccccagtcgattcagctcgcgcataaattgacgggtggagttcagctgcagatccagcggcagcttcggccccttggccagcgtagcgtaaaggatcatggcgttcggtttagcgatcagcatcccggtcgggttgccgtggctatcgcggacgatctcgccgcccgccggatccggcgtctctttgctataccccacggctttcagcgccgcacggttcaacagcgcgcgatcgtagagatggagcacaaacaccggcgtatcaggcgccgcctcgttcagctcttccagggtcggcatccgccgctcggcgaactgaaattcgctccagccgccgaccacccgcacccactgcggggacggcgtgcgatccgcctgatccttcagcattcgcagggcatccgccagcgaggggacgccctcccagcggagctcaaggttgtagttcaacccaccgcggatcaggtgcaggtgagaatcgttgaggcccgggatcaccgtatgccctttgagatcgacgatttgcgtcccctcggcggcaaagctcatgatccgatcgtgacttccggtggcaacaatttttccgtcggcgatggccacggcttccgccaggggattcgcacgatcgagggtatgaatctgaccgtgggtcagaatcagtgtggcagtttgcgacataacgcactccttgaggaggctgactcagtttttcttcaaccagccagcaaacaggcgggtcacgatgggcatccagaaccagaccaccagcgcaaccacgcaggcatcattgatgaggtgcagcagcaggctccccttaagcgacggcagcagcatgccggtcaccgcaggcaccaggttggtgctggggaaaatcaccagcagggtgatcagaaactgtttccagcgccgcggctggcgtacgttcaccgtcggcggggtaaaccagaaggccggttcagtccgcacctcagtccgatcgccttccgtcagcagtggggcaatctcagccaccagttgccgacgggtttccgactgcgtccaggcgtagaggtgctccagggtatcgaagcggattatgacgctccacagattctgccctgcggcgggccggatcacattcgccccaagatggccgggaaattctgccgcaatgggcataattttaccgagccactcttcgtagcgctggctgtgttgcggatcgagcagatggctgataaccagggtcaccgatttttgctgcgccatgacgagttccttgcttcagggaaatggccggttttctcctgccactctccataaatgatctgacacaacatccttcatgctgcgttgaagcggcaggcgggcacgtccccgtgaacttgaataaattcagtagctggggacggacaaacgcagccaacaacgcagcagcctgaaggatggcgtgatttacgctttacgctccggcgcgccatgcaccatggtataagcgtaatccacgcccatcccgtaggcgccgctgtgttcgcgcaccaggtccattaccgcatcgtaggtcgctttgcgcgaccagtcgcgctggtactccagcagcacctgctgccaggtcaccggcaccgcccccgcctgcaccatccggtcaatagaccgctcatgggcgtcgacagaggtgccggcggaggtatccgtcactacatagacctcgtagcccgcctccagcgccatcaacgccgggaaagtcaggcagacttcggtccacagagcggagatcaccagctttttacggccggtcgctttcaccgctgccacaaacgcatcgtcttcccaggagttcatggaggtacgttcaatcggcttgacgtcaggatgcacggccaataattccggccagatatagccgctaaagcttttggtctctacggaggtataaatcaccggcacattaaaaattttgcccgctttcgccagcgccacggtgttatttttcagggtctggcgatcgatattcgccacgccaaaggacatttgcggctgatggtcaataaagataagcgcggaattagtgggatcgagcagttcacgaatagacattaaataccttcttaatcaattagttaaaaagatgacatgatgattaatgcgtcgtgtggatcctgactgataaagcatggtgagtatagccagttatttctaacaagttattaaggattttttatggtttatattttttgccgcgaccaggatttattcacgcctgttttaatcaaatttttacgccaaactgttctgatttattcactggctttgattattgcgcttaggtacaacagagaaaacaaattaatggatagcttcatatgcgcgtaaactttgatgttttgatgatccttgatgcccttgaccgccacggatccttcgccaccgccgcggagtcgctgtataaaacccccgccgctctgagctatatgatccagaaactggagagcgatctgaacatcgtgctgttggatcgttccggccatcgggcaaaatttaccgataccgggcggctgatgctggagaaggggcgacagcttttaagtgccgccagagatctggaaaagcaggcccagcagctgagcgcgggctgggagcgagagctagccatcgcccttgacgcctcatttcccttttcggccctgctgccgctgatcgccgagttttacgcgcaaaacccacagacgcgactgaacttcagccatcacaccctcgccggttcgtgggaagagctgacccatcatggggcggatattatcctcggcgccatcaatgagccgcccacctccgcggagtggtcatggcaaaccctcggcgcgttggataacatcttcgtcgtcgccccccatcacccgctggctcaggcgaaggagccactggccaataaacagctcagccagcatcgggccatcgtgatccgcgacagcgcccgctattgccatccgctcaacagcaatctcctcgacgagcagccgcaaatcggcgtcgatgatttcgccagtaaagtcgaactattgtgcgccgggctgggctgcggctttctgccgcgccatatcgctcgcccgtggctggtaaaaggcagtctggtggagaaaagcgtcgcctgctggcgggaaaaggatattacctatatggcctggcgcagcgggaatgatgggctggctcagcgctggtggcgggaggcgctcctccgcggcgacctgctgagccagctctaccattaacggccggaccagacgttggcggagatggccgggagggtcagcaccccgtcctggaaggcgccggcgccctcctgcagcgtccacccggccacgttcagcagcggggaatcttcgataaccacctcgcaggcttccccgcggttaatcgccaccagcacccgctgctgtttgtagacgcggacaaacaccaccacgttatcctcggcgtaaatcacctgacagccgccgtagcgcagcgcctggtgggccttacgcagtttcgccatccgctgatacagcgccagcagctgggtatcctgcagcgccggatcccacgggaacggtttgcggcagaacggatcgttattgccatccacgcccacctcgtcgccatagtagatgcacggtacccccggccagctgaacagccacaccaccgccagcggcaggcgcgctacgtctttgccaagaagagatttaaaacgcgccgtatcatggctgtcgagctggttgaacatccgcagctgctgctgatgcgacagcccggcgcgataattatccatccacaccatacaggtctgggcgtctattttctgcggatcgtaagagatatcggtattggcgaggaatccccagatcgggaaggtgaagccgcgatagttcatcgccgcgtcttcggcatccgcctgcagccactggcgcgcgtcgccaaaatgttcgccaaagacaaaagcttccggctgcgcttgcttcgctgcctgggtaatgccggcgatatgctgcaggttattccgcgccccgccgccttcgcccagcatatgcaccacgtcaagacgccagccgtccatgctccatggcgccttcagccagtggcgtacgatactgtcttcaccggcatagatctcgttgaccaggctggtcgaccgatagtcgagcttcggcagactggcatagcccagccagttgtgcgcctgcccctcctctgagaaggtaaaccagtcgcgccacggggagtccggatcgtggccagcgccgccgctgccctgctggtgacggtcgaaccagggatgggaatcgccggtatggttgaacacgccgtcgaggatcatgcgcattcccgcccgctgggtgttgtggcgcagccggagcagcgccgcgtcgccgccaaactgcggatcgacgcgccgataatcctcggtatcgtatttatgcacgctgggggcggcgaaaaccgggttcagatacagagcggttacgccgagctgcttcaggtagggaagtttttcgctgatgccgtcgagatccccgccgtagaacgtcgacccgcccgcctcgccggtaagcgggtcgtcccacgccttgcgcacaatctcccgtcccgccgcgtgatggtaatagaccgcatcctggtcggcgtcacgcgcggcgctgcgggcaaagcgatcggggaaaatttgatagaacacctgatcggccacccactgcgggccggcgtccggcaggtcaatggcgaactgctccagtcgggccggcgggaatcgggtgaagccttgtggcgtaaaccagcgctgatggtcggcccacagcagcttaaagctgtagcggcggcgcggctggccgctggcgagagagatttcgccgcgccatgccaccacgcctggctgcggcgcctggcggagccgctgcatcggcagcgacagctcttcgttatcctcttccgcgcgcagcgtgatccgctgcggcagcgactcaccgcttaaccacagagtaataaacagtcggtcctgttgcaccttgataaagggtgcaaccggaaggtgccatgccttcaacatcgtgaatcctcattgtgcagaatgggcacaccttgccatagccgccgggcgcagaactcatcatctcagaactttttgggggaggataacgggggaggacgcgggaccgcaagccgccccggccgcgcgatgctgaccggggcgatgtcgattactgagcctgcgccagccggcgctcacggcgggtcttaaagacccagccgagcagcaacagcgcaatccacgccataccgacgtacagcgagatgcgggtgtccggatgatagccgataagggcgataataaaggccaggaacagcaggccgatcaccgtggtcaccaccccgccagggactttgaatttcagcgccttaacctcttcgggcgacagacggcggcggaaggctatctgtgacagcaggatcataatccacacccacaccgtggcgaaggtggccagggaggcgatcaccaggaaaacgttctccggcatgatgtaatttaggtataccgcaaacagcagcgcaatggtcatcaccatcaccgtcacccacggaataccgcgacgcgacgttttagcgaacaccttcggcgcgctgccctgctcagccatgccgtgcagcatacggcccacgccgaacacgtcggagttaatcgccgacagcgaagccgtcaggaccacgaagttaagaatactggccgcgaaggtaatgcccagatgctggaaggtcaggacgaaggggctgccgtcggttcccacctgattccacgggtagatggacataatgacgaacagcgtgccgacgtagaacaccagaatgcgcatcggcaccgagttgatggcgcgcggaatggatttctccgggtccttcgcctcaccggcggtaatgccgatgatttcgatgccgccgtaagcgaacatcaccatctgcagcgacatcaccattcccagccagccgttgctgaagaagccgccgttgctccacaggttatgaatccccgtcggctggccgccgttgccgatcccccagataatgatgccgaacccggcgaggatcatgatgataatggtggccactttgaagaacgagaaccagaactccagctcgccaaacaccttgacgctcatcaggttgacggcgcagatgatcagcaccacgctgagcacccagatccagtgcggcaccgtcgggaaccagacgcccatgtagatgccgaaggcggtaacgtcggcgatggcgacgatcaggatttcaaagcagtaggtccagccggtgatatagcccgccagtccgccgaggttttcctgggcatagcgggagaatgagctggcggcagggttatgcaccgacatctcaccgagcgcccgcataatgatatatgccgcgacgccgccgataatgtaggccaacagtacgctgggtccggccattttaatggcgtcggccgagccgtaaaaaagcccggtgccgatggcggaacccagagccataaagcgaatgtgccgggtgcttagcccgcgcttaagcttgttactactttccatcgtggtttttcaatgccgtttaacacaaaaaataaaaaaccacggaacccgaagtcccgtggttaaacgcttgtcctcaccgccggttaatgcgcgctggaagtcacctgacgtccggctgcgcgatcccagatcaccgcgagaatggtcatcacggcggtgggcatcagccaggccaggccctgctccgccagaggcagacgcgcggtccagtccggcagaatcgcggcaaatgccgatgacttaatcccgtcaatgataccaaacatcaggctgataaacatggccggcgcgataacgcgggacgaattatgccaccaactgcgggtaaagcttaatacaaccagtgcgatacacggcggatagatagcggtcagcaccggaatcgatacctggatcagatggctaaggcccaaattggagaccgccatggagaacaggccgagaacaaagaccagcgtgcgataggagaacggcagatactgggcaaagaactcagcgcaggcgcaggtcaggcccaccgccgtcaccaggcaagcgatgaagatcagcgccgccagcaggaaactgcccgccccgccgaaggtgtgctgcacgtaggcatggaggatcgccgcgccgttggcggactgatccacgagagtagcgctgtcagagcccagacggaacagcgccagatacagcagggtcaggccgacgcccgccatcaggccagcccagacggtatagcgggtcaacagacgcgcttcgctgacgccgcgtgagcgagcggcattaacaatcacgatgccgaacaccatcgcgccgagggtatccatggtcaggtagccgttgacgaagccattggagaatggcgccgtacgatacgcttccagcgcgtcgctgatcgggcccgctggccagatgatggcggcgaccgccagcacaatcagggcgataattttcagcggcgcaaggaaattgcccacggtgtccagcagtttgcccggatagagggagaccagaatcaccagcgcgaagtaaataacgctgtagatcagcagcggcagcgggccgtcgccggtcagcggcgcaataccgacctcaaaggagacggtcgcggtacgcggcgtcgcgaacagcggtcctaccgcgagatagcacaccaccgccagcaggataccggccactttaccaatcggggtgctcaggctttcaacgccgccgccgactttcgccagcgccaccaccgtcagcaccggcagacccaccgcagtgatcaggaagccgatcgccgccgtccagacgtgctcgcccgcctgtaagccaaccatcggagggaaaataatgttgcctgcgccaacgaacaacgcgaaggtcataaagcccaacgctatgatgtcgcgagattttaactgatgggtcataaattcattactgcctgtggatgtggtgttgtaaaaaaaatggaaaaataccgcgctcccctctcagggacgatacagcggccattgccggtaaactcagcgagatatgctcccgaagcggcgtgggaaagaattgtttttggtattaccacgcaaaagcagtctgtcatcgactgcgcaggcgcaatttaaacgcttataacgttttaaagcaaggcacgatcgcaaaagcagatgattatgctggttatgtctttcacaccagaatcatttaccatattgatagaaaacccgtggcttatcatgcgaacaaaaaagcagcgcacgctcattaaataggcgagaaaaaacgactgccaatgaaaatgaccagctgaagctggtcattggcaagataaactgacagcgcgtcgatcaggcgtcatttttggcaattaatcgttccgggagcaggaagctaaagcgggttcccttgcccaccgtgctgtcgatttccagccggctgtcatgatggttaaccgcgtgtttgacgatcgccagtcccaggccactgccccccgtttgccgggaacgggctttatccacccgataaaaacgctcggtcagacggggaatatgctccggcgcaatgcctggcccgttatcctcgacgctgaacagcgctccctgcggggttcgctgccagctgacgcgaatttcggtccccggcggggtgtggttcaccgcgttatagaccaggttggagatggcgctgcgcagctgctcctcattacccagcaccttgagctgctcatcgacggtgaagatcagcgtctgtttctcctggctgagagtttgcgcctcgcgctccaccacccgcagcatcatcggcacgtcgatgcgatcattcatcgccagcgccggcgcggcttcaatacgcgacagcgtcagcagctgcttcaccagaccttccatacgttgagtttgctcccgcatggtgtgcagggctttttctcgggtcgccccctccagcacctgctcctgcatcatctccagatagccctgcagcaccgtcagtggggtgcgcaactcatggctgacgttggcgaaaaagttccgccgcgccccttccagctgatgcatctgcgtcacgtcgcgcgccaccatcagccactgcttgtcgctgtagggcatcacgcgaatttccagatgacgggcgttattcagcaccagattgagcggctttgaaaaatcgcgctgtttcagatagttggcgaactcaggatagcgcagaaggttaagaatgttttggccactgtcgtccggccagcgcaggtttagaatctgctgcgccaggccattacaccagaaaatagccccctcttccgtggtcaggacgaccgcatccggcagcgattccgccccgctgcgaaagcgtttaatcaggcttcccagctcgcgccgacgctttttattacgcatctgcatctggtgcagaccatacagcagcggctcccaactgccgcggccaggcggaggagtcatgctccggtccacccacagccaccacgacaggcgcatcaaattccagaaatgccagatcagcaaaccggtcactgccgccagtaaaaaccacggcagatgacccacaaacgcccccagaatcagggccggaatacacgctaaaaagagctccagcgccagccttttccatgacagccgttccagcacgggtcacactcctgtcaaaattcagaaacgggcggagaaacgataccccgtgccgcgaaccgtttgcaccatacgatcatggccactgtgttccagcgctttgcgcaggcggcgaatatggacgtccaccgtgcggtcttccacataaacgttggtcccccagacgtggttcagcagctgttcacggctgtacacccgctccggatgggtcataaagaagtgcaataatttaaattccgtcggtcccatatccagcggactgtcgccggtcattacccggtgcgatgaagggtcgaggctcagcccctgcatttcgatcacctcttccaccgccatcggtgaaatacggcgcatcaccgctttgattcgcgccaccagctctttcggagagaaaggcttggtgatgtagtcatccgcgccggtctccaggccgcgaacgcgatcctcttcttctccacgcgcggtcagcatcactaccggaatatcccgcgtcatcgcctcgcgcttgagcagtttaataaactgcagccccgaaccgcccggcagcatccagtccaggagaatcaaatcaggccagggttcattgagttgattcaccgcgctgtcataatcttccgcttcgacaggctgaaagccattttgctccagaacaaagcagaccatttcgcggattggagcttcatcttcaacgaccagaattcttctcgccattatttaccctgtgttttttagccatcagtatagaagtgcggcgtcattatgcgtcacttttgtgacagatttatgaaaaaaatgaccgtctgatgatcgggtattttgaagcacgacgcggacttacccctcactaaccagtggtatactgccgcccatgcttttttcgctagggaagatttatgcgcctccttcacacctccgactggcacctgggccagaatttttacagcaaaagccgcgcggccgaacacgacgcttttcttacctggctactggaccgcgcgcaggagcatgaagtcgacgccattatcgtggctggcgatatttttgataccggctcgccgccgagctacgcccgcgaactgtataaccgtttcgtcgtccagttgcagcagaccggctgtcgcctggtggtgctggcgggcaaccacgactcggtggcgatgctcaatgaatcccgcgatatcctcgccttcttacacaccaccgtggtggcgaacgccggctacgcgccgattgagctgccgctgcgcgacggcacgccgggcgccatcttctgtccggtgccgtttttacgcccgcgcgagctggtgaccagccaggccggtcactccggtcgggaaaaacagcagctgctgctgcacgccatcagcgactattatcaggagcagtatcagcaggcctgcgcgctgcgcggcgatcggccgctgcccatcattgccagcggccatctgaccaccgtcggcgccagcaaaagcgatgccgtccgcgacatttacatcggcacactggatgcctttccggcgcaacacttcccccctgccgactacattgcgctgggccatattcaccgggcgcagatggtcggcggctgcgagcatatccgctacagcggctcgccgctgccgctgagcttcgatgaaaccggcaaagcgaaatcggtgcatctggtgagctttagcgaggggcgacttagcgccgtggaaaccctggaggtgcccgtgacccagcctctggcggtaatcaaaggcgatctggccgccatcaccgcccagctggagcagtggcgcggcgtcgagcaggacccgccggtgtggctggatatcgaaatcaccaccgaggactatctgcacgatattcagcggcatattcaggcgctgacggaggatctgccggtggaagtgctgctggtgcgccgcagccgcgagcagcgcgagaaaatactgctcaacgcccagcgggagacgctcagtgaactgaaggtggaggaggtattcgagcgccggctggcgctgaccgaaattgacgatatgaagcgcgcccggctgcatgagctgttcgcccatacggtgcatacgctcaccgcggagaacgaaaacgcatgaaaatcctcagtctgcgtctgaaaaacctcaactccctgaaaggggaatggaagatagactttaccgccgagccgttcgccagcaatggcctgttcgccattaccggcgccaccggggccgggaaaaccacgctgctcgatgccatttgcctggcgctctatcatgagacgccgcgcctgaacaaggtctcccagtcgcaaaacgacctgatgacccgcgataccgccgagtgtctggcggaagtcgaatttgaagtaaaaggcatcgcctaccgcgctttctggagccagaaccgggcccgtaaccagccggatggcaatctgcaggcgccccgcgtcgagctggcgcgctgcgctgacggcaaaatcctcgccgataaagtctcggacaagctggagcaaaccgcgacgcttaccggcctcgactatggccgcttcacccgctcgatgctgctttcccaggggcaatttgccgccttcctgaacgcgaagccgagcgatcgcgcggagctgctggaggagctgaccggcacggaaatctacggccagatttctgccatggtctacgaacagcacaaagccgctcgccatgcgctggagaagttcgaagcccaggcggcgggcatcgtcctgttgacggaggcccagcagcaggcgctgcaggaacgtttgcaggtacttactgacgaagaaaaagccctgctggcccagcagcagagccagcagcagcagctccagtggctgacccgccgcgacgagctggcgcagcagcagcagcaggccgccacccggcagcagcaggcccgccaggcgctggcggacgccgccccggcgctggcgaagcttgagctggcccagcccgccgcccaactgcgtcccctgtgggagcgccagcaggagcagacggcaggcctggcgcaaacccggcagcggatcagtgaagtaaatgctcgcttacttgccagcacggtgctgcgcgcgcgcatccgccagggcgccttgcgtgctcagcagcagcgtcaggctgaactggccgatctggcgcagtggctggccgcccatgagcgtttccgcttatggggtcaggagatcgccggctggcgagcgcaattctcgcaactgacgcgggataaacaacagctaacggctcagagcacccgcctggccgcgctacgccagaagctggccacgctgccagccagccctctcaccctgagcgcggatgacgttgccgcagcgatagaacagcaaacccaatcgcggccgctgcgccagcgcctgatctccctgcatgagcagcaccagctgctgcgcaagcgtctgcgccagaacgccgagagcgtccagcaggcgcaggcggagcaggtaaaacttaacgctaccctgacgctgcgccgggaacaatataaagacaaaaaccagcactatctcgacctgaaggcgctctgccagcgggaagaaacgattaaagacctggaaagctaccgcgaccggctcgaggcgggaaagccctgtccgctgtgcggcgcctgtgaacacccggcgattgaacaatacgcctcgttgacgctcacggataatcagcgccgccgcgatgcgctggaaaaggagggcgccgcgctgaaagaagaaggcctgctgatcctcgggcaggtcaaggccctgacgcaacagctccagcgtgacaccgaagcggccgggcggctcgcagaggaagagcaagcgcttactaaagcgtggcaggagacctgcgcctctctgcacatcacgcgggatattgcgcaagagataaacgactggatgcaggagcaggagcgctacgagcagcagctctatcagctcagccagcgcctgatgttgcagaatcagcttaacgatcagcaggcgctggagcgccatgccgagcagcagctggcggccacgcgccagggactggagagcgccctgcaggccctggccctgagcctgccggcagaagggacagaagccgcctggctgcacgctcgcgaaagcgaatttgcccagtggcaggcgcaacagacccaacatgatgccattcagcagcaaatcgctgctctgcggccactgctggagacgctgccgaccagcgacgagacagaggttgaagctgagtcggccatcccggacaactggcgcgaaatccacgaggaatgcctgtcgctgcacagccagcttgtcgcccagcagcagcaggaaacccaggaaaaggcgcgtctggaccagtcgcaggcgcaattcacctccgccctggccgccagccgctttagcgatcgggaggcgttcctcgccgccctgctggatgacgagaccgcccagcggctgacgcagctaaaacagacgctggagcagcagcttcagcaggcggccgcgctctgcgagcaggcgacccggcaacatgaggcgcacctggcgctgcgtccgcaaggggtggacgctgacgtccccacactgcaaacccagctgcacgccctggcccagcggctgcgggataacactacccgccagggtgagatccgccagcagcgcaggcaggacgcagagagccgtcaacagcagcaggcgctggggcagcagattgcagaggcggcgcagctggcggacgactggggctatctcaattcgctgatcggctccagcaccggcgaccggttccgcaaattcgcccaggggctgacgctggataatctggtctggctggcaaaccagcagctcaaccgcctgcatggccgctatctgctacagcgcaaggccagcgaggcgctggagctggaggttgtcgatacctggcaggccgacgccgtgcgcgacacccgcaccctctccggcggcgaaagtttcctcgtcagcctggcgctggccctggcgctgtcagacctggtgagccataagacgcggattgactccctgtttcttgatgaaggcttcggcaccctcgacagcgaaacgctggacacggcgctggacgccctggatgcccttaacgctagcggtaagattatcggggtgatcagccacgtggaggcgatgaaagaccgcattccggtgcagatcaaagtgaagaagattaacggcctgggctatagccggctggacaaagcgtttgcggtggagtgaggtctgaattatggcgatgtcccctcaccctaaccctctcccgagggagagggttagggggcggggaagcggttcaggtcccctggagcggccacagccaggccgcgccgcgtaccccgctggagtcgccgtgcatcgctttgcggatcggcgtttcacactcgccgccgaagacccactgcttcaccaggtccggcaccgtctgatacagtcgttcgacgttgctcatcccgccgcccagcacgataacgtccgggtcgaggatattcaccacgtgggccagcgatttcgccagccgctgttcatagcggctcagcgccagttcagccttttcgtcaccttctcccaccaggcgcataatctcgctgccggttaacccttggccgctcagccgctgatagtcggtggcgaaaccggtgccggagataaaggtttcgatacacccctgtttgccgcagtagcaagggacttccgcacggtagcgcagctcatcgtcgttcatccacggcaatgggttatgtccccattcgccagcgttaccattgccgccgatatgcgcccgcccgttgagcgccaccccggcgccgcagccggtgccgataatcaccgcgaataccgtttgcgcccccgccgccgcgccgtccaccgcttccgacaccgccagacagttggcatcgttagccagccggacttcccgctcaaggcgcaggctgaggtccttatcaaagggctggccgttgagccaggtcgagttggcgtttttcaccaccccggtataaggcgaaattgagccaggaatgcccatccccacggtaccctgctgtccggtcgcctgctcggccatcgccaccagagtggcgatggtctcgatggtttgccggtagtcctcccgcggcgtgggtaaccggtggcgaaacagctgctctccctgatcgctcagggctatcacttcggtttttgttccacctaaatcaataccaatacgcacgctcagctcctcaccccgattaacaatgcaagcatagcgacaattcgctatcatgcccgcctgatttaacgacaaagccgtggaaattatcatgctgtggttcaaaaatttaatggtttaccgtctcagccgcgatatcgaattgcgcgccgaggagatggaaaaacagctggccgagctgacatttaccccttgtggcagccaggatatggcgaaaaccggttgggtgtcgccgatgggatcgcacagcgacgcgctgacgcatacggcaaacggccagatcattatctgcgcgcgtaaagaagagaagatcctgccgtcgccggtgattaagcaggcgctggaggcaaagatccagaagctggaagccgatcaggggcgcaagctgaagaagaccgagaaagattccctgaaagatgaagtgctgcactcgctactgccgcgcgccttcagccgcttcagccagacaatgatgtggatcgacaccgtcaacggcctgatcatggtcgactgcgccagcgcgaagaaagcggaagatactctggccctgttgcgtaaaaccctcggctcgctgccggtggtgccgctgaccctggagaatccgattgagctaacgctgaccgagtgggtccgctccggcaccgtggcgcagggcttccagctgctggacgaagccgagctgaaagcgatgctggaagatggcggcgtgatccgcgccaagaagcaggatctggttagcgacgaaatcgctgtacacattgaggccgggaaggtcgtcaccaagctggcgctggactggcagcagcgtattcagtttgtgatctgcgacgacgcgtcaattaagcgcctcaagttctgcgatgaactgcgcgaccaaaacgaagatatcgatcgggaagatttcgcccagcgctttgacgccgactttatcttaatgaccggcgagctggctgccctgatccaaagcctggtggaagggctcggcggcgaagcgcagcgctaagcgccgctttccttcctgccgggcaggaaggaaaaaacaacccggcggcaggcgccgggcgtcacgctggcttacagatagcggcacagataagaggttggctcagccacctgcagatgaaattcgctgttgcctggcacattgaaaacttcgccggcagcgtaaactttccactcagtctcacccggcagcaggacattcagcgccccgctgactaccgtcatctcttccggctgcgccgtaccaaaggtgtattccccttccgccatcacgccaacgctggcgcgaccggtactgctgctggtgaagccaatggatttcacttttccgtcaaagtattcattgctttgaagcataaacaagcccttctgatcgtcggttaaaggctcaatatagggggcgctccttgcccctgtcacgtgaaattaacacattagaccaatagttctgccgccagtcgggaaaccagcacattcgacagcaaaaccggaacatcgagggctttttgtaacacatcgcgatgatgctgatagtaaccgagacagtcgaggaccagcacgtcggcgccctgctccagcagcgttttgccggcggttaatagctcgctgtcgctgccggtaaacggattggccagcgcgtagtatggcgacttttccagcgagagccacttttgccgctgcatgggcatgatctcttccaccggcacgatcacccctacctggtgcccatcgacgatcgatgccaccagcggcgggatgatccgctgcggctcgaggaggatcgcgtggtgggtggtaaaaccggtcagctgttcggaactgagcagcaggatcacatcataatgttgtcgatccagcatcgcgatcgcgctgcggacatcgcgttcaattttctgtcgcgacaccatcaccaactggttattactgagcaaggtcaggagtcctttctcgccgtcacctacggcgtactcggccattacctcgtcaggcgtcatctcgcccagcaggctgatgtgggcgatctgttcttccctgatatgttcggtcaggagcggcaatactcccgccagcggcacaacgccgatggtcaaaattgccatcgttgcactactcatatcatgtaccttttcacaaccactgcttcaacacaggctttccacacacagcatccgcccccctggtgagtaaaaatcaaccgtcgagaagcgtagcagctccacgccgcggttgaatgtaaagattgccgggcggcggcgccgtgcctgaaaaatccgtgtgttagatattcattagtacgactgataaataaaaaatgtgagatacgcccgatattgccagcatggcgggcaattcgggctcagggggttacgacttgtcaggatcttcataacgccgtttggcatccacggcttcctgctcggtaggatgttcgctgataagcgaatcaggctcaggataatccgcacggagctgataccaggtcaccgtctgaccctgaggacctttctctaccgcaaccacgcgcgcttctctcggatatgggggcctgtttggcatagttcttccttcttctggtagcagaactattaagtataggcgcccctcgccgccttaatgtaagtaaattcttaacttaccggggttgccgtcgcgctgcacagcatggacataatctgctccaccacccgatccggcgaggccgtggcatccacaatatggtgggcagcgtcccggtataacgcttcgcgctgcgccagcacctcgcccacttcctcgcgcaccggttttccggtcagcgtcggccgctgttcggctttcgggtaggcttccagacggtcaatcagcgccgacaccgaggcctgcagataaatcaccacgccattctcccgcataaactgacggttaccttccgccagcacaataccgccgccggtggcgattaccgtattcggcagggtcacggccttcagcgacagggtctccagttcgcgaaaacgcgcccacccttccgcctgcacgatctcagccaccgtccgctgctcatgggcctgtagccgatgatcggtatcggagaactgaaaatgccgcgctcgcgccagcgcatggccgacggtggttttaccgcagccgcgtggcccaataagaaagataggctgtgtcataaccgaagaccccctggttccgtctgtcgcaaaaaaatgaaaacgaaagcacgtattatcgctgtctgtcccgcaatgcatacgtaaagaaaaaattacacaacttctttacaccccattaccacggtgagaagaggggctattaatgtaaacttatcattgcatttagtgtttaaccagctttactttccgcttggcgttattttttatccaccgctggcgtaaacggtaacacatttatgcatagctttacgaagcaacatatttacaacatcatgtttcagaagcaccctgatgcctattcgacagtgtgacagaggaatgtaacatgcaatctgaagaacaacgccttattgatggactgttttcccggctgaaagaggctgaggcgcacagcgcatcgcgcgatgccagcgccgaggagcggattgcccaacacgtgagcgcgcagccggcggccccctactatatggcgcaaaccattcttatccaggaagccgcgattaaacagcttaacgatcgcatccaggcgctggagagtcaggtcagccaactgcaggcggcaaagcccagcagcggcggcttcctctccggcctgtttggcggtggcggctcgtcacgcggttctgaccctatcccgggcgcggagcaatatggtcgcccgcaggccagcgctcagccgcagtatacgccaccaccgcagcagaactatgccccgcaggctgccgcacgcggcggcggctttatggcgggcgcgctgcaaacggccgctggcgtggcaggcggcgtggtgctgggcaatatgctgaccaatatgttcagcggctcgcacccgcaggagatcgtcaatatcatcgaagagaagccgcagcctgatgccgcctccgcgcaggacagcatcgcgcaggacaccaccgcaggtgacgatccgttccgccagggagacgatcagttccttgccgacaatacctggaacgacgacttcgacgccggctttggcgacgatgattttggcagcgatgacgatagctgggtttaaccctggcgacgcttaaccgccagcaaccacttctccagctcggcggcaaactgttgccgatcgcgctgcgataaactatccgggccgccggtctgaacgccgctggcccgtaatgtctccataaaatcccgcattgtcagccgctcgcggatcgtcgcctcgctgtaacgttccccgcgcggattcagcgccgctccgcccttcgccagcacctccgccgccagcgggatgtcggcggtgatcactaaatctcccgccgcgccctggcgaacgatttcattatccgccacgtcaaaaccctgctcaacccgcagggtgcggatgaaacgcgacggcggcacgcgcagcggctggttcgccaccagcgtcagcggagtctgggtccgctctgccgcgcggaacaaaatctctttaatcacgttcggacacgcgtccgcatccacccaaatggccatgccagctcctgttacctgcaataagtgacgccaatgttacctgcttttctcccccaggaaagcgccaggatggtaagctaatcagatcgtaacgaaaaaagcagaggggaatggtgatggataagaaaattggctttatcggctgcggcaatatgggtaaggccattctgggcgggctgatcgccagcggtcaggtacagccgggacaaatctgggtctacaccccgtcgccggacaaggttgcagctctgcgcgaccagtatggcatcaacgccgccgacagcgcccaggaagtggcgcagattgccgatatcgtcttcggcgcggttaaaccggggatcatgaccaaagtgctgggcgatatcgcctccagcctgaataaagagtcgctggtggtctctatcgccgccggcgttacgcttgagcagctggcgcgcgcccttggccacgatcgcaaaatcattcgcgcgatgccgaatacgccgtcgctggttaacgccggtatgacctccgtcacgcctaacgccctggtgagcagcgaagatgttgccgaagtgctgactattttccgttgctttggccaggcggagcaaattgccgagccgatgatccatccggtggggggggtaagcggttcggcgccggcctatgtctttatgtttatcgaagcgatggccgatgccgccgtcctcggcggaatgccgcgcgctcaggcctataaattcgccgcccaggcggtgatgggctccgccaaaatggtgctggagagcggagaacacccaggggcgctgaaagatatggtctgttcccctggcgggaccaccatcgaagccgtgcgcgtgctggaagagaaagggttccgctcggcggtaatcgaagccatcacccagtgtatggaaaaatcagagaaactgagccgctcctgaagctgagccggcgggcttcaagccctgagaggttaaagaacaagggagcgcgagcgctccctttttttcaggctttcttcaggcagctactcatgaaggtactgcgttcatcgcccttcagtgatttcgccgtggccgctttgctgcagtcgctcattttctgctgctgaggggtgagcgcctttccctgcgaggtcgtggtctcttttttcagacactggctcataaaggttttgcgctcctcacctttcagcattttggctgacgcttgctgattgcagtccgtcatcctttgctgctgaggagtgggcgttttttctgccgcgccaaccgcgctgataaagatcaagccaaacagtagggtcatcaataaagttattttcatcgcaccatccttctgtgagtggaacgttgtaagtctggacgcagatagaaaaaaaaccagccggtgacgcaatttcgccaccggcagcgacttatttgagactcagggcagctttcatggtcgtgaacaggtcggtctgatcggtcaggccgacgacgttagccgcatgcggaccgtaggccgcaatgcgcagttgggtgccggtgtgctccatcgactcttcctcagagttgccgtaactcatcaccatcaccgcgccatcgtgcgtgttcagagcctgggtcagccccggggctttgctatccgccgggatgatctggctggcatgcgcatggtcggcggtgacgatcaccagggtattaccgtcttttcgcgcgaattccagcgccttctgcaccgcttcgtcaagatcaaccgtttcgccgatctggccgcacggattggccgcatggtcctgcttatcgatggacgcgccttcgacttgcaggaagaaacctttctcgttgcgactcagcaggtcaatcgctttctcggtcatctgcgccagcgtcggcaccgaggcgtcacgcttcgggtttggcgtacaggtcaccggcggcttatcgatattaccgtgataagacgccttcggcccttcccagcgtaccggcatattgccatcggcaaagagtcccagcagcggtttatcctgactggcttccgtcgcggcggcaagagaagccgcgtcggtcacaatctggtagccgcgcgcttgcgcctgctcgcgcagggttttgccctgccactcgcccgccgtcgccgtttcggcaaaggtcttcgcgccgccgcccagggtgacatccggtcgggcgttcagcagctgttcggtaatggagcctttgccccctttttccagcgcattgctggggcatttttcgctggtgaccgtcgggccatagcatttacgcgatgtcacatgcgccaccaacgccgcgggggtggcgtcctgcagctcggcggtggaaacgttgccggtggccagccccgccgctttcgccagctcaaggatggtctgatgcgcattctcatgaatatcgacgcccagcgcgccgttataagtcttcacgccggtggtccaggcggtggcggaggccgccgagtcggtcacgtagtccggtttcccggtttttttatccagcgaataatgcgtgtactgcccggttaacggcagagcatcaattcctttaaagaaaccgcccgccccctcggcatagtttcgcgcagcggtaatttccgaatcacccatgccatcgccaatcagcagaataacgtttttagctggcttattgattagcgaggcgcgcagcgcttcggtttgatcgcctgttaaacgacgcgcgccgccaggagtggtgatatctccctgcgcagcgcgattttccaggaccggcgcagcagtagtttctgcatgaataaccggcgagcccagtagaggaatcagggcaataaacagggcgcttaatttcacttttgtcatctccatgtaaaaaatacttaaaaaaacaaaacgagggagactttataaaagggagatgacagaaaaatgacggcatccttgtcgtgtcacaaagactagctacgaggatgccgcaacagcttctttagatattgctgcagcagcatcgcatcatggtcgttgaccggcggacagggcgtcacctggtcaatcgcctgttcaatatcctgaatcaatgcctgctgggcatcatgctccatatggcgcaataatgcggtgaccacgatctccagcgcttcaacctgcaccgtcagttcctttgcttcttcttccttttgcgccagtttaaccagtaactcagcaatgagattcttcatagcaccagttccttatgcgaggcctgttttgattgggatgtcatacgcgatgacggacctcagaattacttaaattaagaatcatcgcaacacccaatatacagcgaaacgttttaccacaataaaataccactataaatagtattgtttaatcatgaccggagttgcttataaccagattgcctggaaaataataaaatggaatagcgttcacgccataacgataacaaaaagtaatagtaaatccgctgacggcgaataatgctgacggtatcgcaataaataccgtcagcagaggttcaggcgttagcccgacgggtttggcgcagcatccacgccagctgccagaggttaatgaaaacgataatggcggtggcaataaacacccagcggaagccggccatggctgacacagaggcgccaattagcggcccggcgacgttgcccaaatacataaacgactggttatagccaaagatacgcccggtgacgctgtcgctgctgtacttcagcaataaggtctgcaccgccgggagcatcgcgccatcggcaaagccgagcagaaaacgcagcgtacccaattgcagcggggtggtgacaaaggacatggcgaagaacatcaccaccgcgcagcagagcgtcgccagcaggatccgcgaggtgccgatacggtcgccaagcttacccaaccgtggcgcagaaatcagtgccgccacgccgggcaccgcggcgatcatcccggccagaaaagcgatattgttgctgtccggcgccatcgacttaataaacagcgccagaatcgggccgattgagccgttgcacaattggatcaccagggtggtgaagaacaggctgatcaccagccccggatagggcaaagaggcaaagacttgtttcccggtgagacgctcgcttttgctgacctgcgggcgaacgccctctttaatcagaaacagggtcaccagaaaactgatggtcagcaggatcgccgtaataaaaaagaccatccgcagcccgacgtggtccgccaggaaaccgcccagcagcggaccgccgatcaccccgctaatttgcgccgtcgacagcgtgcttagcgcccagccgctgcgctcgcgcggcacctgggaggccaccagcgccatggcgttgggaatataaccggaggttaagcccatgatcgcccgcaggataaacagctgccagacgttggtggcgaaggcctgcagtaaaatggcaatcgccatccccaacgaggcgcgcagcagcatgagcttgcggcctttacggtccgccaggcttccccacattggcgagacgatcgccgagacaagaaaagtgacgctgaaggtcagccccgaccacatcgatagcgcttcatgcgaggtgacgccgagctgggagacgtagaggggtaaaaaggggagaatttgactgatcgccaggccggtaaaaaagcaaccaaaccagacggagatgagattaaccttccaggattccataactacgcgtattcattaatgatttgccaattattatctagcttagcaatttcatcccactggtgtactaccatagatgcgctggcggtgagtttggtgttttatggctgcggatgagagcctgacgaagcattttctggtcatttaggctgctcatagcgctttatgctcaaaagcagaagccctgcccgcgcatgccgaaatgaaaatggttggcgtgagccgcgttgtactctggccccagcgcgttaccgaagtaatggcaactgctgctcaacagcgccgccagccaggggcgcgaagtctcgctccgccagccctgcaggacgctaacgcgtctaccgtccgccagacggaaaccgctgacgtccagcgcgtccgccgtggcgtgttcactgcgccgcgcctgttgacgatggtaaatattgcggcaggcaaagctgccgagatgatcgatctgacgcagatcgctcgccatcagctgccgggtcagcggcttcgcctgctgctcgatgtacagcgcactgctcagcgccagcgggcaactggcgagaaaactactgctcagctgcaccgagccaaaattcgccacccgcaccacgttacgcagagggcagcttccctcgctgtcggccaccggccggctggcgataagccgccggcgattggcttccgccagcagggaggcgcactggtctgccgtcagcctgcgcagcttaaacgacgtcagccagcccgggggatcgtccagcgccagcggcgccagcggattcaggtgcggcggcagattgcggtatcccaacaggcccgcgccgagcagcccggccagcaccagcagcgtctttcctctcacgcccactcccgtcaattgatcaggtaaatattatggcagccaggcagcggtttcacatggtatgttatgccctttgatgttatctggatggaagttgaaatggcaaagatgagggttgggatcgtttttggcggcaagtcggcggagcatgaagtgtcgctgcagtcagcgaagaatatcgtggaagcgattgataaatcgcgcttcgatgtggttctgttgggtattgataaacaggggctgtggcatatcaacgacgccggcaactacctgctcaacgcacaggatcctgcccgcattgccctgcgcccttccacggtgactctggcgcagatcccgggccgcgaagcgcagcagctgattaacgccgaaagcggccaaccgctggcggccatcgatgtgattttcccgatcgtccacggcacgctgggtgaagatggctccctgcaggggatgctgcgcatggcgaatctgccgttcgtcggctccgatgtgctgggctctgcggcctgtatggacaaagacgtgaccaaacgtctgctgcgcgacgccgggctcgccgtcgccccgtttatcacactcacccgcgccaaccgcgcgcagttcagctttgccgatgtcgaagcgaagctgggcctgccgctgttcgttaagccggctaatcagggatcgtcggttggcgtcagcaaagttaaaaacgaagagcagtaccatcaggcggtggccctggccttcgaatttgaccataaagtggtggtggagcaaggcattaaagggcgggaaattgagtgtgcggtgctgggtaacgaccacccgcaggccagcacctgcggtgaaatcgtcctcaacagcgagttttacgcctacgacaccaagtatatcgacgatcagggcgcgcaggtggtagtcccggccgctatcgcccctgagatcaacgacaaaattcgtgctatcgcggtgcaggcctaccagaccctgggctgcagcggcatggctcgtgtcgacgtgttcctcaccgccgacaacgaggtggtgatcaacgagatcaacaccctgccgggctttaccaacatcagcatgtatccgaagctgtggcaggccagcggtctcgactacaccagcctgatcacccgcctgattgagctggcgctggagcgccatgccgcggaccgggcgctgaaaacctccatgaactaaaacgcgttttaccccgcctggcagcggcggcctcaggcctcttctgccgggcggcggcggatcacaaagcccgcaatccagaagctaatgacccaggtgatcagaccgacggcgtaggattgccacccctgagtttcaaaccccatcagccccaccactccattaagaataaaaatcaaccccagcgccacggcgtagtagtgccaatcgcggcgaattttatcagtgagcttcatgcggcctccaacagcaaaaaacgcatcttcgcatagcagcccgcggcggtctgtagcgatatggagaatgttgctggattgcgacgccgctctcccttttgtgctcctgtggcgcggttaacacaacggcgaaaacaggattattcctggacggcaattaccagcaatctgatactgatgatggcccctgactgccagaatacctgacatagagctggagaaaaaaccagcagcgcagatgtgggagggcctatggctgaattcagtttttcaaaatcgcttttgggaaataaaaaaaggggcgcgctgaccggcagccatgtcgcctacgggctgttcgtgttgatttgctgctgggccggcgcgcagatgctcagcatgctgatccacgccccgggggtatttgaacgcctgatgcaagcccaggacgccagccgtccgcaagtcgacatcagcctcgccgtgggtaccctctttggtctgatccctttcctgatcggctgcacgttcatcggggtactggcgcttatcgtgcgctggcgtcagcgccgttaacgccgcgccatacagtttgcccgccgctcatcaacccgtttcgcaaaccacgccgtcgtcagatttcgggtgatttttggactctccagctggatccctggtaacatctcccgcggcagggttttgcccgcctttttctcggcgagacggaaaacctgctgataaagatcggtcttctcaaacgccaggctgtcgccctttttcaactgacgatggatctcgctgtcgctcatccccagctggctcgccaggcgacgcaccgccagctcggtgctgcccggctcctcgctgtcgtagcggataaggtcgccgtcgagcgccagttttaccccgctggctttcaccaccgcgttctggaaggcggcgttacggctggcgtaccagccggcgttgaagtcggcaaagcggtacaatggcgcactataactggccggatagttcagcagatgataggtgccaaaccacaggccaccgcgcagactgaagatctcctggcgcaccgtgccgttcattttccacgggtagccgaaggtgtgctgctcggcaaaagcaatgctgacctgcatcggccccccggtgtgcaccgggttaagggaaccgaacagcttctgccccatcggcaccatcccgataaagtcatcaaaaatggcgctcaactgcttttccgtcttcacattgtccagacggtcgctatagcttttaccgtttggcgaggtgatcttcagcgcggtatggaccagaaacggcggaatgtgcattttttccgcccggcggtcaatttcctgccaggcgattttattcagccccggcaccaccggatcggactgatagttagactcttgctgcgcgaccgccagcaccgagcagacgttttcttccgtcggcgccagcttctggctgtcaaacgcggtggcgatggcttgcgcccaggcctcccgatccttgacgctggccggcattttctgccgcaccaccgacgccacgtcaacaggcttctcgccctctttcagcgccggagcctgctggctggtacaggcgctcagcgccatggccgccagcagcgtcaatgaaacgggaataatgcgcgataaacgtgcggccattatgcttccttgtcttgattaacgtaatgtcgggatcgcttcctgcagcggtttgccgtccagctcgcgttcaaaactgcgcagacgtttgtagatggacatcagttccaccagcgttgtccacgagctgatcaggtactggaacgagccgcgcacctggccgaagacgttggtaatttgcgtcatcagcccgagggtaatcgtaccggcaacgatcgacggaaacagcaggaaaaggccgaaaacgttatccacctgcagatagaggatgcgggcgatattgaaatacatatagtggaaatagagacggaaatagttgcgacgcaccgcgcggaatagctcgcgcaccgtcggcggcgtggcgcgagtttcatcgtcctcgccgtaaaccagctctttacgataggccgcttccacgcgctggtttttaaactccaggcccggcagcttaacccccaccaccgccagcaggccggtacccatcagcgaccagacgatagcggcaatcaccaggccatacggcagatggccgacgataggcaggtcgggaacatgttcggagagcgtcaccagcaccggcaggaaggcgatcagggtcatcaccgcgttgataaagctcacgcccatatcttcgagggtggaagcaaaacgcatggtatcttcctgcacacgctgcgcggcgccttcgatatggcgcagatgctgccagtgggccatatagtgctcgttcatcgccgtgcgccagcggaagacgtagtggctgacgaagaagttgttcatcacgccaataatcaccgcgatgatcgcgatgccgagaaagacgccgatttcctgataaaactggttgatgctgaccgtatgcggggtggccagcgcgctctggatcaggtcgtagaacggcgcataccaggcgttgatcgccaccccgacttccaccagaaaccaggtgacgaagatgatgagcgaggtgccgagaatcgaccagtactgccagcggggcgggcagtagacaaaccagaacagcgcgaacacgccgacgcaaaacagatagtaagcgtagaacaccagatagttgagcgaccagaagcgcgccgcgctgatcgccacattttgcgatgccccggtgacccgcagcagccagtcgccgccgcccgcctgccaaaagatcacggccagcagcgaccagataaaggcagaaataaaaaacggccccggtttggggaaaaaagatttaaacatcattgtctcctgctaacttcttatcgttctgctattgctgtgtacgacgcatacgtcggccgccgcgtggatgagccctcgcgggacagacgaatgataagaccggatatcaacagcttagttctgctgccatgcgtgcagaattgtttctgtgggtttcacctgtaaaggattgccaggaatggtcagcgtacgccacacctcattgtagtgggcgataagcgtcgcggcctgcgcggcggggcggtcggcggtggtgtgggcatcttccgcgataacaataccgtacccgcggctggcgccatttttaatggtggtatcgaggcagtagtcggtggcgcagccgcagatgacgaactgctgaatgtcgtgttcgtccagcacctgcgccagcgaggtgtgatagaaggcatcgcaggcggttttggtgacatacagcgcgccagccggctgctccagctcaggaagcagggcgaagccttcgctgccggcttcgaggccgccggcttcatcatgctgaatgaaaataaccttgtccgccgcgcgcaccagacgattaatttgcgcgacgcagcgctcgcgcgccagacgcggcgtggcgaacacgccgttttgcatatccacgaccatcactacccgttgagccgtcattgttctctcccacgaaccttcagccaaacggtcatcatacgcgccggcgaaaaaagccggtatccgaaagcgtaaaaaagtcttttttacgcaccgttacctttttcctgcaggaatgtcgtgaatcccgctttgttctgcgccacttcgtagtataaataccctcttctttttatttatttaatggatgatctccgttgaaacgtagtttgctcatttttgctgcgctgtgcgcggcgtcgtggacctcggtgcaggccgcacagcctaccgttgacccggttttcgcctcggatgtggtcgatcgttacgccaatcatatctactacggcagcggcgccaccggcatggcgctggtggttatcgatggcaatcagcgtgtttttcgcagctttggcgaaacccgcccggggaataatcagcacccgcagctcgactcggtgatccgtatcgcctccctcagcaaactgatgaccagcgagatgctggtgaagctgctcgaccagggggtggtgaaactcaacgatccgctgagcaaatacgccccgccgggcgcccgggtgcctgactggcagggaaaaccaatcaccctggttaacctcgcgacccataccagcgccctgccgcgcgagcagcctggcggcgccgctcatcgtccggtgtttgtctggccgacccgccagcagcgctggaactggctctctaccgcgaccctgaaagccgcgccgggctcgcaggcggcctactccaatctggccttcgatttactggcggacgcgctcgccaccgctgccggcaaaccgtatccgcagctgtttgaagagcagatcacccggccgctggggatgaaggacaccacctttaccccgtcaccggatcagtgccagcggctgatgatcccggaaaaaggcgccagcccatgcaacaacaccctggcggcgatcggcagcggcggagtctactcgacgccgggggatatgatgcgctggatgcagcagttcctgtcatccgatttctatacccgcagccagcaggccgaccggatgcagacgctgatttatcagcgtaaccagctgacccgggtgattggtatggacgtgccgggccgcgcagacgcgctgggcctcggctgggtgtatatgaagccgaagaacggccatccggggattattcagaaaaccggcggcggcggtgggtttatcacctatatggcgatgaatccgcaggctaacgttggcgcctttgtggtggtaacccgctcgccgttaacccgcttcaacaatatgagcgatggcatcaacgacctggtcagcgagctgagcggcgcacagcccaacatgcagacggccagccagtaagcccggggaaggtttcgccgatgcgccataacgatcgttttggcgaaacctcccgctgccatttcagttacactatcgtctttcatttcacaaaatcaggcaaaccatgacagatttaatcactcgcccccgccgcctgcgtcaatccgctgcgctgcgcgccctgtttgaagagacaacactgagtttgaacgacctggtgttgccgatctttgttgaagaagaaattgatgattacaaagcgatcgaggccatgcccggcgtgatgcgcattccggaaaaatatctggcgcgcgagatcgaacgcatcgccaacgccgggatccgctcggtgatgacctttggtatttctcatcacaccgatgccaccggcagcgatacctggaatgaaaatggtctggtggcgcgtatgtcgcggatttgtaagtccacggtgccggagatgatcgtcatgtccgatacctgcttctgcgaatatacctcccacggccactgcggcgtgctgtgcgaccacggggtggataacgacgcgaccctggaaaacctcggcaaacaggccgttgtcgcagccgccgcgggggcggatttcatcgctccttccgccgcgatggacggtcaggtgcaggcgattcgccgctcgctggacgccgccggcttcaccaatacggcgatcatgtcctactcgacgaagttcgcttcttccttctacggtccgttccgcgaagcggccggtaccgcgctgaagggcgatcggaaaacctatcagatgagcccgatgaaccgccgggaggccattcgcgagtcgctgctcgatgaagcccagggcgccgactgcctgatggtgaaaccggctggcgcctacctggatattctgcgcgatatccgcgaacgcagcgatctgccgctcggcgcctatcaggtcagcggggagtacgcgatgatcaaattcgctgcccaggcgggcgctatcgatgaagagaaagtggttctggaaagcctcggcgctatcaaacgcgcaggcgccgacctgatcttcagctatttcgccctcgatctggccgagaaaaagatcctccgttaaacccgcccctccccggtggcgctgcgcttaccggggcccgcaggcctatcccgcatgtaggccgggtcaggcgcagccgccacccggcgcaaaaacgtctccctacccgttgccattgcccggcagcgctgacgcttgcgcgggcctacgagattgccgggcccgcagtcccatcccgcatgtaggccgggtcaggcgcagccgccacccggcacaaaaacgtctccctacccgttgtcattgcccggcggcgctgacgcttgcgcgggcctacgaacttgccgggcccgcagccccatccgcatgtaggccgggtcaggcgcagccgccacccggcgcaaaaccggctccctatgcgtcgtctcccccgctgcgaccgaaacttcacccaactgtaatctgaacgacatctccaccttctactgtctgggcaggacggaggaggagccactatgtttagtctcgacaacgtactcgatgacctgtggcctcaggcgaggcccgccccctggcaaaagaaactgttaaaaaagctattttatgaggaagagtttcaacaatttgccgaccgtcaccgccacctgaaggggcttgatacggtcgaacaggtgctggaatacctcaatatccgctgcgccatcccggcgcacgatctcgaacaaatccccgaatatggcccgctggtcattatcgccaaccaccccaccggcaccctcgacggcctggcgctcctgtatgcggtatcccgcgtgcgccgcgatgtcaaagtggtcaccaaccgcatgctcacccaccttgagcccctgagctcgctgtttatcccggtagataatattcatggccgcaccgctaaagcggcgctgcagcagatggaccagcagctgcaggccggcggggtgctgatcttcttcccggcgggggaagtctcccgcctcacccctcgcggcatccgcgataaaaaatggcactccggctttattaagctggcggcaaaatatcgcgccccgctgctgccggcgtggattaacgcccgcaacagcgccctgttttacgccagcacgctgatatcagacaacctgccgctgctcctgctgatgcagcagatgtttcgccggcgcaacagcagcctgccggtgcgtatcggccagcagatcccctggtcgaactggttcgatgtgcagtccagcgctcgcgagcttaccggcagctgctatcagcaccttgaacagctgcgcaaagggctgccggggcggtttaaaaccgaaagcgctatcgcccgtccggaagaccgggcgctgctcaaacgcgaactgcacaaggccgaatgcctgggccgcaccgccgatggcaaagtgatttacctctggcagcgcaacggccaggaggacgcgccgctgctgcgcgagctgggacgcctgcgggaaatcgccttccgcgcggtcggggaaggcagcggcaaacggcgggatatcgacgggtatgacgacgactatctgcatctgatcctgtgggatgaagaagacctcgagatcgtcggcgcttaccgctttatgccgacggctatccagttggcaaagcgcggcctggaggggatctacagttacagtctgttccattacgacgggcggatggacgatgtcctgcagcacggcattgagctggggcgcagctttatccagccgcgctactgggggcgtcgcgggctggactacctgtggtccggcatcggcgcttatctggcgcgctatccgcactatcgctatctgtttggtccggtgtcgatttctggcggattgccgcccgccgcccgcgatctgctggtggcattctaccggatgtggttcccggcgacgcatccgctggcggagtcgcgtcgaccttatccggcgtcgctgcccgacgtgctggcgcagtttggcggggaggattacaacgacgacctggcccggctgaagtccctgctcggcaacctcggctgcgcgatccccccgctgtataagcagtactcggaagtgtgcgagccgggcggcgtgcagtttatcgatttcggcagcgacccggatttcaacaactgcgtggatggtctggtgctggtggatctcacctacctgaaggccaatcgctaccagcgctatattggcgcgcatctgggtgcgcaaaaatcggcataaacgctttttcccggcttgcggcgcgttgcgccttagccgggctaccgtttccgacggatcggtagcccggaaaaggcgcgtcaggcgacgcctccgggaagcagcgggcaatgcagcatccgcttttctccgcggctcgcggctgatgccttaaccggctacaagccttaccccgcccggtaatacggcttatcgccgaggatcgtcgcccggtgcatgatccgccgctgcggcagatagtcggcgttggcgtaatgctgggtcacccggttatcccagatagcgacatcgttcggctgccagcgccagcgcacctgaaactccggtttagtgacatgagcaaacaggaagttcagcagcgctgcgctctctttctcactcacctcgacaattcgcgtggtaaacccttcattaacgaacagcgcctgcttgccggtcaccgggtgggtacgtaccaccggatgcagcagcggcggatgcttcgccaccgcttcctgccagcgccgatgctcggcttcggtcttgttgtacttatactcctggaacgatttgcggaaatcgtgttcggcatgcaggccgctcagcagctgccggaagggttctgacagcgcttcccaggcggcgatgccgctggtccacagggtgtccccgccggtcgtcggcagctctttcgccgccagaatggcgccggcgggcggcgtgtcgataaaggtgacatcggtatgccagttgtcattatccggcggattatcgttgtgggtatcgaggacgataatctcctccacccctggggcgtgagggtagaccggatgaatatgcaggtcgccaaaacgcagcgccagatcgcgctgttgcgccggggtgatattctgctcgcgcaggaataccacctgatgacgcagcaccgcgtgatacagctgttcaaactggttgtcgctcagcggacgggttaaatctgccccgctcacctgcgcgccaatatagggccccagcggggtaatgctcagacgttcactcattgtacttctccatgccagggcgtcaggcgccgctgcagcgcgcgcagacccagttccagtaaaaaggcgataatggcaatcaccgcgatccccgccagcaccacatcggtggcgagaaactcgccggcagactgcaccataaatcctaatccgcgggtggcggcgatcagctcagcggccaccagcgttggccagcccaccccgagaccaatgcgcagcccggtgaggatctccggcagcgcgccgggcaggatcaccagccacagcacctgcgcccggctggcgccaagcgaacgggcagcgcgaatccgcacctgctgcgcgctttttacccctgccagcgccgacatggctaccggcgcgaaaatcgccaggtagatcagcaggatcttcgaggtttcaccgatgccaaaccagatcaccatcagcggtaggtaggccagcggcggcaccggacgatagagttcgatcagcgggtcgaggatcccgcgcaccgtcgagttgagccccatggcgatccccaccggtacgccaataagcactgccgccagcagggcgataacgatccgcgtcaggctcgccgccaggtgctgccagagcgtcgcatccataaagccctgcggcccggcgatggtgataagcttctgcagcacctggcccggcggcggcagaaacagcgggctaatcagctgcagcgccgcgaccgcccaccagacggccagcaataccgccagggtcgccacgctgagggtgagctggcgggagagcggccagcgccacttcagcgtcgactgacgcggtttgtcgttcagtaccacgctcatgagaaagcctcccgttggtcaaacacccggctcagaatgtattcccgctgttcaataaagcgcgggtcggatttaatgctgcggcaggattcgcccgcgacaaagcgacggctgaaatcaagcggcagcctctccaccacccgtcccggccccggcgacagcagcaccagctcggtcgccatgaagatggcctcttcaatatcatgggtgatcagcagcacctgtttgccggtctcatgccacagtttcagcagcagcgtctgcatctgctcgcgggtaaaggcgtcaagcgcgccgaagggctcgtccagcagcaacagctgcggattcgccgccagcgcccgggcgatgcccacccgctggcgttgaccgccggacagttgccagataaagcgcttttccgccccttcgagccccaccttcttcagcatctgcgccgccgcttgccggcgctgcgctttatccacgcccgccagctggaggcccagcgccacgttatcctgcacattgcgccacggcagcaagccttcgttctggaagaccaccccgcgctctgcgcccggcccggtcacccgctgaccttcgagggtgatgctgccgtgctgatagggcacgaatccggcaatcaggttcagcagggtagttttaccgcagcccgaaggccccagcaccaccaacagctccccactctccagcgtcaggttgatatccgccagcgccggtttaccgccgtagtcagcggaaagatgcgagatttgcagcatcgccgcctcctttacttcacaaagcggtcagtaacgtactgacgataatcggttcccgccgcaggcactttgccctgctctttcaggaagcgcgcggtatcgacgatggcctgattgaccggcccgttcagcgcctgcgcctgctcagcggcggtgagataggtattgcccttcaccagcccggggacatcggcttccggcacgccgctcaggcgcgccagcttgctgatgttgtccggctgtttcagccatgcctccgggttggcgatgtagggctgctgggcgtcgatggcgcttttagcaaacgctttgacgatctccggatgctgctcggcgaagtccttacggaccacccagacgtcaagggtcggcgcgccccactccccaacctgagaagaatcggtcagcaccttgccctccttttccagttcgttaaccgctggcgcccagacgtaagcgccatcgatatccccgcgctgccaggcggcgataatcgccggcggctgcaggttaataatctgtacctggcccggcttgatgccccagtgtttgagcgccgacagcaggctgtagtgggtggtggagataaacggcacggcaatgcgcttgccgatcagatcttccggtttggtaatgcttttcttcaccaccagcgcttcggagttgccgagctttgaggcaagcaggaacacttcaatcggcacctgctggctggcggccaccgccagcgggctggagccgatattaccgatctgcacatcgccggaggccagggcgcgtaccacgctggcgccgctgtcaaatttccgccagtcgacggtcgccccgctggttttggcgaaggtgttgtccgcctgggcgactttcgccggctcagcggaggtttgatacgccacggtaacgttgaccgcctgcgcctggaaggcggcgacagccagcgccgccagaagagtaattcgcgatgtgaatgccataatgtctgcttcccctgagttgttataggtgcagtatttccggcatcaggatggagatgaagtaattaaaaattctggctaatagcgaatcgtttttagaacaaaagcgggaaaggatagttggttttgtgcggtgagttagtggcagatggttggcgccgggcggcggctacgccttacccagcatccggttcgcgcaatatgtaggccgggtaagcgcagcgccacccggcaaaaatttagcgcttcgcgttaagcgcggcgatggccttcggcgtggtgcggcagcagccgccgatcagcttcgccccggcggccagccactgcggcagataatccgccaggctggcgcaggcttcgccatgacggtgccaggtcttgctcaccgcatcataatgttcgccggagttaggatagaccaccagcggcagggccgtcaggctgtgcaaatgcgccagcgccgcgggcgtattttccagggcgatacagttgatccccaccgccaccacctgcgggttatccgccagggcggccatcacctcgcgcagcggcgtgccgtcgctgagatgttcggcgtcgcgcagcgtgaaggagtaccaggcgcgggcgcggggatactcctgcagcagggccgccagggcctggatctcagcgaatgacggcagggtttcacaggccagcaggtcggcgccggcatccagcagcgcttcgacgcgcgggcggtggaaggcctggaactctgccgcgctgcgctgataatcgccgcgatactccgagccgtcggcgagaaacgcgccatacggccccaccgaaccggccaccagcagcgtaccggcctgcgggttctcggcgaggtacgcctcgcgcgctttgcgcgccagctcgacgcttttgccgattagcgcccgggactgcgcctcatccagcccgcgcgcggcaaagcccgccggagtggcctgatagctggcggtgatcgccacctgcgccccggcgcgaaagtagtcgagatgcacatcgcggatcagctgcgggttctccagcagcactttcgccgaccacaggctgtcggccagatcgcagccgcgggcctccagctcggtggccatggcgccgtccagcagcacgaaaggctgggcggcaagcagggcggtaaacggattagtctgcgacatgttggggctcctgagtcatattccgtgaacgagtaagataccaggcaccatagcacagggccacaaaggggatcccgcaccacagcgcaattctctggctcgggtcaaaagcgaggcccacgcaggccaccaggcacagcacaaagcccagaacgggcactaccggataccagggagcgcgatactgcagatcgcgcagcgccttaccctgctgcagatggcggcggcggaacataaagtgcgaggcgcagatgctcaaccacaccgccaccaccgcaaaaccggagatcgccgacagcgcgacaaacaccgtatcgggcgccaccacgctggagaacagcgccagcacgccgcccagcatactcaccgacagggcggtcaccggcacgccccgtttattgactttggcaaagcaggccggcagcgtcttctcgttcgacagcgaccacagcatccgcccggaagcgtacaggccggagttagccgccgacaggatcgccgtcaggatcacgaagttgaacatgtccgccgcataagggatgcccaccttctcaaacaccagcacgaaggggcttttctccacccccgcctgctgcattgggatcagcgccgccagcacaaacacggtgccgataaagaaaataatcagccgggcgatggtggtgcggatggcaaccggaataaccttatgcgggttttccgtctctccggcggcaatgccgataagctccgtcccggagaaggcgaagttcaccgccaccatggtcatcaggatcggcaggccgccgtgcgggaaccagccttcggcggtgatattgcgcaggcccggcgccggggagccatcctgcatcggaatgatgccgaaaatggccgcgccgccgagaataataaacgcgacgatggtgatcactttcaccagcgagaaccagaactcgccttcggcgaagaagcgcgtcgaaatgatgttaaggccgaagatcactgcgcagaacaccacgcaccagatccagaccggcacctgcgggaaccagtactgcatgcagaatcccgccgcggtgaagctcgaccccagcgccaccgtccacgttagccagtagagccacgccacggtatagcccgtcgccgggccaagatagcgcgccgcgtaaacgtggaaggcgccggtctctggcatcgccaccgacagttcgccaaggcactgcatcaccagccagaccaccagggcgccaatcagatacgccagcagcgtcccggccgcgccggtggtggagatgatatagccggtattgaagaataagccggtgccaatcacgccgccgagcgacagcatgatcagatggcgcgttttcatggtgcgcttcagctgcccaccttgttgttgtgttgtgctttgcattttattttctcacgccagcccgcttgcccgggtcatgatgcgtataaacgtatagacatctaaacatccaaaagaagaagtgttataccgtgccgccgttgaaaaagcaaagccgctgcaccagggcgcgcgccgacagcgtgcagcctgccccatttttgcgcagcgccagcgggcgcgccacggactgacgccttatcgcggcaggcaacgttctggcactctctttgcagcctgtcgttcagcacctttctatctggcgaggcaatacgtatgacagagcaaaccaccaccttaaaaagaacgctcggcagttttcgtttatgggggatcgccgtcggactggtgatatccggggagtacttcggctggagctacggctggtcgcaggcgggcacgatggggtttatggtcgtcgccctggcggtcgccgccatgtactgcgcctttattttcagctttaccgagctgaccaccgccatcccgcacgctggcggccctttcgcctacgcctaccgcgccttcgggcccaccggcggctttatcgctggttttgccaccctgattgaattcgtcttcgccccgccggccatcgccatggccatcggggcctacctcaacgtgcagtttccggcgctggatccgaaatgggtcgcctgcggcgcctacgtgatctttatgacgctcaatattctcggcgtcggcatcgccgccaccttcgagctgatcgtcaccctgctggccatcttcgagctgctggtgtttatgggcgtggtcgcccccggcttctcctggagccacttcaccactaacggctgggcgggcgcggacagcttcagcggcctggcgctgccggggatgttcgccgccattccgttcgccatctggttcttcctcgccattgagggggcctccatggcggccgaagaggccaaagatccgcagcgcaccattccccgcgccctgggcggcggcattctgacgctgacggtgctggcgatcggcgtgatggtcttcgccggcggcgtcggcgactggcgcgcgctgtccaatattaacgatccgctgccccaggcgatgaagacggtggtgggcaacggcagcggctggctgcatatgctggtgtggctggggctgtttggcctcgtcgcctccttccacggcatcattatgggctactcgcggcagatctactccctcgcccgcgccggctatctgcccgccgggctggcctccctcaaccgccgcacccgcaccccgcatctggcgatcctcgccgggggcgtggtggggatcgccgcgatcttctccgactcgctgatcaccatcagcggcatgccgctgaccgcctgcatcgtcaccatgtcggtatttggggctattgttatgtatatcacttccatggcggcgctgttcaaactgcgccgtagcgagccgaagctgatccgtccgttccgcgccccgctctacccgctggcgccggcctttgccctcggcatggcggtgctctgcctggtggcgatggtctggtataacctgctgttggcgctgattttcgcggcgatgatgctcggcggctacctgtggttccgcaaaaccgcagcggcccgtgaacgggcgccagtggatcctcaactgcgcacggtctcctgaggaggcggcatgtataaaaccacgctatcgggccaggtatggcgctttgatagtctgaaaacgctgatggcgaaagcgtcgccggcccgctccggcgacgccctcgcagggattatcgccacctcagccgaagagcggatggcggcgaaaatggccctcgccgaggtgccgctgaccgacattctcgacaacccgcttatcccttacgagcaggacgaagtgactcgcctgatcctcgacacccatgatgcgcagggctttgccgccctgcgtcacctgacggtcggcgattttcgcgactggctgctggatgatgctaccgataccgccacgctgcagcgggtcgcccgcgccatcaccccggagatggcggcggcggtcagtaagctgatgcgcaatcaggatctgatccttgccgccagcaaatgccaggtggtgacgcgctttcgcaacaccatcggcctgcccggccacctcagcgtacgcctgcagcccaaccatcctaccgacgacctgaaaggcatcgccgccagtatgctcgacgggctgctgtacggcgccggggacgcggtgatcggcatcaacccggccagcgacagcttaccggtgctggcgcagctgaacgtgatgctggacgatattatccagcgcttcgccattcccacccagtcctgcattctgacccatgtcaccaatacgctgcagctgattgagcgcggcgcgccggtggatctggtgtttcagtcggtggcgggaaccgaagcggccaacagcggcttcggcatcaatcttgccatgctgcaggaggcccgcgaggcggccctgagcctcaggcgcggtaccctcggcaacaatgtgatgtattttgagaccggccagggaagctgcctgtcggccaacgcccaccacggcgtcgatcagcaaacctgtgaggcgcgggcctacgccgtcgcccgccactttgaaccgctgctggtcaataccgtggtcggttttatcggtccggagtatctctacgacggcaagcagattattcgcgccgggctggaggatcatttctgcggcaagctgatgggcctgccgatcggctgcgacgtctgctataccaaccacgcggaagcggatcaggatgatatggacaccctgctgaccttgctgtgcgccgccgggctcaccttcctgatcggtgtgcccggagcggacgatatcatgctcaattaccagagcacctcgttccatgacgcgctgtacgcccgtcgcctgctgggcttaaagcatgccccggagttcgccgactggctggcgaaaatgcaaattatcgatccgcatggcgcgctgcggctcaccgacgcccgtcatccactgctgtccgtcctgccgcaaggagcccccgtatgaaccgtcccgatgcctggaacccgctgcgtgaatttaccgatgcgcggatcgccctggggcgcagcggcgccagtctgccgacccgcgaagtcctcaactttggtctggcccatgccagagcgcgggatgccattcatcagccgttcgccggccaccaattggtggcgccgctggcggcgctcggcctcgaggccctgacggtgcacagcgccgcgccggaccgtcatacctatctgcggcgcccggatctcgggcggcagctcgccgatgagagtcgcgccgacctcgccgccagcggcgtccgccccgccgacctgctgctggtgatcggcgacggcctctctt

SEQ ID NO: 132 - DNA, 194215 bp, Unknown
  source: /note="Description of Unknown: MKP2_2161_1 Mutant Bacteria sequence"
ggccagggccacgttaagatgatcgttttcctgaccgctcaccgccagagccaggccggcaaaatggtttatgcgccgctcggccgcccagcgggccgcctgcgccagcgtctcctcctgcgccggaacgacttcgctggccagcagcggcgcgccggcgcgggacagctggagcgccagcaggccgctggtaaactgctcgctgagcgtcaggctcagctgccgctcctgcagacagcgggcgatctgcgccggtaacccttccgtgccttcgaaaatcaggctgtcgccagccaccttacgcacctccggccacagggccagcatggcgtctcgctggttggccggtccggttagcttgagttcaatgatcggcatcgacgagcggtaacccatcaccacgcccggaggcagcgtcagcggattaagactttgcgccagctcgctctccgagcggccaaaggtggtcatacgcaggcataccggcgggtccggcagcgtaaagcgctggcgcaggcgcggtaaaatttcctgctcgaccatcaccttaaattcagaggggaccccgggagtgaaaaacatcaggcagcggttgagctggatggcaaagccacaggccgtaccgaccgggttgttgatcatctcggcgctggccgggatttccgcctgcttacggttgctttccgccatcggcctgccgcgctcggcaaaaaagcgggtcatggtttccagccactccggatgcaaaataagcccctcgcctttcgcagtggcggcggccagcgcgctcaggtcgtcgctggttgggccgaggccgccgttgacgatcagcacatccgcctgttcgctgcgttcgcgcagaatcgccaccagcgcatcgagatcgtcgccaacggtattgcggcgcgttaacggtaaaccctgattaaaaaagaaatccgccagccatgccgcattggtatcaatgatttgaccatgcaacacttcatcgccggtggacagcatttccacattcaacattgctcactccttgcctgccaggtgagaaatactataacgcaaagcgggatgctgacgaggaggaaaatctggcgcagcaagaagatgccgcgccggaagagattagaagctggcgctggcgccgatgtatgggccgtcggcgatggtgttatcgcggttgccatctttgcccgccaggttcaggtaacggtagccggcctggatgctaagcggacgcataatggtccagctggcgccgacgttggcttcctggtagctatcaatgccgctggagagcgaatccggagagtagtaataatcgccgtacaggcggaagctgtcgccgattttccactgcaggccgccgccgaccgcggccgcataaccttcatcgccctgtttcggattggtgtaaatacctttaccacccacggtcgcgaggaacggccccagcggaatattgagtcccaggcctaaacccgcggcgtcgccgtcgttatcgctgtgcagccagttacccgaaacggccaggccggtggactcggtgccgaagccgacgccaaggttggtgtaatgctcgccggcttcaccggtaacgctaatcgcatgggccgccgaagaaaccatcatcacgcccgccagcgccataaaaatgctttttttcattatttactctatccagaaaattaaaatcaaagaagtcccgaaaaaacctgaaaattctactgcgcacccatcaggaatcaatgacctggcgaaatgaattttcacaagagtgtaaccagttgcgtatttttacggcatcgagcgttgccagaaccacgaacagcctattcaacgccagtaatattcatgtttattatgattaacgctgacacattgacgaaaacagagagctggcgccgcacgatcggcgcggcgcgagtggataagggaataattaatgctgcagccgggccagacattccggggcgaggccggtcagtttcgccaccagcgacaggtcgagtccgttagcaagcatcgcccgggcgatacgctccgcggtctgctgctcaccttgctcgatacctttttcgataccttgttcgataccttgctgtagaccttgttcaagaccttgctttaatccttgctgatggccgcgttgttccagaaactgggcaatattcattagcgtctccttatgcggccgccgggggacgttttgcgcaagatggcgcaaaaaagcaaccggatcggcggcgtttcctgcctgtaataaatagtgcaacagcgtcttaagctgcctgcggctagtgtatcccagcgccaggagcctgaccagctgctcatgcaggtccatcaaatcccgctggcgaatatgcttctgcagcagctccagcatcgccacgcgccggtggcgcatgatttcatcgtccggggtgctagtgatatcaattaagggaaaatcttcaccatagatccgccgcgcgatgtccggatcggcaaagcctgccagccagcacatcgggtaaggccagggagaaacgcgaccatgataaaacagcagcgggatcaccagcggcagctgcgtatgccctttatccagatgacgctgcatcgcggctatcgcatagcgcatcaggcgaaatgccatatggcggtccgccgagctttggtgctctatcaacagatagatatagccctcccccgcctgcgtttgcagcgagtaaaggatatcggaatgactcgcccgcagttcgtcgtcgataaagctcccggactccagccgcagcgtgttcagattacataacgcgcgcagcggtgcgggaaggtgaatgtccagaaaatccctggccgtcgcccgatgcgacagcaggtgtttaaatacagcatcgtggggggaattcgtcgccctttccatggcggtgctccatacaatcattttcgcttaacgtagcactcaacaagacctgaactgtatttcgcttgcagtttaccgaggcggctcgcaaactatttcaccagcataccgccccatccctctgcaggagaaaacccatgcgccaaaggacgattgtttgcccgctgatcgagaatgaaggccattatctgctttgcaaaatggccgccgaccgcggggtttttcccgggcaatgggccttatccggcggcggcgtggagccaggggaacgtattgaagaggcgctgcggcgggaaatacgcgaagagctcggcgaaaaactcatccttacccatatcgcgccatggtgctttcgcgacgatacccgcgtcaaaacctaccccgacgggcatcaggaaacgatctacatgatctatctcatcttcgactgcgtgagcgccaatcgcgatgtgacgatcaacgaggagtttgacgattacgcctgggtcaaagccgaagatctcaaaaactacgatcttaatgccgccacccgcgttactctcagcctgaaagggctactttagtccagcataccgcgttcaacccacccggcgttatgccgcgggataatgcgggtggctacgatacggtcgcatgcgtctgctgcctgacccactcgcacagcgcccggcgcgaaatcttaatcccgccgttttttaacgtttccggcaaccgcagccaacgcaccggctgctgaaaacgcgctaaccgctcagcgctccatgccgccagcgcgctcaactcgcagccgtcatcgcattccaccaccgctaccgggcgctggccatattccgcatcatccagcggcacgataaacacctgctgtacctgtggatgggcgagtatcacacgctcgacctcttccggttgaataccttctccaccgctaaaaaagaggttatccattcgcccaacacccgtcagccgaccgttatgcaatgctccgcgatcgcgcgtcgcaaaccagccttcattgttggttaatgacaacaattgaccatcccgccagtagcctgcggccatactcgacgcccgcagccagatctcgccggcgactattttcacctctcgccccggcagcgcttcgccaacatccgcagcgccgtcggcctctttggcacacacggtggaggcgaattcggtgaggccatagccgcagaagctgcgtatgccctgctttcgcgcccgttcagtcaattcgaccgggatcgacgcgccgccgagcagcaccgccttgagggaaaccgcagcatcatcattcagcaggcgccatagctgagtcggcaccagcgaagcatgggtacagccgtgcagcatctgcgccagcggctgtttgtcacgtaccgtgagtcgcgcgccggccagcagccagcgccagacgatcccctgaccggagacatggaacaacggcagcgacagcagccagtcatctcctgcggcaaacggcatcagcgccagcacgccagccgcgctggccagatgggcgttggcgctatgtaccgccgctttcggcaggccggttgaaccggaggtcaacgtcatcgacagcaaccgatcgccatgccagcaagcagcatgctcgccctcgaccaactgcagggttaacatcggtaaattccccggcaacacatcgccattcagcaccagctgatgctgcatggttaacgcgggtaacaacgcctgcagcaacaccgctggcagctgcggattcagcggcagcacccgcgccccgcactgtagcagcgccagccatgccagcagagtttccggctggttataggcccggagcgccacgccctgcccttccattacgccctgcgcggcaaaaccagacgccagcgcgtcaacccgcgcgcatagctcccgccaggtcagcggctggttattcagacgtaaggcgagggcctctccgcgccgctgacgccaatgccgccagggccagtcgttaaaggtcacagcagcggctccagcgcatcaatgttgagcaccggcagcgcactttcgggccacggccgtaccagctgggcgcccatcagcgacagcgtatccagcccaggaatagtctgcggcgtcagccaggcggcaatccgcgccagctgggtcaagccgaggctggactcgatcgacgagctgatcactacgctcaaccccagcgcatgcgccgcggcgacctgttgctgcaccttctgcaaactgccggttagcgtcggtttgatcaccaccgcacgtacgcccggctcggcgacaaagcggaaatccgcctcgcgcaggctttcatcccaggcgatagcgatccctgtctcgcggctaaaggcccgagaatcctcccgcgttttgcaaggttcttcaagaaaagcaatgcgctggcggtacgccggattaacgtatttggcgaactgttgcgctttgagcggcgtccaggcgcggttggcatcgagccgcagctgcaggtcggggatcgcctccagcagcagattgaccaccataccgtcgcggaccgcctcccagaggccaactttgaccttagcgaccttctcgccgggcatcgccgccagtctggcgaatagctcatccggatcgccggagcagagcggcgccgcgcgataatccgcggcctgcggtagttcgccgccaagctccgcctgcgcgcagctgatgccaaacgcgacggagggctgcgtgggaagcggcggctcggcgccgtcgcgccaggcctgtgcccacgctaacagcgccatttgcgcctcttccagcgtctcgacactgaatcccggcaggggagaaatttcgccccagccttcgcgttcaccctcctgcaggcggatgaacagcccgtcgcgggtttttaaccgccgctcgcgcagcaccacgcccgcgtccatcggtatctgccagcggtaaacctgcgaaacgcgcattatggattccgtttaaatttgctgaagtccggctgacgtttctggttgaaggcgttgcgtccttcctgcccctcttccgtcatatagaacagcatggtggcgttgcccgccagctcctgcagaccagcctggccgtcgcagtcggcgttcagcgccgctttcaggcagcgcaaggccatcgggctgttctgcagcatttcacgacaccagcgcacggtctctttttccagatccgccagcggtaccacggtattcaccagccccatgtccagcgcctgctgagcgtcatactggcggcacaggaaccagatttcgcgcgcttttttctgcccgacgatccgcgccatataggaggcgccccagccgccgtcgaaagagccgacttttggcccggtctggccgaagatggcgttttccgccgcgatagtcagatcgcacatcatatgcagcacgtgaccgccgccgatagagtagccggccaccatcgccaccaccggttttggacaggtgcggatctgacgctggaagtcgagcacgttaagatgatgaacgccggagtcgtcctgatagccgccgtagtcgccgcggactttctggtcgccgccggcgcagaaggctttctcaccttcaccggtcagcacgatgacgccgatattgtcgtcataccgggcatccgccagcgcctgaatcatctctttgacggtcagcgggcggaaggcgttgcgcacctgcggacgattaatggtgattttggcaatcccgtcagtcgatttgtgatagcgaatatcggtatagccttcggagcaatcgtgccattcaacgggggcgtagagcattgcttcatcaagagagatcatagaatgtccttcagttaacttgccagaatctgcgccagacaggcaatcaccgccgccgggttgtcccggtgcgcgttgtgtccggcatggtgaataagatggagatccgccgcgagcgtctgcgcgatggcgcgaaacttcgcgtcgcgctcgccgcacaggtagtgaaaaggaaaatcgcgcgcctgcagagacgcgcgcagatcggcctgcgcggcaagggaggttgcctgcagcatcgccgccagcatcgcgccgttgttccggctgcgtaaggcgaccaatgactcacgctgcgcggcattcagcgaagcgaagaccggctgctgataccagtcggcaaagacctgctcaagcggctcgcggcgaaaacgttccgcccaggcgcggtcattgctgcgccgcgcctgccgcgcctctgcatcctgcaggcccggatggccgccttcaacgatcagcccgcgcatgcctgcgcgcgcatggctggcgaagttcattgccacccggccgcccagcgagtagccgatcagccaatacttatgtatgttgtaactattaaacatagactgcagcagagtattgaccccggcaaagtcctgcaccgcgatatccgcggagccgccgtgccccggcagatcgaggtacagccgcggccaggcgggaaaggcgtcgcccactttccgccactcgttgcggtcgccggaaaaaccgtgcagaaacaccagccagggatagcccggctggccgttgtcgacagcagcgctgaggatcacaggcgacttacctgcgccagcagctgctggagggtctgcgcgccgtcggtctcattgaccgccagctcaatcaccgtcgcccctgccctgcgccaggcgccggccagcgcctcatccagcgacggccagtcatcagggcgatgataggccaggccgaacatcgccgccgcgtggctgaaatccacgtcctgcggcattaaatagaactgacggcgttcgtcctgcggcgtcggcagcatagaaaaaatctgcccgccgttgttattcaccacgatcagcaccagcggcgccgacgcctggcgcagcagggccagcgagttgagatcgtagagcgcggagagatcgccaacgatggccagcgtcggtcgggcgctggcgcgctgcacgccggccgcagtggcgatcaggccatcgatgccgctggcgccgcggttgctgtagaccggatacccggccggtagctgcgccagggcgtcgatcaggcgcaccaccaggctgttgccaacaaacaattggccctgctccggcagatagccccgaatacgctgcgccagctgcgcttcgccaaaaggctcgttgctggcgactgcagcctgccacgcctgcccggcaagctgtgggatcaccgtcgcccacggctggcgtttctccgccggatgtaattcgagccagcgctcaacgcttgagagcagacggcgaccgcggtgctgcgccgggtcgaggcgaccgggcagattatccaccagccagtattcatccggctcgcaggtcgcctgccactggagcacgcgtttgccggtcaggctgctgccgagttgcacgacgatctgcgcctgcgccagctcgctgaccgctttgccgttgcccagccacaggtcggcgcacggcagcggctgcccggtctgcgacaggacatcgccgatcagcggccagccgagggtctgcgcccactcagcgacctttttcccttccgcggcgctcattctgcccgccacgacgacgccgcgtttttgtcgccagaagaaccagtcgcgctgcttctcgctctctaactgcagcgcctggcgcagccagggtttgtcgctctgccaccagttgccgagctgctgctgccactccacgccggtctcatccatatcaccatacagcggttcagcgaacggacagttaatatgcaccccgccggcgtgcagcgcgcccagcgcctggtcgatggttgagaccagccagcgggcaggaatatcctgcgagggacgcggcaaagaaatcgtctgcgcaggatgggaggcaaacatccccggctggcggatagcctggttcgcgccgcagtcgatcagctccggcggacggtcggcggttaacaggatcagcttttcaccggtgagccctgcctcaatcagcgccggatagaggtttgcggtggcggtcccggaggtgactatcaccgccaccggctgccggctggccttcgccagtccgagcgccaggtggccgaggccgcgttcgtcgaaatgggtatgatggataaaggcgcggttttccgccgccgccagggttaagggtgtcgagcgtgagcccggcgcgatgcagatatgctgcacgccatggcgcgttaaagcttccaggatcaccgccgcccagcgtcggttaaatgcgcttactgacatgaaattgtccggtatcaaatattgatgctaagtatagataaggcaaagtgacgtcgttttgatatgcatcgtcattcaagctttatggacacagcagcgagcgcagcccggccgctttgttgtcaatctcctgccactcctgctgtgcatcagagccgctgacgatccccgccccggcatacagccgcagggtgtcgtggttcactttcgccgaacgcagcgccacgcaaaactcgctttgcgccagtgacagatacccggcggacccggcgtaccattcgcgggaaaacggttcatgacgctgaatgaacgccagcgccgcccggcgcggcaggccggccaccgcggcggtgggctgcagctgcagcagacagcggctgtcgtcaggcgccgccagctcggtccagatgcagcgtcggagatgctgcaccttacgcagcctcaccacctgcggcggcaggacgtccagcgtcgaggcctcactctgcaggcgctggcagatatcctctaccaccagcatgttttcccgctggtttttgtcgtctttcatcaaccagtcggccagttgctgcgccttcgcgtcttcctgatggttcgcgacggtccccgccagcgcttcggtgcgcagcagcgcgccgcgccggcgccacagccgttccggcgtggagccgaaaaatgcctgccgggcattgaacgccatcaggaaatgaaaacagttaagattgctgcgccggctagccgccatgatgctcatggcgtccagcggggcggcaaactgcaggtcggttgcccgcgccagcactactttatccatttcaccggcgctgatcgccttagtcgcccgcgcaatcattgcctgccattgaggatagtcggatgagtggcgctcgctcagcaacggcggtatggcaccgggagtcgcctgagtggttgtcaggctggcgagaaacgcgcgggccgtcgcggcatcctcacgcagggagatatcactatgcagcaccagccgcagcacggccctgccgccgcaccggcgccactccagacgcggcagcgccaggctgccctgctgcggttcaaacgcattcaggccgcagatacgcagatcctgccggccggcctggcgtaaaaagcggttcgccgcgtcgagcgagaaaaaggtttttaccgcccccagcgtcgccagttcctcatcgccattgcgctgctgccagtaaaactgcggccattgcgcctgctggccgcaccatagtagcggatcgaaggcatcattcagcggaaaggcaacatcgataattcgcgtgccgggcgagtctggaaaagactcgcccaggccgtcttgcaaacgggccagcgcagtggaaacagacagcacgcaaacctccacggtagtaaaaccccacattataaggggttcgacggcggaatagcagtacccatgatgagggagcgggttttatcttacccgctcgccgggtcagagcagcgtctggacgagggggcagaggagtcagacagcgcgcttttctcgcgccatgccaatatgggggatgccatcctcatcatagacctcggtcaccggcgtaaaaccaaagtgggcgtaaaaggattgcaggtgcgcctgcgccccgaggtaaatcgccttttgcggccagtgctgctgacagctggccagcgcctgctccatcagctgatagccaagcctctcaccgcgggcggccgtgctgacgataacccggccaatcaccaccggcgcaaactcctcttcgcttttgaggatccgcgcgtaggccaccagttcgccatcgcgccagccgagcagatggcgattttcaccaaccaaatcatcgccgtcgacatcctgatagacgcactgctgctctacgacaaagacttcactgcgcaatttcagcagcgcatacagctggggaacggtgagttcactatggtggagatcctgccaggtcatcatctgctgctccttattgatatactgatactttgcgactcgccctgaggacactggacgatggaattaacttttttggggacatccgccggggtgccgacccgcacgcgtaatatgacgtcgataatactgaatttgcaacagccgacccgcgctgaaatgtggttgtttgactgcggcgaagggacccagcatcagtttcttcacacgccctaccatcccggcaaactgaataagatttttattacccatctgcacggcgaccacctgttcggcctgcccggcctgctgtgcagccgctcgatgcagggaaactccctgcccctcaccctctacgggccaaaaggactcaaagagtttgttgagaccgcgctgcgcctgagcggttcgtggaccgactatccgctcaccatcatcgaagtcggccctggtctggtgttcgacgaagagggctatcgggtcaccgcgtatccgctcagccatccggtggagtgctatgggtatcgcattgcgcagcatgacaagcccggcaccctcgacgccgcccagctgattgccgatggcgtgcctcccgggccgctgttccatcaactcaagcgcggacagcgcgtcacgctggcagatggccgggtcatcgacggcagccgctatctggggccagcgaccccgggtaaaacgctgaccatcttcggcgataccgccccctgcccgcaggcgctggagatggctcgcggggcggatgtaatggtccacgaaaccacccttgagcaggcgatggcggagaaagccaatagccgcggccactcttccagtcagcagaccgcggcgcttgccaaagaagcgggggtcggtacgctgatcgccacccactttagctcgcgctacgatgccgaaggctgtctgcgtatgctggcggaatgccgggagattttccctaacacgctgctggcggaagactttatggtctacaagatggcgtaaaatccgggcataaaaaaaccgccatcccggcggttttttattgagtcaatcaacttacatcagcggcgtcgccagctgcacgatgctaatcagcggctgcggccagataccgagcaccagcaccagcagcgcggagatcagcaccacgataccgccggcgctgtactgccagtttgacggcgcatcgcgattcagttgctccggcgcgctcaggtacaggctgacggccacgcgcaggtagtagtagagaccgatcgccgagccgacaaccaccgcggcaaccagccaccacagatgcgcatgcacaccgacggccagcacgtagaacttaccgataaagccgagggtcatcgggatgccggccagggagagcatcatcaccgtcatcacagccgacaggatcggacggtgccagaacaggccgcggtaggagaacagcgagtcagcatccgggccgcggtacgggctggacatcaggctgaccacgccgaacgcgccgaggctgctgaacaggtaaccggccaggtaaacgcccacggcttccatcgacatttcaccgctctgcagggcaatcagcgccaccagcagatagccgagatgggagatggaagagtaaccgagcaggcgcttaatgttggtctggctcagcgccatcaggttaccgaagatgatagaggcgaaggcgatcaggcccagcaccacgcgtaccgcttcgctgttgcccaccggcatgtacaggaacagacgcatcactacgccgaagatagcgatcttgctggcggtcgccaggaaggtggagaccggcgcaggcgccccctggtaaacgtccggcgtccacaggtggaacggcaccagcgacagtttaaagccaagaccgacaatcatcaggccaagacccgccagcagcagcggctcgtgcagcatgttgtccgccaggcttttgcccagcgcgaggaaggacaggttgccggagttcgcatacaccagcgccataccgaacagcaggaaggacgaagctgccgcggagaggatggtgtatttgatgctcgcttccagcgaacgcttctggcggaaggcgtaaccaaccaggccgaacagcggcagcgaaatcagctcaataccgaggaacagcgccgccagatgattcgcaccggccagcagaatgccgcccagggcggcgatcagcaccagcaggtagaactcttctttgttgtccttgtaaccctcaagccacgggtaggcaaaagtacaggtcgcgaggctcgccagcagcaccagaccggtgtaaagcatggcgtagccgtcaacgcggatcagcggcgtgacgtccatcgccccgttctggccgacgaaccagagcgagaccagcgcggcgttaagtccaagaaccgacagcgtggcattgagaaaatgattgcgtcgccacgcaatggagagcatcacaaccaccaccgtcaagccgacgatcagcagcggtagcagtgcgatcagttgttgtggagttattgtcatggcgaattacggccttgtagtagaaacagaattaacaaaccactgctgaatgttgctcatcgcagcatgcgaggtgtcgaggatcggctgcgggaagaagcccaacagcaccagcagcaccaccagcagcaggatgatagacagttcacgcagggacatccccggcaactctttcgccgccacttcgctcttcgctttaccgaagtaagcgcgatgtaacatcgacagcgagtaaacggacgcgaataccagaccaaaggtggagatgacggtgatcgtcggcaccactttatagctgccgaacaggatcataaattcgccgacgaagttaccggtgcccggcatccccagagtggcgaccgcgaagaacatcgacatcgccggcagccatttaattttgctccacagaccgcccatttggcgcatatcgcgggtgtgcagacgttcgtacagctggccgcagagaataaacagacccgccgcggacagaccgtgagcaatcatctggatcaccgctccctgataggccagctggctgccggtgtagatagcaatcagcacgaagcccatgtgggacacggaggtgtaggcgatcaggcgtttaatatcggtctgggcgaaggccatccacgcgccgtagaagataccgatcacgcccagccacatagcgatgggcgcaaactcggcggaggcattcgggaacagcggcagcgcaaagcgcagcagaccgtaggcggcggttttcagcaggatccccgcgaggtcgacagagccggcggtcggcgcctgggagtgagcgtccggcagccagccgtgcagcggcaccaccggcattttcaccgcgaaggcgatgaagaagccgagcatcagcaggtattccacgccgtgagacattggggttttcagcagatcttcatagttgaaggtccacacgccggtggcgttgaagtggacgaaggccagcgccagaatggcaatcagcatcaccaggccgctcgcctgggtatagatgaagaacttggtggccgctgtgatgcgcgttttaccgtccgaggctttgtggccccacagcgcgatcaggaagtacatcggcaccaacatcatttcccagaagaagaagaacaggaacatgtcgatggcgaggaacacgccgataacgccgcccaggatccacatcaggttgaggtggaagaagccctggtatttttcgatttcacgccacgaacagagcaccgccagcacgccgaggagaccggtcagcaccaccatcagcagcgacaggccgtcgatcgccagatggatgctaatgccgaagcgtgggatccacggcagcacgaattccgactgccattgcggaatacccgcggattgcgtcagagaatagccgccctgcatccacagctgcaggccaagcaccagcgtcagtcccatggtaatcagcgcgatccagcgcggcactttcacgccaaagcgttcggtctggcagcacaggaagccgccgataaagggaattaatattagccagggtagtaacatggcgatttttattccttgttaaagtcccgttcaggaccgattttcaacgaattcgactacattcacgtttgagtgcggtttgttgtgtcgggtggcgcttcgcttacccgacctacggtctcgtaggcccggtaagcgaagcgccaccgggcaaaaccgcgcgatcaaatcaacgcaataccatcagcagcgccagcaccaccaccgcgccgatgctcattgaagccacataccagcgcagataaccgttctcgctcaccagcaggcctttgcctgcgaagcgggaaaggatcgccgggatattcatcaacgagttcagcggatcgcgtttcagcagccaggcaataccgaggaatggttttacgaacaccttgtcgtataaccagtcgaagccccaggcatggaaccaccaggtaccgaagaagcggccaggcgcactgttggcgatggaggtcaccagcgtgcgtttgcccagccacagccatgcagcgatcagaatcccggcaatggcgatgatcccggaggcaatctccagcgtcatcacgctaccgtgggcgagctcagtggtctgcggcagtacgccctccagcggcggcacaatcagcgcgccaacgaaggtggatagtaccagcagcacaatcagcggcagatgatgggtaatccccttccctgcgtgcgcgtgaatttgctctttaccgtggaatacgatgaaaatcatccggaaggtgtacagcgaggtcataaaggcgccgaccaggcctgccaccatcagattgatatggccattggccatcgcgcctgccagaatctcatccttactgaagaagcctgcggtgataagcggcagtgcggacagcgccgcgccccccaccaggaagcagacgtataccagcggaatcgatttgcgcaggccgcccatcttgaagatgttctgttcgtgatggcaggccagaatgaccgaaccagacgacaggaacagcagcgctttaaagaacgcgtgagtcatcaggtggaaaatcgccgcgtcccatgcctgcacgcccagcgcgaggaacatgtagccaatctggctcatggtagagtaggcgagaacgcgtttgatatcggtctgcaccagcgcggcgaagcccgccaacaccagggtgaccgccccgacgataccgaccagatgcagcacttccggcgtcatcaggaacaggccgtgggtacgggcgatcagatagacgcccgcggtgaccatggtcgcggcgtggatcagcgcagagaccggcgtcggacccgccatcgcatcggcaagccacgtttgcagcggcagctgggcggatttaccgaccgcgccgccaagcagcatcagcgtcgcccactgcagcgtggtgctgccgttagcgaagtgctgcggcgccagctccaccatttcgcggaagttcagggtgcccagttcgttataaagaatgaacagcgcgaaggcgaggaacacgtcgccgacgcgggtcaccacaaacgctttcatcgctgcggcgccgttcttcggatcggtgtagtagaaaccgatcagcaggtaagaacagaggcccacgccttcccaaccgaggtacatcagcagcaggttatcggccagtaccagaaccaccatgctggcgataaaccggttggtataggcgaagaagcgggaatatccctcttcaccgcgcatgtaccaggaggcgaacatgtggatcaggaagccgacgccggtaactacggagagcatggtcagcgacaggccgtccaacaccaggttgaagccgatgttgaaatcaccgaccgacatccaggtccacagcggcacgctgaccgcctgtttgccgttagcgaaaaagtcgacgccaacgtacgcggtgaccagcgccgccaggcctaccgagcccatgccaacggcggcggaaagattttccgaccagcgcccgcgggagaaggccagcagcacaaagccaatcaatggcaaaagaatggttaaggcaagcatgttcatccacgcaactcacttactgaatcgatgttcaggttctggcggcgacgatggagctgcagcagcagcgccaggccgatactcgcttccgcagccgcgaggctgatggcgaggatatacattatctgaccatctgcctgaccccagtagctacccgccaccacaaaggccagcgcggcggcgttaatcatgatttccaggctaatcaacataaacagcagattgcggcggatcaccagccccgtcagaccaagcacaaacaggatggccgcgaggatcagtccatgtgttaaggggatcatgcgtgttcctccgtttttcgtttgtcgctgtcgttcagacggttgctcagcacctcgccggcgcgctcttcgcggccaatgtggaaggcaaccaccaggcccgccagcagcagcatggaggccagctccaccgccaggacgtacggcccaaacagcgcaatgcccacttctttggcgttaatcgccgcaccgtcgataccctggtcgttaatgcccaggatggcgtaaacgataaccaccagcagcaccgcggagaggatggccgggccaatccagatccccggctgcagccacttgcgctcctgttcgatctcggtgccgcccaggttgagcatcatcaccacgaagacgaacagcaccataatggctccggcgtagacgatgatttccagcgctccggcgaagtacgcgcccagcgagaagaacaccccggcaatcgccagcagcgaaataatcaggtacagcagcgcatgcaccggattggtgtgggtgacgacccgcaaggttgcgaggatggctatcaggccacagatataaaaagcgaattccattgcccctctccttacggtaacaggctcttgacgtcgattggcttagcttcattttccgcttcgcccttatctttgccgtcgattgccatacccgccatccggtagaagttatattccgggtatttgcccggaccggaaatcagcagatcctctttttcgtacaccagatcctgacgcttgtattcacccagctcgaagtccggggtcaactggatcgccgtggtcgggcacgcttcttcgcacaggccgcagaagatgcagcgtgagaagttgatgcggaagaactccggataccagcggccgtctaccgtctctgctttctgcagcgagatacagcccaccgggcaggctaccgcacacaggttacaggcgacgcagcgctctgcaccgtccggatcgcgggtcagcacgatgcggccgcgatagcgcggcggcaggtagaccggctcttccggatacatccgggtttcacgtttggcgaaggcatgcaggccaatcatccagatactacggacctgggtgccgaaccccaccaataattcttttaaggtcatgttcaattcaccccttattgcgcctgccagagaatgacagccgccgttaccaacaagttgaccagcgttaacggcaggcataccttccagccaaaggacattacctggtcatagcgcggacgcggtaatgatgcgcggatcaaaatgaacatcatcatgaagaacgcggttttcagcgcgaaccagatgaaaggaggtaaccacgggccattccagccgccgaagaacagcgtgacgatcagcgctgaaacggtgacgataccgatgtattccccgacgaagaacagaccgaatttcatgccggaatattcaatgtggtaaccatcggccagttcctgctccgcttccggctggtcgaacgggtgacggtgacacaccgccacgccggcgatggcgaaagtcacgaagccgaagaactgcgggataacgttccacagatgcgcctggttattgacgatatcggtcatattgaatgaccccgcctgcgccaccacgcccatcagggagagaccgagaaatacctcgtagctcagggtctgcgcggaagcacgcatcgcccccagcagcgagtatttgttattgctcgaccaaccggcgaacagcaccgcgtagaccgccaggccagccatcatcaggaagaagaggatgccgatgttcaggtcggccaccacccacgtcgggctaaccggcacgatagcgaaggccagcagcagcgaggtaaaggcgataaccggcgccagagtaaagatcacgcgatcggagaagcgcgggatccagtcctctttaaagaacatcttgatcatgtcggcgaccagctgcagcgaaccgccccagccgacgcggttaggtccgtagcggttctggaacaagccgagcagacgacgctcgccgaagctcatgaacgcgccgcaggtgacaaccaccagcagaatgaccacggccttcaggatgcttaacagaatgtcgataagatccggcgttaaccagctcatgctttcgcctcctgcagtgaatcaatacgcgatccggtcagcaccggcgcaatgcccggcatgcccatcggtaagccaacctgtcccgcggtcaggccttcagagataaccagcggcagacgcagggtctggccttccacgctaaaggagagcattgcgcctgggttgacgccaagcttcgcggcatccgccgggttcagcttgatgtacggctcaggcatccggctctggaacaccggcgcgcgctgagacagctcatcgctgccgaacagatggtagtacggcgcaattcgccatttgccctcttccgcctggaagctggccggcaccgccgtgaagtactccagtccgctggcggacgcttcaaacagacgaacgcccggatcgccgtggcgcagtttcccgcccacttcatcctggaacttgttccatgcctgcggggagttccagcccggcgcccaggcgaacgggatctgcgaacgcggggcggacggctggttgttcccttccatggagaaggcgaacatcgtgtctttatcctgcggctgacgcggctcgtgcacgctgatgttagcgcgcatcgccgtgcggccgctgtagcggtgcggttcacgcgccagcttctggccgcggatgcggaaggtcgcatccggcgcggcgtctttaatgcccgccagctgcggcagcgccgcaatcgccgcatcaatgacgtggtccagctgagtccagtcaacctgacggttgttgacggtgctgtgcagcgaatgcagccagcgccagctttccagcattacggttttcgcgtcgtagtaagccggatcgtaaacctggaagaaacgttgggcgcggccttcgttgttcaccacggtaccgtcgctttccgcaaagcttgccgcggagagcaccaggtgcgctttgtccataatcgcggtgcgctgatgatccaccaccatcaccagcggcgctttcgccagcgcagcgtcaacgcgcgcggcggaagcatgacggtgaaggtcgttttccagcacgataaccgcgtctgcggcgccgctttccagttcgtccagcgcctcttcaagcgagccgccgccgatcatgcccagtccgacgctgttaaccgcccgggcgaccatggtcaccccgacatcggcgccgcggcctttcagagctttcgccacgttagcggcggcctggatgatctccatgctgcctgcgttggtcccggagatgatcagcggttttttcgccccggccagcgcctgaacgataacgtcgactttaccctgcaggtcctggctcaggccgtcaaccgccggcgcgctgtcgtccagcgcatgggcaatagcaaagccgagacgcgcctgatcttctaccggcgcgcggtaggtccacgccgcgatgtcatccaggcgggtgtcatcgacgttggtgacgaatagcgggtgcttggcgcgctggccgatgttgaggatcgcggcgatctgccagtcggccactttctgcgccgccgccatttcgcgtgctttccctttcactgcctggcgtaccgccagggccacgcgcgcgccggtctgggtaatgtcttcgcccagcaccagtaccgcatcgtaggattcgatatcgcgcaggcttggcgtgtggatcccgccctcgcgcagcactttcagcatcatctgcaggcgcgcttgttcgcctttggcgataccggtatagaagttgtcggcgcccaccagctcgcgcagcgcgaagttgctttcaatgctggcgcgcggggagccgatgccgatcactttcttcgactggcgcaggatatccgccgccccctgcatcgcctgctcggcgttaagggtgatcagatcgtcgccgcggcgctgtaccggctgacgcggacggtctttcaggttcacgtagccatagccgaaacgaccgcggtcgcagaggaagtagcggttcacggtaccgttatagcggttttcgatacgacgcaactcgccatagcgttcgcccgggctgatgttacagccgatggaacactgctggcagatgctcggcgcaaactgcatgtcccacttacggttatagcgctcggagtgggttttgtcggtgaaaacgccggtcgggcagacttccaccaggttgccggagaactcgctctccagggtgccatcttccgggcggccgaagtagacgttgtcgtgcgcgccatagacgcccagatcggtgccgtcggcataatctttgtagtagcgcacgcagcggtagcaggcgatgcagcggttcatttcgtgcgaaataaacggccccagatcctgattgcggtgggtacgcttggtgaaacgatagcggcggaagctatgaccggtcatcaccgtcatatcctgcaggtggcagttgccgccctcttcgcagaccgggcagtcgtgcgggtggttagtcatcaaccactccaccacgctttcgcggaactgcttcgcttcgctgtcgtcgatagaaataaaggtgccgtcggatgccggagtcatacaggacatcaccaggcgaccacgcgtgtcttccgcgttctgatattgcttcaccgcacactggcggcaagcaccgacgctccctagcgccgggtgccagcaaaagtagggaatatcaagaccaagagagagacaagcctctagcaggttgtccgccccgttgacctcgtattctttgccgtctacatgaatcgtagccatttgcgtgcttccaaaaataaaaaacctttagattaccagcgcgtcttaagcaggttcggctgaatcccgttgattgcatgggtattgctgaactgctgcttaatgccagcctcgaattcttcgcggaaatatttaatcgcgctctgtagcggctcgaccgcacccggcgcgtgcgcgcagaaggttttacccgggcccaggaatcgacacagttgctcaagggtttcgatatcgccaggctggccttcgccgcgctccagggcgcgcaggatcttcacgctccacggcagaccatcgcggcacggcgtacaccagccgcaggactcgcgggcaaagaactcttcaaggttacgcaccagcgagaccatgttgatctcgtggtcaacggccatcgccagcgaggtgcccagacggctgcccgctttaccaatgctttcgaattccatcggcagatcgaggtgcgcttcggtgaggaagtcggtccctgctccgcccggttgccaggctttaaacttcaggccatcgcgcataccgccggcgtaatcttcgaggatctcgcgggcagtggtgccgaacggcagctcccagacgcccggattcttcacccggccggagaagcccatcagcttggtgccagcatctttgctggtggaaatgttctggtaccactcgacgccgttggcgaggatcgctggcacgttgcacagggtttctacgttgttgacgcaggtcggcttgccccagacgccggagctcgccgggaacggcggcttggatcgcgggttggcgcggcggccttccagagagttgatcagcgccgtctcttcgccgcagatatagcgccctgccccggtgtgcacgaacagctcgaagtcaaacccggtgccgaggatgtttttccccaacagacccgcttcggtggcttcagcaatcgcgcgacgcagatgctgggccgcttcaatatattctccgcgcaggaagatgtagccgcggtacgctttcagcgcaaacgcggagatcagcatgccttccaccagcaggtgcggcagctgctccatcagcaggcggtctttataggtgcccggctccatttcatcggcgttacacagcaggtaacggatgttcatggattcgtctttcggcatcaggctccacttcagaccagtagagaagcccgcgccgccgcgccctttcaggccagcgtcttttaccgccgtgacaatctcatccggggccatcccggtcagggctttacgcgccccttcatagccatttttactgcgatactcgtccagccacaccggctgcttgtcgtcgcgcaggcgccaggtgagcggatgcgtttccgcagtacgaattacggttttcatttgtactgctccagcaggtcaggaattgcctccggcgtcagatggctgtgagtatcctcatcaatcatcatggtcggtcccttgtcgcagttacccaggcagcaggtcggcagcagggtaaagcggccatcaaaggtggtctgccccggcttgatattcagtttcttctcaatggcggcctgaataccctgatagccggtgatgtggcataccacgctgtcgcagtagcggatcacgtgacggccaaccggctggcggaaaatctggctgtagaacgtcgccacgccttccacgtcgctggccgggatccccagcacatcggcgatagcgtagatcgcgccatccggcacccagccgcgctgtttctgaacgattttcagcgcttcgatggacgccgcacgcgggtcttcgtagtggtgcttctcgtgctcaatagcctcacgctctgccgcactcagctcaaaagcctcggtttgtggttgttgattctcgtgcataattagcggtccacgtctgacataacaaaatcgatactacccagatagacgatcaggtcggataccaggctgccgcggatcgccgacgggatctgctgcaggtgcgcaaagctcggcgtacgcacgcgggtgcggtagctcatggtgctgccgtcgctggtcaggtagtaactgttgatccctttggtcgcctcaatcatctggaaagattcgttggccggcatcaccgggccccacgatacctgcaggaagtgggtgatcagggtttcgatatgctgcagcgtgcgctctttcggcggcggcgtggtcagcgggtgatccgctttgaacgggccttccggcatgttatcgaggcactgctgaagaatgcgcagactctggcgcagctcttctactttcagcatcacgcgggtgtagcagtctgagacgccccccccggtcgggacttcgaagtcgaagttttcatagccagagtaaggacgccatttacgcacgtcgaagtcgataccggtggcgcgcaggcctgcgccggtggtgccccactccagcgcctctttggcggtataggctgccacgccgacggaacggcctttcagaatggtgttgcgcagggcggccttctcataggagtccagacgcttcggcatccactcgaggaactcacgcagcaggcgatcccagccacgcggcagatcgtgcgcgacgccgccgatgcggaaccacgccgggtgcatacggaacccggtaatcgcttccaccagatcgtaaattttctgccgatcggtaaaggcgaagaagaccggcgtcatcgcgccgacgtcctgaataaaggtcgagatatacagcaggtggctgttgatgcggaacagctcggagagcatcacgcggatcacgttcacgcgatccggtacggtgatcccagccagtttttccaccgccagcacgtacggcatctcgttgacgcagccgccgagatattcaatacggtcggtatacgggatgtagctgtgccaggactgacgctcgcccatcttctcggcgccgcggtggtgataaccgatatccggtacgcagtcgacgatctcttcgccgtccagctgcagaataatgcggaacgcaccatgcgccgatgggtggttcggaccgaggttgaggaacatgaagtcctcgttgtcggtgccgcgcttcatgccccactcttccggtttaaaggtcagcgcctccatctccagatcctgtttggctttggccagctcaaacgggtcgaactcggtggcacgcgccggataatctttacgcagcgggtgaccttcccaggtcggcggcatcatgatgcgacgcaggttcgggtgaccatcgaaggtaatgccaaacatttcccaggtttcacgctcataccagttggcgttggggaacagtttggtgaaggtcggcagatgcagatcgttttccgacagcgccaccttgagcatgatgtcgcggttgcgatcgatggagatcaggtgatagaaaacggaaaaatccgcggcgggcaggccatcgcggtgcgtgcgcagacgttcgtccatgccgtgcaggtcaaacagcatcacgtaaggcttcggcaatttcttcaggaaatcacccacctccagcagctgttcacgcttaacccataccaccggtacgccggtacgggttggctgaacggtaaaggcatccggcccaaagcggttgcgcagttcgccaatcaccgggtcatcaaggtgatcgcgggtttgccaggctggtgcggcgtcatgcgcggttaaatcggtcatattgttcaccattgcaaaaggtccgtggtgactgccggcgagacttcgcgctgttgtagattgatttgcgaagtggttctcccgcccgcaggcgcaaattaaatctcgtccggcgtccgcagattggtcactgcaatacgttcgccgcgtttacgctcgcgttccgactgcatattggcgcgataaacgccctgatcgccaaccacccatgagagcggacgacgttctttaccaatggactcctgcagcagcatcagcgcctgcatataggcctccggacgcggcgggcagcccgggatgtacacatcgaccggaatgaatttatccacgccctggacgacggaatagatgtcgtacatcccgcctgagttggcgcaggcgcccatggagatcacccacttcggctccagcatctgatcgtagagacgctgaataaccggcgccattttggtaaagcaggttcccgcgaccaccatcaggtccgcctgacgcggagaggcgcgcagaacttctgccccaaaacgcgcaacgtcatgcaccgcagtgaatgacgtcaccatttccacataacagcaagaaaggccgaagttgtacggccaaattgagttcttacggccccagttcaccatgtcatgcagcgcgtgttcgagtttccccatatacacgcttttattgacttcctgctccagaggatcggtaacgatctcctgtttctgcaggggataacggtcgttctcaccgttaggatctatgcgggtgagcgtataatccatcttattgcctcgcttttactgcatatgacggttagtgggactgtctgtttccgggttaaccagcgtgcgacgggaacgcgcaggcgtccagtccagtgcgccgatgcgaacgagataaaccagaccagccagtagcactaaaatgaaaattgcggcttccacaaagccgacccagccgctctcgcggatagaggtcgaccatgcgtagagatacagggcttccacgtcgaagataacgaagaacatggcaaccagataaaacttcgcagaaagacgtaagcgggccgaaccgacggagtcgatccccgattcaaacggcgtgtttttactacgcgcgcgcgcgcgaccgccaaggtaccagccgccgacgagcatgaggcagcacaggccgatagcgatgatgagaaatatagcgaatgcccaatgatgagcgatgacttcagtggatgttgacatacgcattgcttaaccaaaaaagtgtagcgccaaaaccctctgctcttactggcagatgaacgccacagcgtttcacgggaggaataaaaaataaccgtgcaaaaaagcgtccctggtcgatgtgagaagcccagatgccgtggctttttacccctttctttaaccttttgtcaactttaacaaaagttttcataacattaatttacattggaatcttttcattaacattaaatgcccttttctgcgaaataaccttgcatactgttcggttttagtgttgttgaatcgtgtccgtttccgtcgtaaatcaaaaatcccttctattttgacaggatttagcctcgattcctccccccaaagaggggtattttcttgatctgcgacacggttttgttaattaccccaggaaatcggcaacaatccatccggttttttaacattagcaggaagtgttgaaagtgcagggaaaagtcgacaagctgagcgccttgtcacgccaatacgctgatttttctgcaaagaaatacaaaaaagattcaaaacatcaataagagtgcaaaaaaaagagccgccaggcgggaaaccaactcctgaggctctttttgggcacttacattctgttaccagtttttgtgatctttgttagcaagaatacccttacaaaaccaaggtattccctccctcttccggagtaagtgctgtgcccgtttcccagggatggatctcctggctcagagactgaaaaatcgcctgcggcagttcgctcaccgtccgcggattgcagctgacgacgtaccgggtgtccggcaacgccggtaacccctcactgatgccagccacgcgtagatccgggctcatcatttcgaccgggcgcgccgtcacgcccagcccggccttcaccgccgctttcacgcccgatagcgaggaagctccgtgggccagatgccaactgacgcgagcagtttccagcgcggcgataatatcctggcggaatggacttggctcttcgagcaggatcagggggatagattcccccttcgccagcacatattccgctgcacaataccagagagtaggtgatgttctcagggtaaaagaggtaaagccgggaggctgatgggtggtcaacgccagatcgaccagcccctcggccagcatctccatgatggcggcatggggatgaactttgatctccaacgtcattctgggatagaaacagccgatgcggtttaacaaaaacggcaggatggtgtcagccgtttcttctgacgcaccgatgctcagagccccctgcaggctgccatacatcagcgacatacaggcttcatcgttaaaacggagaattttgcgggcatagcccagcagctggatcccctgctcggtcagcagcttattgcggccgtggcgggcgaaaagctctttgcccaccagctgttccaggcgttgcatttgctgactgaccgcggactgagtacgacacactgcggcggcggcggcggcaaaagtgttcaaatcagcgaccgcgacaaaggtacgcagcagatcgagatcgaggttgagtatgggacgtgttgtattaatcatctttcttcacttacaggtggctaacgctgacctgccttgttgatgctttacgccaggtttccggctattccctgagcctcgtgctcaccgtctaacggcggataaacaactggacgaacgttattacatgccaaagtactcgtctgggcaaatgcgcagaactgcggaataatatattgttcgtatttctcattattatttattaccacgaccagccaggcgccatacgtcgccgcgggaacccggtcagtgatgctgagaaaatcgctcttctggcgtaactttccggcagaaaaggaacaataaaatcctgtaataacaatatattaaatctcaatgcaaccgcagttcttggcggttaacacggatattaacggtgatattctaacctatccccctcctttttataagccttaataaggattaactgagacaattttaaatttttttcaacattttatattaattaacaaacctcagattattacccgctaaaaataataataatgtggtcgcacgctgttttttattaaaattatttaacatcaaaattacaagccaatcgcgcttgtatgcaggatagcgttttttagcgactcccccttctccctccccatattaccgggcaaacaaacgagataaatgatggcaaaatcgctactaaatctatatttacgaccaaaaaatcgacataaaaaggcataagccacagaccaaacccgcaatcggtagataaatcaattgcgcttaaaatccggcgttagcaaaatcttctcctgcaaagccttcaaaacagcggggagggggagtacattgttccgtgctgacttccacggcagggagtggcgataacagctaaaaggtcaagattcatgtcccccatcgaaaaatccagcaagttagagaacgtctgttatgacatccgcggcccggttctgaaagaagccaaacgtcttgaagaagaaggcaataaggttctgaaactgaacatcggcaacccggcgccattcggcttcgaggcccctgacgagatcctcgtcgacgtcatccgcaatttgcctaccgcccagggttactgcgattcgaaaggattgtactcggcgcgtaaagctatcatgcagcattaccaggcccggggtatgcgcgatgtcacggtggaagacatctatatcggcaacggcgtgtccgaactgattgtgcaggcgatgcaggcgctgttaaacagcggcgatgagatgctggttcccgccccggactacccgctgtggacggcggcggtgtcgctttccagcggcaaagcggtacactatctgtgtgacgaatcctctgactggttcccggatctggacgacatccgcgcaaaaatcacaccgcgcacccgcgggatcgtgatcattaaccctaacaaccccaccggcgcggtctattccaaagaattgctgcaggagatcgtggagatcgctcgtcagcataatctgatcattttcgccgatgaaatttacgacaagatcctctacgacgaagcccagcatcactctattgccgccctggcgccggacctgctgacggtgacctttaacggattgtcgaaaacctaccgcgttgccggcttccgtcagggctggatggtgctgaatggcccgaaaaaacacgcgaagggctatatcgaagggctggagatgctggcttcaatgcgtctttgcgccaccgtgccggcccagcatgctatccagacggcgctgggcggctatcagagcatcagcgaattcatcatccccggcggacgcctgtatgaacaacgcaaccgcgcctgggagcttatcaacgatattccgggcgtctcctgcgtgaagccaaaaggcgcgctgtatatgttcccgaaaatcgacgccaaacgcttcaatattcatgacgaccagaaaatggtgctcgacttcctgctgcaggagaaagtcctgctggtgcaaggcaccgcctttaactggccgtggccggatcacgtacgcatcgtgaccctgccgcgcgaagacgacctggagatggctatctcccgctttggccgcttcctctccggctaccatcagctttaatcgcgccgccgccggcatttgcatccggcggcgatccctgcgcacaatggaacccgatgttgtcactgattaagggtccctatgagtcagagtcatttctttgcccacctctcccgcctgaacctgattaaccgctggccgctgatgcgcaacgtgcgcaccgaaaatgtctccgaacacagcctgcaggtggcgatggtcgcccacgcgctggcggcgattaaaaaccgcaaatttggcggccaggtcaacgccgagcgtatcgccctgctggcgatgtaccatgacgcctcggaagtactaactggcgacctccctactccggtgaaatatttcaattcgcagattgcccaggaatataaggcgattgagaaaattgctcagcaaaagctggtggatatggtccctgacgagctgcgcgatattttcgagccgctgattgatgagcatcactacagtgaggaagagcagtcgatcgttaaacaggctgacgccctctgcgcttacctgaagtgcctcgaagagctatctgcaggcaataacgaatttctgctggccaaaggtcggctggaaaagaccctggcatcgcggcgcagcgcggagatggattactttatgcaagtgttcgtcccaagcttccagctgtcgctggacgaaattagccaggattcgccgctgtaaggttctggccgggcggcggttgtgctctacccggccagaatatcttaaaacggaaacagtaccgggatcagcaggacgcagaccaccatcaccagtatggtaaagggcacgcctattttgacaaaatcgctaaatgagtacttgccagggccaagcaccagggtgttaaccggcgaggagaccggggtcataaacgccgccgaagccgccatcgccaccaccatggcaaaaggatagggagagacgcccattgacttcgccgccgctaaggcaataggcgccatcagcaccgccgtggcggtgtttgagataaacagcccaatcgccgcgcacatcatgaacaggcagccgagcatcagataaggcccctcgcctccggcgacatccatcagtcccttcaccaccagatccaccccgccggttttttgcagcgccagggcaaacggcatcatcccaacaatcaaaataatgctcggccagtggatcgccttgtaggcgctctcggcattgatgcagcggaatttgcccatcagcagacaggcgataatcgcggcaatcgggttgggaatttcatcggtgagcatcagggctaccatcagcaccaggcagaaaatcgcatgcggagcctggctgtgggccggcgaagcgtcatcgacctcaaccggcatattgagcaccacgaaatcccggccgcgcttcgccagcagggcaatttgccgccagttgccgaccaccagcaggatatcgccgagctgcagcggctcgtcgaccaccgaaccatccatcgctttgccatcgcgcttcatgccgacgatattgagaccaaaccgggtgcggaaggctatctcacgcaccgttttgccaatcatctctgaatccgggatcagcgccacctccgccatccccacatccagcgcctgatcggcaaaatactcgccgcgcagcaccatcggctcaagcatttgctcgccgcagaactggcgtaaatcgacatcggaggcggacatatcgatcagcaggacgtcgcgggcgcgaaattccgataccccgttgacgttgacaattacccggcggaaccgccgccagcgttcaacgccgatcacgttggcgcagtagcgctcacgcagctttaaatcatccagccgctgaccgatcatcggcgaacccgggcggatggccagccggcgagcgcggccggtgaggtgatattcgcggatcaaatcgcggaaggtgcttctttttcgcccatcgcgtgcggagtcgccattatccgtcttcagcataaagcgcaccgccagcatatagacgatgcccaggatcagcaccaccaggccaatcggcgtgacgctgaaaaagctgaagccgtgcagtccctcgcgcagcaattcactgttgaccaccaggttgggcggcgtcgccaccagggtcatcatcccgctgataagcccggcgaagctcagcggcatcatcagccgcgatggcgaggtattcatccgcgccgagacgctaagtaccaccgggatgaaaatggcgaccaccccggtggagctcataaacgcgcccagaccggcgacggtgagcatcaggtagatcagcatcttggtttcgctgttccccgccacgctcaccagccatgcccccattttggtggcgactccggtgcgcaccaggccatcgccgataataaacagggcggcaatcaggatcacgttaggatcgctgaatccggaaaaagcttcatttaacgtcagcgttccgctgaggacaaaggcgacaatgaccatcagggcgatagcatccatgcgcaccttgccggtagcaaacagcacaaccgcgatggccaggagggataaaacccaaatcaattcaccgttcacaacgtttccttgtcacaagtgggagtcgacatagtggcataaaaaagccccgacgacgcggggcgaaatcatgggtttacgctttaagacgcacatttaccacgccgtcagtctggcgttcaaccaccagatcttccaggctgctcagcacgaggtcggcttcatccaggcgaggggcatcggcgggcacgttgaccgcgatagtgcgacagccggccgccagtccggagaggagccccgccggcgcatcttccaccaccgcgcactccccggcaggcagacccagccgctcggcgcccagcaaataggcgtccggcgccggtttgccgtgtttcacctgctcggcggtgacgaacacctcaggcatcggcaggcccgccgcgcgatgacgcgcgtgggcaaccggaatcgagccggaggtgacaatcgcccacgggatcccggcctcattgagcgtattcagcagggctaatgcccccggcagcgcgacgataccctcaatatcagtggcttctatctgctcgaggtagcgaaattcggcctggatatcctcctcgctgcgccccggcataaaatggcgaatggaggtaatggcctgcttgccgtgaataaaactgagaatttcatcatggtcaatggcgaaacgatcgccccacttgcaccatgaacgctctaccaccggcaaggaatccaccagcgtcccgtctaaatcgaacaggaaacctttacactgcacgggcacctccctcaggcgttgataatttgattaatttcattactgctcagatgatactggcgcgggcaagcgtgccagacgctcagcatccgctgatatttctcccacatcggggtctgcgagttaaagccatgggtaccggcgtcaaaatggctgtagcggccttcaacgttgaccataaaacgcacatagccgagataacgcgcttcggtggcggcatcaaatccgaggaaggtgacccggcgttcatcgatacccgccgcgtctttcaggttggtccaggagacgtgcagcgcgtggtacatctccatgatatcaataacggtacggcaggtttcttccgtcagctggccgaactcgcggtccagttcacgcatctgtagcccatacccacgctctatgatggtttgcagacgacggtagcgttccgcattatccgggtcgagcatcgtcatcattttgtactgattggataaaatcagacgctgcgcattggtcatttccatgttgtgactcctgtagcacggtagggcgtgaaataaagaaggcgcataaatcatgcgccttcttttatatgcgttttccgtagtgaattacaaatcatcaaggaaagttttatccagttgtttgaaggcgcgcttaagcgtgtcagccagcgcctgataatcgggcttgccttcgaccggtgccagcgcctgccccgcctcctgcagtttgccgcgcacttcatagaaccagttaagaatggaaggcggcagcggcgtcaccgaacgcttacccaaccaccagagtccctgcatcggcaggctcagcgcaaacagcgcggtagcgacggcggggcccagctggccgccaagagctatctgccagcagagggtaaaaatggcgattggcggcatgatgcggatggcatagcgggtggcacgaataatgcggttttcaataaacaccggcgcgaggcgcttgtcgagaggccaggtctttgcgtaatgctgcccgcggttgaacaagctaaagaagctaacggggcgtttctcaggggtcgacatggctttacctcaactttacatataaaacttaaaaaattcgtgcaaaacaccaactatgcatgacatcgttcaaaagattttggcaaaggatgccgcaatcaggtatcctgtgcccgcctgaaagggcggttagactctttgccaggctagtcaaattatcgcatattctgccattggctgaaaattatgcaaaatggcataaaatcaaatgtacttctctcatcgtgcccgaaaacagaacaaggcatgatgttaatcataaatgtcgaggtcatcctgcgctacgctaatgacacactgacgtttttttagccacgtatcataaaaaggtacttccatgtcgagtaagttagtactggttctgaactgcggtagctcctctctgaaatttgctatccttgacgccgtgaacggcgacgaatatctgtccggtttagcggaatgcttccacctgccggaagcccgtatcaaatggaaaatggacggcagcaaacaagaagccgagttaggcgcgggcgccgcgcacagtgaagcgctgaactttatcgttaacactattctggcacaaaaaccagaactgtctgctcagctgaccgcaatcggccaccgtatcgtacacggcggtgaaaaatacaccagctccgtggtgatcgacgagtccgtaattcagggtattaaagacgccgcgtctttcgcaccgctgcacaacccggcacacctgatcggcatcgctgaagcgctaaaatccttcccgcacctgaaagacaaaaacgtggctgtattcgatacggcgttccatcagaccatgccggaagaatcctatctctacgccctgccgtacagcctgtacaaagagcacggcgttcgtcgttacggcgcgcacggcaccagccacttctacgtgactcaggaagccgctaagatcctcaacaagccggtggaagagctgaacatcatcacctgccacctcggcaacggtggttctgtttccgctatccgtaatggtaaatgcgttgacacctccatgggtctgaccccgctggaaggcctggtgatgggtacccgctccggtgacatcgatccggccatcatcttccatctgcacgacaccctgggcatgagcgttgacgcgatcaacaaaatgctgaccaaagagtccggcctgctgggtctgaccgaagtcaccagcgactgccgctacgtggaagacaactatcaggaaaaagccgacgctaaacgcgcgatggacgtttactgccaccgcctggcgaaatacatcggttcctacaccgcgctgatggacggccgtcttgacgccgttattttcaccggtggtatcggtgaaaacgccgcgatggtgcgtgagctgtcgctgggcaaactgggcgtactgggctttgaagttgaccatgagcgtaaccttgctgcccgcttcggcaagtctggcttcatcaacaaagaaggcacccgtcctgccgtggttatcccgaccaacgaagagctggtcatcgcgcaagacgccagccgtctgaccgcataattccacatcgccagccctgacccgcaataattcgagctgcaggaaggcggcgacacagcaaaaccccggccgcgtacagcgcgtacgccaccggggtgagcaagtagagccaacgcacgtgcaacttgaaatatgacggatagctggcggtgctgttttgtatcccgcctgatactggcggtaacgaaagaggatataccgtgtcccgtactatcatgttaattcctaccggtaccagcgtaggtctgaccagcgtcagcctcggtgtgatccgcgctatggaacgcaaaggcgttcgtctgagcgtctttaaacctatcgcccagccgcgttccggtggcgatgccccagaccagaccaccaccatcgttcgcgccagctcctccaccaccaccgccgctgaaccgctgaagatgagccatgttgagtctctgctctccagcaatcagaaagatgtgctgatggaagagatcattgccaactaccacgcgaatactcaggacgcggaagtggtgctggtggaaggcctggtaccgacccgtaagcatcagttcgcccaggcgctgaactttgaaatcgccaaaacgctgaacgctgaaatcgtcttcgtgatgtctcagggcaccgacacgccagaacagctgaacgagcgtatcgaactgacccgtaacagctttggcggcgccaaaaataccagcatcaccggcgttatcgtcaacaaactgaatgcccctgtcgacgatcagggccgtacccgtcctgacctgtcggaaattttcgacgactcgtcgaaagcaaaaatcgtgaagattgacccggctcagctgcagaaaggcagtacgctgccggtgctgggcgcagtgccatggagcttcgatctgatcgcgacccgcgcgatcgacatggctcaccatctgaatgcgaccatcattaacgaaggcgatatcaatacccgccgcgtgaaatccgtgactttctgcgcgcgcagcatcccgcacatgctggaacacttccgccctggttctctgctggttacctccgcagaccgtcctgacgtgctggttgcggcctgcctggcggcaatgaacggcgtggaaatcggcgccattctgctgaccggcggctatgaaatggacgcacgcatcagcaagctgtgtgaacgcgctttcgcgaccggcctgccggtatttatggtcaacaccaacacctggcagacctccctgagcctgcagagctttaacctcgaagtaccggttgacgatcacgagcgtatcgagaaagttcaggaatacgtggccaactacatcaacgccgactggatcgaatcgctgaccgcgacctccgagcgcagccgccgtctctctccgccagccttccgctaccagctgaccgagctggcgcgcaaagccggcaaacgtgtcgttctgccggaaggcgacgaaccgcgtaccgtgaaagcggcggcgatttgcgccgaacgcgggatcgccacctgcgtcctgctgggtaacccggatgagatcaaccgcgtagccgcggcccaaggcgttgagcttggcgccggcattgaaatcgtcgatccggaagtggttcgcgaaagctatgtgggtcgcctggtcgaactgcgtaagaacaaaggcatgaccgaagcggtcgcgcgtgagcaactggaagacaacgtggttctcggcaccctgatgctggaacaggacgaagtcgacggtctggtatccggcgcggttcacaccactgccaacaccattcgtccgccgctgcagctgatcaaaaccgcgccgggcagctcgctggtctcctccgtgttcttcatgttgctgccggaacaggtttacgtttacggcgactgtgcgatcaacccggacccgaccgccgagcagctggcggaaatcgctattcagtccgctgaatccgcgattgccttcggcatcgaaccgcgcgtggcgatgctctcctactccaccggtacctccggcgcgggtagcgatgtcgagaaagtccgcgaagcgacccgtctggcgcaggaaaaacgtcctgacctgatgatcgacggcccgctgcagtatgacgccgcggtgatggctgacgtagcgaagtccaaagcgccgaactcaccggtagctggccgcgcgaccgtgttcatcttcccggatctgaacaccggtaacaccacgtacaaagcggtacagcgctctgccgacctgatctccatcgggccgatgctgcagggtatgcgcaagccggtcaacgacctgtcccgtggcgcgctggtagacgatatcgtctataccatcgcactgaccgcgatccaatcggctcagcagcagaagtaatctgccgctgtggtcaaagcaaaaggcagccgaatggctgcctttttgtcgtcaggaggcgagcgacgattgctgccgcgcgtttgcgatctttattcgcgctcgctctcttccgcatcatcatactcattaccggcgttgcgggtcatccacagcgccagcgctttcagggagtccggcgtgaactcatcgcagcgggcggtgatctcttccggcgttaaccagcacacctcgctgacctcttcttcctgcagggcgaacggcccgtgggagacgcagctgaacaggcttccccagacgcggcagaatttgtcttcgtaataaaactggccgtgatcggcaaacggcaccccggcgatgcctaactcctcttccgcctcgcgacgggccgattccagcagctgctcatcagcctgcacgacgccgccagcggtggcatccagcatgcccggatgaaagtcttttgtctcggtgcgtcgctgcaccagaattttccccattccgtcatgaacgacgatataggtcgcccggtggcgcaggcactgcgcgcgcatttgctcgcggctggactgtgctatcacctcattgttttcattaacaatatcgacccattctgtgcttgccaaatgattctgttccgccatcaggaaaccttactttaaatgcgctctcgcggcgcgtctttatgattgagggctaaattacgggtaaattgcaacctctgcaataacctgattatcattgagtgctaaaacctgcagccgcccctgatccagcagcccatagctggcggaatatccccctttcgggatactcactgagccgggattaaagaggtaaattgcgccgcgtttttccgcgaccggtatatgagtatggccatatgccaggacatcgccagcggccagcggcggcagattatccggactatagagatgcccgtgggtcagaaacaggcgatagcgttcgctaagcacctgctgccagggcgcggtgattggaaaacgaagcagcatctgatccacttcgctgtcgcagttgccgcgaacggcaacaatgcgttccgccacgctgttcaaccgctccgccacctcacccggcgcatacccctcaggcagcgcgttgcgcggaccgtgattgagcacatcgccgagtatgatcagccacctggcgccgctttgcgcgaaccgttcaagcacgcgttccgtggcgggcagcgaaccatgaatatcggaggcaaacatcagcttcataggttccatctccactggttacgatgcctctatgatagcggaagcgcggcgggttatcagcctcagcgtttggcggaaagcgccacgtaacgctggattgaggcccgctgccactggaaagacgcataatcagccagcgcctccggtaccttatcgccattgagaaccaggcgattgagcatcagcgccaggtctgcgtcggcaatagaccattcgccaaataaattttgcccgccgtgggccagtagcgtggtggcggtggcaaacagcttttccgcagattgcctgccggcctcgctgaggtccggcattttcgccccgtcaaacaccacggcggtggatcgctcttcacgaattggcatcagatcgctgcgcagccaggcctggatctgccgggcgcgggctcgtttttgcagatcatgcgggtagatgcgctcccactccggcggcgcgaaacgctcatccagatactcggtaatcgccgaagactcacttagcgcgaaatcatcaacctccagcagcggtacgcgacgggtggcggcatagcctgtccagcccgcctgcagatgttcgccgcggttcaggtcgacggttttaagggtaaaaggcaggcttttttcctgcagagcgacatagacagacatcacgtacggtgagaaaaaatcggcatcggaccacagggtaatgacaggctggctcatagcttcctcaagggtggtagacaggacaataagccaacatagcctgtcttacaggcgatgtcactgctcgagcgcggacgacacgtcgcctggctgccgggtcgcttgcggaatttctcccgggtggcgcagcttcacctatactcgaacagtttgcgacccacgacggcgggaaatattatgatcgatctttactatgcacccaccccaaacggccacaacatcaccctgttcctcgaagaggcggagctagcctatcggctaattcgggtcgatatcggcaaaggggaacaatttcatccgcagtttctggcgatttcgccgaataataaagttccggctatcgtcgaccacatgcctgctgacggcggggcgccgttgagcgttttcgagtcaggcgccatcctgctctatctggcggaaaaaagcggtaagctgctgagcggcgagctgcgggaacgctacgtcacgctgcagtggctgttctggcaggtcggcgggctggggccgatgctggggcaaaatcaacatttttcccacaccgcgccgcaaaccgtgccctacgctattgaacgttttcaggtggaaacccaacgactgtatggggtgctaaatcagcgcctgggatgcagcccgtggcttggcggcgaccactacagtatcgccgacatcgccgcctggccctgggtgaactgccatgtccgacagcgtatcgatctggcgaactatccggcggtgcacaactggtatgagcgcattaagcagcggccggcaacggcggaagcgatgttaaaaattcagctttattaaccccctgctcgcccgtcgcgctttgttgtatgattgcaggacttacaccacggaggaagcctgcaatgtctcaaccagacgccattattcgtattaagaacctgcgcctgcggacttttattggtattaaagaggaagagatcgccaaccgccaggacgtggtagtgaatgtagctattcactaccctgccgataaagcgcgcgacagcgaggacatcaatgatgcgctgaactaccgcaccattaccaagcgtataatcagccatcttgagaatggccgtttctcgctgctggaaaaattaactcaggatgtgctgaatatcgcatgcgaacatcactgggtcacatatgctgaagtggagattgataaacttcatgcgctgcgctatgccgactcggtgtccatgaccatgagctggcgtcgctaaccatgtcagggaggtggtatgaagatcctgcttactggtggtaccggcctgattggccgacatctgatacccagattgctggagctcgggcatagcgtcacggtctccacgcgacatccggataccgcccgcgcccgtctcgatccgcgcgtcaccctgtggcgcgatttcgagggccatcaccacctcaatgacattgatgccgtcatcaatctggcgggtgaacccatcgctgataaacgctggacggccgagcagaaacaacgcttgtgccatagccgctgggatctcacgcagcggctggtgggcctgatccacgccagccacacccctccctccgtgctgatcagcgggtctgccatcggctactatggcgacctcggcgaggtggtggtgaccgaagaagagccaccgcacaatgagtttacccataagctgtgcgcccgctgggagcaaattgcctgcgaagcgcaaagcgagcgcacccgcgtctgcctgctgcgcaccggcgtggtactggctccgcggggcggtattctcggcaaaatgacacccgcctttaagctcggcctcggcgggcctatcggcaacggcagacagtacctggcctggatccatatcgacgatatggttaacggcattctgtggctgctggataacgatctgcgcggtccgttcaatatggtttctccctacccggtgcataacgagcagttcgcccatgcgctgggtcatgcgctccatcgaccggcgattttccgcgttcccgccgccgctatccgcctgttgatgggggaatccgccgtcctggtgctcggcggccagcgcgcgctgccaaagcgtctggaggccgccggcttcgccttccgctggtacgatctggacgaagcgctaaaggatgtgctgagttaatggctgacacaggggagcattggctcccctgattccattctgctggctcatgctccacgcctggatggcctcacccggcgctgcagcatcgccatattcaggacaaccagcacccttaatcgcctgaattcaccgccagccggccggttcgccggtgttacctggcgaagcaaagtgctaaggtaggcttttctttctgcgtattgactgctttatgacgaccatcaccacaccacgcctttcgcttacccgctttgttaccgatgactggcccttttttctgcgcctgcgccaggatccgcaggtgatgcgttttatgggggaggtgttaagcgaggaggcgctgcgcagcgtcttcgtcagtcgctgtgccgatcccggggtgtttgtattgcgcgataaattcggcgaggcgctgggcgatattgggctccgcatcagtccgaaaaatccgcacgaagctgacgtcggctacgcgctgctgcctcaggctcagggaaaaggctatgccagcgaagcgctgcgggcggtctgcgagtatggtttcaccaccctgggggtgcaggccatcaatgcctgggtgctgggtgaaaaccgtggctcatcgcgcctgctggagaagcaaggctttgtgcgcacccaggtgctggagaaagcctatcatctgaacggcgtcgattacgatgactggatctatcggctggagcgggaagctcatccggcgtccacagacgccggatgagccgattatttcagcgaacctttcaaaaactgctgcaggcgcgggcttttcggcgcgccaaacagcgcatccggatgcccttcttcttcaattttaccctgatgcagaaaaatgacatgtgaagagacgtggcgggcaaagcccatttcatgggtcaccaccaccatggtttttccctcttccgccagctgctgcataatgcgtaacacttcgcccaccagttccggatccagcgcggaggtcggctcatcaaacagcagcacttccggttccatcgccagcgcgcgggcaatagagacacgctgctgctggccaccggaaagatgcaccggatacttcgcctgctgacgttcgtctatcccgaccttggccagatattttaccgcccgttcgcgcgcttcctgtttgcttaagcccagcacctgaatcggcgcttccatgacgttctccagcaccgtcatgtggctccacagattgaaatgctgaaacaccatggtcaaccgggtgcgcagcaggcgcaactggttcttgtcggccaccttcagctggccgtctttatcccgtaccagaccaatattttggccgctgacgacgatcgtgccttcgctcggtttttcaaggaagttaatacagcgcaaaaaggtactttttccggaacccgatgaaccgatgatgctgataacgtccccggctttcgcctgcagcgagacgcccttcagcacctcgtgttccccatagcgtttatgcagatcgataacgtttaatttattgtcggacatggcgttctcaatgcgtcgaagaaggtttgatatgctgcaaccagcgcttttccgctttacggaacaagctaatcagcacatacgagataattaaatagagcaccgcggcgatgccaaacgcggtgaacggctgataggtggccgagttgatatcgcgggcgattttcagcagatccggtaccgtagcggtaaacgccagcgcggtagagtgcagcatgaggatcacttcgttactgtaggccggtagcgcaatccgcagcgcggaaggcagaataatgcagcgatacagtttgaccgaagagaagccgtaggcccgggctgcttcaatttctccggcgggtactgagcggatcgcgccggcgaaaatttcagtggtataggcgcaagtattcagggttaacgccagtaccgtgcagtttagcccgctgcggaaaaaagcgttcaacagctccgtgcctttgacgatttccagggtatacatgccggagtaaaaaaccagcagctgcacatacaaaggcgtgccgcgaaatatgtaagtgaacagccagatggggaactggataaacttattgctcgagacgcggccgatggccagaaacaccgccaggatgccccccattaccactgaagagatcagcaaccataaggtaatcgccacaccggtaaagcgatagccgtcggtccacagtagtgatttccagtactcctgaataatttcaatcacaggtcagccctcttcacgccaacggtatagcggcgttcgagcagcagcagtacgccattagaaacggtggtaaacaccagataaatcaggccgcagacgatggcgaagtagaacggctgccaggtgcttttcccggccagctgcgtggctttgaccacatcctccagccccagcaacgagaccagcgccgtcgccttgaggataacctgccagttgttgcctatccccggcagcgcgtagcgcatcatcgccgggaagagaatacgccggaacgtctgcccgccgctaaagccaaaggcggtggccgcttcgatatgccccttcggcaccgcaaggtaggcgccgcggaaggtttccgtaaaataggcgccatagataaagccgagggtaataatcccggcgatcatcggatcgatatcaaactgggccatgcccagcgcatcggtaacgctgtttagcgcaatctgcaggccgtagaaaatcagcagcatcagcaccagatcgggcacgccgcggatcagagtggtatagccttcaaataccagcgccagtggacggttgctcgataactttgcgccagcgcccgccagcccaatcaggacggcgagaacgaccgagctgagcgcaagctccagggtgacgagcgcaccctgcaaaataacctgtgaaaacccatacagcatgctgcctaccctgtctgtcattcaccattgcgcgcgaaacgcacgcaatggcgaggcgtgagaattattcgccgtatacgttaaaatcgaaatattttttcgccagcttgtcgtaggtgccgtccttacgcatctctgcaaacgccttgttcagcgcttcacgcagttcgttgtcttccttacgcagccccataccggtgccaacaccaaacagtttctcgtctttgattgacgggccaccaaactggtaatctttaccaataggctgtttcaggaacccttcgctggccgcgacctcatcctggaacgcggcgtcgatccggccggcggtcaggtcggaatagatattgtcctgcccctgataggagacaatttcgatacctttcggcgcccagtgctcattgccataggtttcctgagtcgtcccctgcagcacgcccacgcgcttacccttgagggtggcgagatccggcgttaccgggctgccctttttcaccaccagacgcgaatctgccgcatacagcttgtcagtgaaggcaatttcctgctggcgcttttcagtaatcgacagcgaagacataatcgcgtcgattttcttcgcttttaaggaggggatcagcgcatccagcgggttttcaacaaaggtacattgcgtattaatacgcttacacagctcttttgccagatcgatatcaaaaccgaccaattctccctgcgcattcttcgattcgaagggagcataagtcggatcggtaccgatacgaattttttgcgggatggctgcaaagaccgtggaaacgctggaaagggccagcgctaaagagagagacaacgccagttttttcataactatcctcgacagactgtcattctaacgggtttattagaactatttacgccagttatcgtgccattattcgccccttaagggcaaagatttatgcaccagaaaggccgattttttgcatcagaaacgcttaactatgcattttttagccaaaaaactggctgcttttgcactgaaatgatccacagcgcgtttagatgcacccttttggggcatggatacgaacctggcggcaggcccaccccattgtgcgggcctgcagcagtcttagtcgccgtacacgttaaaatcgaagtatttcttcgccattttgtcgtaggtgccgtctttacgcatctcgcccagcgctttatcaaacgcggctttcagctcggcgtcgtccttacgcaggccgataccggtgccgtcgccaaagtactttttgtctttaacggacgggccggcgaaggcgaaatctttcccggcaggctgtttcaggaagccttcgctggcggcgacttcatcctgcagcgccgcatccagacggccagctgcgaggtctgaatagatcagatcctggttctggtaagccaccacgtcaacgccctggctgcgccagcggtcgttagcataggcttcctgagtagaaccctgcagcacgccgacgtgcttgcctttcagcgcctccagcgtcggctggatcggcgaccctttggcggcgatcagacgcgagtcagcggcatatagcttgtcagagaaggcgatctcttgctggcgcttctcggtaatagagagggaagagatgatggcgtcgattttcttcgctttgagggaggggatcagggagtcaaaatcactgccgacccaggtacatttcaccttaattcgggagcacaactcattgcctaaatcgatatcaaaaccaacaaagtcccctttcgcgtctttcgacgaaaatggcgcataggtcgcgtcagtgccaatgcgaatgctctgcggcagagcagcaaacacgctggccgtgctgctcattcccacgagtaaagagagagccagaatcgtcttcttcatacagtacccttaagtgtcgtgtcgtgatgtggtgcgttgcttgttatggtgattgccgatcaatcctgcagtttttgtgccatcttcccggtgcgtgccgggaacagggttaaatttgttaaaataaagttgcaggattgtcttaaaagggaagataccagcattactggcgaaaccgcagcgcctgagcgcaaaaagacgaaataaatgtcgaggatttgatcgcggcaacaaatttgcaccaccggagcgcaagcgtacatttcatgcaccactatagtgcgacgctaggccccctgccagcgggtaaacaagtcgtgctccagattaatatcaaattgatcgagtacccgattgacggtctggttgatgacatcgtccaggctttgtggccggtggtaaaaagccggtaccggcggcattatcaccgcccccagctctgcagcctgaaccagcagacgcagatggcccaaatggaacggagtttcccgcacgcagagcaccagcggacgacgctctttcagcacgacatccgccgcccgggtcagcaggccatccgtatagctatggacaatgcccgagagcgtcttcattgagcagggtaaaatcaccatcccggcggttttaaacgaaccggaagagatactggcggcgatatcgcgggcgtcatgcaccacatcggctagcgcctgcacctcacgtacggagtagtcggtctccatggccaacgtctggcgcgccgcctggctgaggatgagatgagtttcaatatccggcacatctcttagcacctgcagcatccgcacgccgtaaatggcgccgctggcgccggaaatgccaataatcagtcgtttcacgttctgttaccccttgcgcgtgtgccgcagactttgccggattatagcctctggcgcaactattgacgcacagttgaggggcgaaaaaaagcccgccgtcctttcggtacggcaggcccgcgacgcgtgaacggcttaaccctcgttgtgcatctcgaggttttcgacttcgttctgcaactggaccgctttggcatcatcgttacgcagggagtcaagatagtcgaggtactgctggtcgacatcccgggtcacatatacgccgttgaacaccgagcattcaaactgctgaatatccgggttctccgcgcgcaccgcgtcgatcagatcgttgagatcctggaaaatcaggccgtcggcgccaatgatctggcggatctcatccacttcgcggccatgggcgatcagttcgttggcggtcggcatatcgataccgtacacgttcgggaaacgaatttccggcgcagcggaggcgagatacacttttttcgcccctgcttcacgcgccatctcaatgatctgctccgaggtggtgccgcgtacaatggaatcatcgaccagcagcacgttcttatcgcggaattccgcacggttggcgttgagcttacggcgaacagatttacgacgcagttgctgaccgggcatgataaacgtccggccgacgtagcggttcttcacgaagccctgacgataaggtttgtcgagaatgcgggcgatttccagcgcgatgtcgcaggaggtctccgggatcggaataacgacgtcaatatccagatcttcccactcgcgggcaatcttttcgcccagcttagtccccatgttgacgcgggcgctgtagacggaaattttgtcaataaacgagtccggacgggcaaaatagacgtactcgaacaggcacgggttgctgaccggattatcggcacactgacgggtatagagctggcctttctcggtaatatagaccgcttcgcccggcgccacatcgcgcaggaattcaaaaccaagcgtatcaagggccacgctctccgaggccaccatatactcggtgcgaccgtcgccaacgtcacgtttacccagcaccagcggacgaatgccgttagggtcgcggaaggccaccatgccatgcccgatgatcatcgccacgcacgcgtacgcgccgcgaatcaggcggttggtcgccgcaatcgccgcgaagatgttgtccgcttccagcgggtagtgacggaagttatccagctcactggcgaaaatattgaggaggatttcggaatcagaggtggtattgatatggcggcgtttttcttcaaacagctttttacgcagctcgtgcgcattggtcaggttgccgttatgcgccaatgtgatgccatacggcgagttaacgtaaaacggctgcgcctcggaggcgctggagctgcccgccgtaggataacgcacgtggccaatacccatattgccctgcatacgctgcatgtggcgggcctcgaatacgtcgcttaccagcccgttagccttacgcaaccggaagcagttgttggcatcaatggtgatgatgccagcggcatcctgtccacggtgctggagcaccgttagcgcatcataaatcgactggttaaccggcataacaccggcgataccgacaataccgcacatacgtattttcctcgttcagcaacgacccaaagtctatactttaggcaagaaacttgacgagctttgcaggtattcaaaaaaccatctgatgacgggggtaaaatagggaataaactgcgactgatgccagtcatcgctcttcgccatcccggtaaaggtgtccaggaagaacaggatagcggcgatgatcagcaccccacgtagcgcgccgaagcagatccccaataccctgtcggttcctgacaaaccggtcttctccaccagctggcctatcacatagttcacgatagcgccaacgatgagcgtcacgataaacagcgccgcaatagcaatcccatttcgaacccgttcatcctcaaagcccgtaaaccagacagacaggtcagcgtagtaatggctggcgacataaaacgcgcaaccccacgtgactaacgataaagcttcgcgaacaaagccgcggatcaggctgaccaggcaagaaagacccagcaccgccataatggcgtaatcaatccagaccatatacgtcccacgatttacgccctgtcgtccagttcggggcgcattctaacagaaaaagaaaacgtttgcgtagggatttccatgccctacagaaataaaaatggcgctgaaaaaacattcaacgccagactgcctttcgcctcttcagggcggctgagacagggtttgcggggcgtttctccccgccacgttctctccgcatggcggaaaaaacaatcagttcggggtgaagcccatcaccaccccgctaagcccggagatctgctgcagatcgcccagctggcctttcagcttgtcttttgacgcatccgggccgacgaggatacgggtaattttaccctgtaccggcgtcgaaggcgacgtatagactttgaaacccgaggcccgcagtttaccgacaatctcattcaccttatcggcgttcttcaacgcgcccagctgaaccacataggctttgccggtcggcgccggcagggccgcctgctgctgcggtggctgttgctgctgtggcttagccggcggcggcgttggcgtcgaggcctgctgttgcggctgcggtttcggctgcggcttgggctgcggtttcgcggccaccaccggctcctgaacgtcatcgaagctgttgctgttcaccggaatacgcgatggatctaacgatggcgcggcggcatcgcccgcccgcacctcttccgccgccccttccggcggttgcgaaggcaacgcctgggttgccgccggcaacatatccggttcatcgcgatcgcctggtttcggtaccagcgggatcgcggcaaactcatcctggtaatgctttttctgcccgtccagcagccctggcaggataatcacccccagcgccaccagcacgattgtcccgactaaacggttctgaaacttactcgccaccgattctccccgcgtctatctcttccataacctgcgctacggtgtgaaacgaaccacacaccagcacggtatcttccactttagcgtcagccatggccgcacgccacgcctgcgccacgctgctatagactgtaccgcagcgcaaatgttccaccagctgctccgccgtcgcgccgcgcgggccttccagcggcgcgcagtaccaggcatcgacttccggggccaaattggccaacgtgccggcgatatccttatcatgcagcataccaataaccgccagcacgcgtcccgttttcgctaacgttttgagacgcccggcgagataggccgccgcgtgcgggttgtgcgccacatcgaggatcactcgcggggcatcgctgattatctgaaagcgtcctgggagcatcgcatcgcggatccctgcgcgcaggatagcgtcatccacggcaagcccgctggcgcgcagcgccgccacggccgtcgccgcattcggcaacggcacctgaggcagaggcaggtggcttatcgcccctgccgtatcgcggaaggaccacgtttcgccttccacctcatagcgccagtcgacgccgcggcgctggagcagcgcgcccttctcgctagccacttccgcgatggtgagcggcatatccggctcccccaccaccgccggtttaccggcgcgaaagatgcccgctttttcccggccgatactttcgcgatccggccccagccagtcggtatgatcgagggcgatgctggtgaccaccgcgacgtcggcatccacgatgttggtggcgtcgagacgcccgccgagcccgacctcaaggatcaccacatccagctgcgcctgcttaaacagccacagcgccgagagcgtgccgtattcaaaataggtcagcgagatgtcaccccgcgccgcttcgatttcagcaaacgaagccgtatgcgccgcctccggcagttcagccccctgaatgcgcacgcgttcggtgtagcgcaccagatgcggagagctgtagacccccactttataaccggccgccatcaggatggtttccagcgtgcggcaggtggtgcctttgccattggtgcccgcgacggtaaaaacgaacggcgccggtttaacgatatccatctgcccggcgacctcgctgacgcgcgccagcccaaggtcgatggttttactgtgcagatgttccagataagaaagccacgtagccaggggcgacgtggcctgaggaataggatctttttccatgatgcccgtaagaattgacggttaacgcgtatgaataaaaaagggcagcgccgccaggccctgccctctgctttatcaggcctcaggttcctgatccggtgccggcggcaccaccacgccttcatgaggcgcttccgaaacggcaaccggcgccggcaggttcatcagcttcgccagaatgctggccagcttgagacgcatttccggacggcgaacgatcatatcgatcgcccctttttcaatcaggaactcactgcgctggaatcccggcggcagcttctcgcgtacggtctgctcgataacgcgaggaccggcaaagccgatcagcgctttcggctcggcaatgttcagatcgcccagcatcgcaaagctcgccgatacgccgcccatggtcgggtcggtcagcacggagatgtacggcagtccgcgctcctgcattttcgccagcgccgcggaggttttcgccatctgcatcagcgacatcagcgcttcctgcatacgggcgccaccggaggcggaaaagcagatcagcgggcagttatcttccagcgcctgctccaccgcgcgcacaaagcgtgcgccgacgacggaacccatcgagccccccataaaggagaactcaaaggcggcggcaaccaccggcatcgcgtagagcgtacctttcattaccaccagcgcgtctttctcgcccgtctctttctgagcggacgccaggcggtctttgtatttttttgaatcgcggaacttcagcacatcttttggctcaagttcgctacccagttctaccagagaaccttcatccaacaggctatgcaggcgattacgcgccgacatgcgcatatggtgatcgcacttaggacaaacctccaggttgcgctccagctcggcgcggtagagtacctgactgcagctgtcgcacttggtccatacaccctcaggaatgctcgccttgcgggtgggagtgatgttgcttttaattcgttcaatccagctcattgataacctttctgcctgaacctggtcgatgccagttttgtcgtaaggggcgcataatgccatttttgcctcttacagaccatgaatgttgcacattaaatcatatcatcccggaacatgggataaaaaagtggtcaaaccgctgcgcgtgacgctctgcaccgtcacgcgcaacacaggctaaactacttcgcctgctttgacgccgcccgcttatggcggatgatctcaatcacacccggcaggacggagaggacgatgatcgccacgatcagcagcttcagattctcctgcaccaccggcaaatcgccaaacagatagccggcataggtgaacagcagcacccacagcagcgccccaaccacgttataggctgcaaaatgacgataggacatatgccccattcccgccacaaacggcgcgaaggttcggactatcggcacaaagcgcgccaggataatggttttcccgccgtgacgttcgtaaaagctgtgggttttatccagatagctgcgacggaatatctttgagttcggattgctgaacagcttttcgccgaacagccggccaatggtgtagttgaccgcatcgccgacgatggccgcgatgaccatcagcagtaccatcaggtggacattgagatcgttggttggcaaggccgagagcgcgcccgcgacgaacagcagggaatcgcccggcaggaatggcgtcaccaccagcccggtttcgcagaacagaatcaaaaacagaatggcataaacccagacgccatactgggcaaccagttcggcaaggtgcacatcaatatgcaggatgaaatcaattaaaaagtgaatcaagtccatgtttgtctttacccttaatgaccctattagtccgccagaaacagcgggcccattggcagcaccggtaaatcatagtgggccgggtaatccaccgacaccagatacaacccttccgcttttgccgttgccgcagcgagcgtcctgtcttttgctgccagcagttctgccatccagctctccggctggtttccggccccgacctccatcaggctgcctacaatattcctgaccatatgatgtacaaaggcattcgctttgatatccaccaccacatacgcgccgtagcgggtaacgttaatatgcatcacgttgcgccacggggtacgcgactggcactgtaccgcgcgaaacgaggtaaagtcattctctcccagcagacactgcgcggcgcgctgcatacgctcggcgtcgagcggctggtgaaaatgcgtcacgccatgacttaacaccgccggacgcaggcgatgattatagatgacgtagcgatagcggcgcgccgtggcgctgaaccgggcgtgaaaatccgccggtacatgtttgacccaacgcaccgcgatgtcaccaggtaaattcgcatttacccccagcgtccaggcggcatctttccgctgcgcccgggtttcgaaatgcaccacctggccggtgccatggacgccggcgtcggtgcggccggcgcaaaagacggtaatcggttcgttcgccacctgcgagagcgccttttccagcttctcctgcacgctgcgcacttcgttttgccgctgccagccgtaatatttgctgccgtcgtactcgatgcccagcgcgattttacagatcggctgttgctccatctcagacatcagtacaggtactcctcaatcagcttctcggcgatcttcaccgccatcagcgcgccgccgaagcgcacgttatccgctaccgaccagaactggatctgctccggcataccgtaatcgttatgcacgcagccgatggagaggcgggcattgccggaggcatcaccaacctgagtcgggaattcgccctcttcagaaagttcgatatcctcgccgcgggtaaaagcgtcgcgcgcctcctccgccgccagcgggcgcatcgcttcgaagctcaccatctgcgcatggccgtagaagaccggcgactgaacgacgctggcggagatcatcagcccgtcatcctggagaattttgcgcgcttcatcgacgatccggcgctcttcgcgcacgctaccttcacgatccggcagcagcggcagcatgttgaacgccagctggcgaccaaagaaatcgtcttcatcgataggaatgccgttcagcagcttagcgctctgacccgccagcgcatccaccgcttttttcccctgccccgaggcggagagcaggttagtgacgctaatgcgcgacaacccgccctgatcgatcagcggtttgagcgccgtcaacagctgactggtcaggctattaggcaccgcaatcaggttgcggttgcggtaatcgcctaatacgaacgggttcacgtccggcaccaccagcggtacgtccggctccagcgcaaacaggccgctgagatcgataaccagacacccggcgttggtcgcttcttcgacatacgctgcactggcttcgacgccggcggcgaagaaagccagctgggcctgggtccagtcaaattcggcggcgtctttgacgatcaccgacttgccaccaaaacgcagatgttcgcccgcgctgtcgttgcgcgccagagcaaaaatctctcctaccgggaactggcgttcagcaagagtttcgagcagggcttcgcctacggcgcccgttgcgcccagtacggcaatattccagccttcagacatggtggttaactccagaaataaagcggccccgccggagtatccggcaggggcattaagaagacattaacgaacaggatgatgcacggcgttaaaaccgagctggcgcaacagcgtcgccgcctgctcatcgctgcactgcacatacagcgaagaccattcgcgacgttcctgataatttttacgcagcttgtcgaattcaccggcgacgccggccaccttccgcagcggcgcatcatcgcggcgcacatcatacaccaagtggaccagtcttttcagcgtcggctgatcgagcggtccatgcagggtaatgcggccaaattccggcgccggcagcagagtgtccagcgctacctgctgcggatggccgataaaggcgctgtaggcttcaaaaacctgcgtcgtcccgcgcgctttcccttcgagggtgtagccggcgatatgcgcggtaccgatatccactcgcttgagaagctcaacgtttagatccggctccggctcccagacgtccaataccacactcagcggctgaccagcttccagccgctttagcagtgcggcgttatcgaccaccggcccgcggcaggcgttgatcaaaatcgttccaggcttcaggcggcttatcagcgcctcatccgccagatgcagggttttatattgcccttctttatacagcggcgtatggaaggtgatgacatcggcttcctggaccagcgcctcgagggagcggaagtcaccttcgtcgccgcgatcggcgcgcggtgggtcgcagagcagagttttgatccccaacgcttccaggcgcttttgcagtcgcccgccaacgttaccgacgccgacgatcccgacggtgcggtcgcgcagtgcaaagccgtcgcgttcagccagcatcagcagcgatgaaaaaacgtactctaccaccgcaatggcgttacagccgggcgccgcagagaaaccaatccccgcctgctgcagccacgcctgatcgacgtgatcggtgccggcggtagcggtgccgacgaacttaatggccttgccggcgagcaatgcttcattgacccgggtgaccgagcgcaccattagggcatccgcatcggtcagggcatcggccgggaccggacggcctgggatcgtctgcacgtcgcctaaacggctaaaaagctcacgggcatagggcatattttcatcaacgaggattttcacagttcagtacctgtctgagaacgagagttaactggggaagtgtgccataatctggccgccaggcatactcatcacctggttccagcaccgcgatatcgaaaggatgaatcatgacgcacccccttgctgatatgccagaccgtcctccagggcgaggcccatcaggcactgccgccaccggcgaaccttcgctttccatgcagcaacgcaccgttctggagcgactgatcacgcgcctggtggcgctgacctcgcagcagaacgcggaagtgtgggcctgcgtcaaacatgacctcggactgaaaggtgactcgcccctgctggcctgccatttcagcgccgcggaggccagtctcaaccagcgcttagccgccgctcaggataatcatcatcatcgccagaccttagcgcagctcagcgatctgctcggtcagggcaataaccgccaggcggtgagcgattatattcgtcagcattatgggcaaacggcgctgcatgcccttagccagacgcagctggagaacattctgcatctgctgcagcatggccagctgtcgatcccgcagccgcagcagcgcccgccgaccctgcgcccgctgttgccagccgagcataatacgctcaatcagctggtgactaagctggcggccgccaccggcgaaccaagcaagctgatttggcaatccatgctggagctttgcggcgtcaagtccggggagctgatcccggcgacgcacttcctgccgctttcgtactggctgcaggcgcggcaaacgctgagtgcgcaaagcgcgccgacgctcacctcgctgcagggagcgctcaagcagccgctggaggccgcggagtggcagaaaattgtcgactttgcccgtcgcagctggcaggtcacgccgcagaccacgctgagcccggcgcagatcctggcgctgctgaacaaggtgtttgtgctgcgggtggcccgcgcccaggagacgctggccatcccgcaggaggagccagtcgccaggcggacgtggagcgctaagccgtggcagctggcgctgggcgcggttgtcctgctccttgtgctgtggctcctgctgtagcccagcagcctccggcggcgtttacggctccccttcatgccaaacgccgcggtgtttcctacagcgttttcaggccggacaataacctagcggcgaaatgagataagggtgacgaggatccccagcgccgcgcagagggcgccggcaaggaacaccgacgagtagcccagcgaggtcgccagcaggccggtcagcggcccggtcaggccataggagatgtcctgaaaggccgcatagccgccgagcgcggtgccgcgcacctgcgccgggacgcgcttcactacttccacgccaagtgaggggaaaataagcgaacagccgcacccggtcagcgccgcaccggccagcgccagccaggcattcggcgccagtcccagcagcgtcagaccaaccgcctctatcagcagcgagaccatcgccaccttaacgccgccaaaccgatccggcatccagccgaacagcactcgcatcagcacaaaggcgccaccaaacgccgtcagggtaaagccggccattggccagctatggctggcgaaatagagggagacgaaggtgccgatcaccgcaaagccgacaccctgcaggcccaggccaatgcccgggcgccagatcatgccgatgacgctccagagtgaaggccgctcgcctccgtgggccgccactttgcgcacggtaccgttaataagccaggcgacgagcggtagtcccatggtgacacaggccagcaccgccacgccaaaatggctatagatcaataatcccagcggggcgcccaccgccagcgagccgtacatcgccatgccgttccatgacatcactttgccggaacgggccggacccaccaggcccatcccccagctcaggtttccggtcagcagctggctttcgccaaacccgaggatcaagcggcccagcagcagcaggccgagcctggcgagcaccggcagcggcagcagcgcagcggccagccatgccgcgcccgccagggcgcaggccagcatcccctgcaggacggaacgtttggcgccgtactggtctgccaggcgcccggcgtacccccgggtcagaacggtggcgaggaactggatccctaccgccacgccaaccacggtgttgccaaaccccagctcctgatggacaaagagcgggatcaccggcagcggcaaaccaacggtcatataggtcaaaaagacggcaaacgtaatacggaaaagcgaaaaattcgccgaagaattggatgttgtttcagtaactgcggacatgcattactccagattcgcagagtaaggcgagcaaaacgacacgccccctccacctgattatcagggttaaggcgcgttggttgacgttaaacgcttacgcattagtggagagactaatggatccgcgagcagtgtgcctgcgggctcttaccctgtcaagatgacaaaaaaggggagccggtggctcccctttgcgcatcacatgctgattaggcgttgtatttacgcatcaccagcgtggcgttggtgccgccgaagccgaagctgttggacattacggtggtcagcttagcgtccgtcggtttggtgacgatgttcaggccggcagcctgctcgtcgagctcttcaacgttgatgctcggcgcgataaagccgtgctccagcatcagcagggagtaaatggcttcctgtacgcccgccgcgcccagcgagtggccggtcatcgctttagttgccgaaatagccgggctgttgtcgccgaatacttcgcggatggcgcccagctctttcacgtcgccgaccggagtggaggtaccgtgggagttcagatagtcgatcggcgtatcaacgccatgcatcgccatctgcatgcagcgcactgcgccttcaccagacggggcgaccatgtccgcgccatcggaggtcgcgccatagccgacgatttcggcatagatgtgcgcgccacgcgccagggcgtgttccagctcttccaccacgaccataccgccgccgccggcgataacgaagccgtcacggttagcatcataggtacgggacgctttttccggggtgtcgttgtatttagtggaaagcgcgcccatggcgtcgaattcgcaggccatttcccagcacagctcttcgccgccgccggcaaagacgatgtcctgtttgcccagctggatctgctctaccgcgttaccaatacagtgggcggaagtggcgcaggccgagctgatggagtagttaacgccgtgaattttgaacggcgtagcgaggcaggcggaaacgccggaagccatcgctttggtgaccacatacgggcccacggctttcagaccacgcgggctacgcatggcatcggcgccgaagacctggaatttcggggaaccgccgccggagcctgcgatcaggccgacacgcgggttattctgatatgcttcaggcgccagacctgcgtcggcaacagcctgttccatggacaggtaagcatagatggaggcgtcgctcataaagcgcactactttgcggtcaatgaggccagtggtatccagtttgacgttgccccatacgtggctgcgcatccctgaatctttaagctcctgagagaaagtgatccctgaacgtccttcacgcagagatgccaggacttcctgctggttattaccgatgctggaaacgatgcccaagccagtaatcactgcacgtttcattaaatacctctgtaagtcgcactattttaagtttcgtgtcgcacaatagcgtacacttgtacgccgaacaagtccgatcagacattttgtgtataaatttgcgccctcaggcacacatcgttaagatcgtgctacgccttgtgattcgagtaacttacgtgaaacaaaacgccatacaacccgccaacctggaattcaacgctgagggtacacctgtttcccgagatttcgacgatgtttacttttccaatgacaacggtctggaagagactcgctacgtttttctcggcggaaatcgcctgccggagcgcttccccagccaccctcgcccgctgatgatcgtcgcggagagcggcttcggcaccgggctcaatttcctcaccctctggcaggcgtttgacgtttttgttcgtgataacccggacgttaccttgcaaaggttacatttcatcagttttgaaaaatatccgctgaaggctgaggatctccgcctggcgcaccagcgctggccagagctggctccgtgggcgcagcagctgcaggcgcaatggccgtcggccttcggcgggtgccatcgtctgctgctcgacggcgggcgggtgacgctcgatctgtggtttggcgatatcaatgagctgaccagggagctggatgattcgctgacccagcaggtggacgcctggtttcttgacggctttgccccggcgaaaaatcccgacatgtggactcaggatctgttcagcgccatggcgcgcctggcgcgacccggcgggacgctggccacctttacctccgccggttttgtccgccgtggcctgcaggaggccggctttaccatgcgtaaaagcaaaggcttcggccgcaagcgggagatgctgaccggcgagatggcgcaaacgctgagctttcctgcgcgcgtcccctggttcgctcgcagtagcagcgatgcccgcgaggcggccatcatcggcggcgggatcgccagcgccctgctctccctggcgctgctgcgccgcggctggcaggtgaccctttactgcgccgatgaggctccagcgcagggcgcctccggcaatcgccagggcgcgctgtatccgctgttaagtcagcacgatccggcgctggcacgcttttttccggccgcctttaccttcgcccgccgaatgtatgacgcgctgccggtgatgttcgatcaccaatggtgcggtgttacccagctcggctgggatgagaaaagcgcgcataaaatcgcccagatgctggcgctgaatttacccccggacatcgcctgcgcggtgacggcggaacaggttgccgggctgaccggcgtcgataccggctgcggcggcatcacctatccggccggcggctggctgtgcccgcagcagctcaccgccgagctgctggcgctggcggccacacgcggactgcacgtgcactatggttatcccgtcgaaacgctcagcgcggagggcgatggctggctgctcaatcagcagcgctatcatcaggcggtggttctggcgaacggccaccgcatcactggttttgcgcaaaccgcccaactgccggtctacccggttggcggccaggtcagccatattcccaccaccccgcggcttgccgccctgcgccaggtgctgtgctacgacggctacctgacgccacagaatccgcaaaatcagcagcactgcattggcgccagctaccaccgcgggaaaaccgacaccaccttcagcgaagaagatcagcagcacaaccggcaacggctgatcgactgcttcccgggcgcggagtggccacaggacgtggatatcagcgccaacgacgctcgctgcggcgtgcgctgcgccacccgcgatcatctaccgatggtcggcaacgtgccggactacgcggcaacattgacgcaatacgccagcctccacgaacaaccggatatcgccgatagcgcgccggtctgtcgtaacctgtttatgcttggcgcgctcgggtcgcgcggactttgcaccgcgccgttaagcgctgagctgctggcggcgcaaatgagcgcggaaccgctgccgctggatagcgacaccctggcggcgctgaatccgaatcggctgtgggtgagaaaactgctgaagggaaaagcggtgaaataaaaccatgagggcaggcaatttcccgggtacggctgacgcctgacccgggctacaacatggctcaggcctgatttttcgcctgttgatacaggttatgccacatcccctgcaccagaatttggtccggcggcgacagttcgccagcgctgatggctttctccaggctctggctaactctgctgtgtaccgcgtcagcagaatgctcgccctcaccttccagctcagccaccgccagcgtcaggtggccgcgcagataaccgccggcaaacagttcatcatcactggcgtggtctaccatgttgtcaatcagcgccagaatgcgtgattcaaactccgcgatcatcatcttacctcttgtcatgtaatgtgcggccttagtgcaggtcttccggccacggaaagtgtttcgccgtcaatggcggcgtttgataatagtgttgtaacgcgcgaataaagcgcgccggacgttcggggatcccttgttcaagtaaagtcatcacccgagcatgcacccggcgctggaaggcgatgcgatcgggctcaacgtccccttccagattgtcacagctgacgttaaacggaaatcccgccgccacgcagaacagccactcaaaggcctgcggtttcacctcgacatcctcaaactggctttgggtcatcgcatcgcggccgtccgggcagtaccagtagccaaaatctacttgttcgcgacgcgccttgccggcgacacaccagtgagagatctcgtgcagggcgctggcaaaaaatccgtgcgcaaacacgatacggtgatagggcgtttcatcgtcagccggaaggtagatcggctcatcgtcgcctttaatcaggcgggtattaaattcttcggcaaagcagctgtcgaaaaggtctatcagctgctgataatggtgttgctgttgcattaatgaattcccaaccactgcaaaatctcagccccgtggctgtcataaagaagtttcgcgctcatcaccgccgagacgataacgatcatcggccggatcagcgactgccctttactgagcaccagccgggacccggcacgggcgccaataaactggccggccatcatcacaaagccggtggcccagataacctttccaccgatgataaacagcagcaggccgccgacgtttgaggtggcgttcagcagcttggcatgggccgtcgacttggcaaggttaaacccggccagagtgacaaaagccagggcgtaaaacgaaccggcgccggggccgaaaaagccatcgtaaaaccctacgctaccgccggcgaccagcgcaaacggcagaccgtaaagccgacgctgccggtcggcttcgcccagtttcggcatcagcaggaaataaaggccgatgccaatcaccagcaacggcaggatctgcttaagaatatcggattgcacgtgctgtaccagcagcgctccggcggttgagccgataaaggtcatcagaatattcagcttctgatcggccagattaaccaccttgcggcggacaaaatagagggtcgccgatagcgacccgccgcaggcctgcagcttattggtcgccagcgcctgggctggcggcatgccggccgccatcagcgcagggacagtcaataagcccccgcctcccgccagtgagtcaataaaaccggccaggatggcgacaaagaagagtaccaccagcaccagcggcgatacggcaaacaactcgataaaactatccattacagcacatgctcatccagtagcgcctggcaggaaggcggcagcggcggcggcgtcttcttcacagggggggtagacccgggtttaggtggttcgaaccagctctgcagctccgctccgcagccatcgccgggcggcggcggcgcctgatcctcgcactccagacttcccgccgggcaacgcagtcggacgtgcatatgagcgcgatgctggaaccagggacggactttacgcagccactggcggtcgctgcccgcgtccaggcacagctgctgtttaatcgccgggttgacgaagatgcgggtaacttcgctatcttccgccgccagcttgataagctggctgatttgcgggctccatagcgacggcaccacatgcttgccatcgctggcgaccaggtccagcgcctgcggcttcaacagctgggacgatgtccagcgcgtttgcggcagctgaaggaagatatcgacatcgaggcccgtctggtggctggcgtgcccgccgttaaagcgcccgcccgccggcatccccatgtcgccaatcagcacggttcccatacctttattgtgcacctgattactcaggcgctgaataaactgaaccagatccggatgaccgaagtagcgacgctgatcggtacgcatcacctgatagccgggggcactcagggggagcgcctcggcgccaacgatacagccattggaaaccgcgccgattgactgggcgctgccgccgatcggttgggttattttctgccatggcgtggcggccaggctaccggcgctggccaacagcgcaagcagtgcgataacggtgtttttcatggttaccagcgtggaattgtcgtcgtcacgtcgccattctgcgcgcgctgacgcataaagtgatccatcagaacgatcgccagcatcgcctcagcgatcggtacggcgcggatgccgacgcacggatcgtgacgccctttggtgatcatctccacttcttcgccaaagcgattaatcgtatgaccgggaacggtaatactggaggtaggcttcagcgcgatgttggcaacgatctgctggccgctgctgatgccgccaagaatgccgccggcgtggttgctctggaacccggctttggtgatttcatcgcggttttcgctgccgcgcagcttcaccacctcgaagccgtcgccaatttccacccctttcacggcgttgatgctcatcagcgcgtgggcgatatcggcatccaggcggtcgaagaccggctcaccgaggcctggcggtacgccgtcagccactaccgtcacttgcgcaccaatggagtcgccctcttttttcaggccgcgcatcagttcatccagggcgtcgattttatccgggtccggacagaagaaggggttctgctcaacctgttcccagtctttgatggccagcggaatatcgcccatctgcgtcaggcagccgcgaatgacgatgccgaacttcgcggcaaggtattttttggcaatcgccccggccgctacgcgcatcgcggtttcgcgcgcagaagaacgaccgccgccgcgatagtcgcgcagaccatacttttgctcgtaggtgtaatcggcgtggcccggacggaacagatctttgatcgcgccgtaatcctgcgaacgctgatcggtgttctcaatcagcagaccgatactggtcccggtggtaacgccttcgaagacgccggagaggattttgacctgatccggctcgcgacgctgcgtggtgtaacgcgaggtacccgggcgacgacgatcgaggtcgtgctgcaggtcggcttcggtcagcgggatgcccggcggcacgccgtcaacgatgcagcccagcgccagaccgtgcgattcgccgaaggtagtgacgcgaaagagttgtccaattgtatttcctgccatcacggctccaatctttttcgttatgttggcgtgttgtttttttagtctttataaataccgaagtgcgcacgggcgtcaatcagctgctgtttggtcagcataaagaccccgtcgccgccgttatcaaactcaagccaggtaaacggcacgtccggatactgctccatcagatgtaccatgctgttaccgacttcacaaatcagaatcccgtcgtcgctgagataatccggcgcgttgccgagtatacggcgcgttagcttcaggccgtcgcttccggaggccagccccagcaccggctcatgctcatactcttccggcagatcggccctgtcctcttcatcgacatacggcggattggtgacgatcagatcgtactgcagcttcggcagatcgcggaacaggtcggaacggatcggcgtcacgtgatggatcaggccgtgggactcaacgttgtgctcggcgacggccagcgcgtccggggagatatctaccgcatcgacttccgcctccgggaaggcataggcgcaggcgatggcgatgcagccgctaccggtgcacatatcaaggatgtgctgcggcttatggttaatcagtccggcaaactggttattgatcagttcgccaatcggggagcgcggcaccagcacccgctcatcaacgtaaaactcatggccgcagaaccacgctttgttggtcagataggcgacgggaatacgctcgttcacgcggcgaatcacccgctctacaatgcggtgtttctcgctggaggtcaggcgcgcagtgcgcatgtcttccgggatatccagcggcagatacagtgaaggcagcaccagctgtaccgcctcgtcccacgggttatcagtcccgtgaccgtaccagatattagcagcgctgaaacggcttaccgcccagcgcagcatgtcctgaatggtatgcagctcattgactgcctcatcaacaaaaattttatccacgacatcctccagggcacactctgctataaattcggcggctagtgtgccatgaagacggcgataaatcagcattcttgcgataaggggcgggggaaaaaacaggttttccttgcccgaagggatattgagtcgggtaaactagcgcaaagtatgaatgagagcggacaatgaaaaagaagacatcgcttagcgaggaggatcaggcgctgttccgtcagctgatgaccggcacgcggaagatcaaacaggacactattgttcaccgcccgcagcgcaagaaaattaccgaggttgctcctaagcgtttgctgcaggaacaggtcgataacagccactatttttccgatgagtttcaaccgctactgaataccgaaggctcgacgaaatatgtccgccccgacgtcagccatttcgagctgaaaaagctgcgccgtggagattattcgcctgagctgttcctcgatctgcatgggcttacccagcagcaggccaaacaggaactgggcgcgctaattgccgcctgccgccgcgagcatgtgttttgcgcctgcgtgatgcacgggcacgggaaacacatcctcaaacagcaaaccccgctgtggctggcgcaacatccgcatattatggcgtttcaccaggcaccaaaagagtacggcggtgacgccgcactgctgatattgattgaggtcgaggagtggcaaccgccggagctgccgtaacggcgggctccggggggccgtcagatggcgttggccatcttgaggttgcaggggcttttttgccagaggaactcacctttgccgtcggcatccagcgtcacgcaggcgatagccgaggtggtgaacatcgggggcgtttcccccggacacagctctgagaccagataccccaccagcggcaggtgggagacaaccagcgccgtcgccacgccttcattcgccagcgcctgcagataggcgctcaccattcccacatcaccgcacggcgtgagctccggcatcacgtcgacatgtttcggcaggttcatgcactccccaacaatatccagcgtctgttccgcacgcagatagggactgacaagaacgcgctcaatatccactttttgacctttcagccaggttgccatctgacgagactcatcacaaccgcatacggttaatggacgaaccgagtcactggctgcatcgagggcagcgtcgccgtgacgcataataaaaacttgcatattgcaccgcttttgttaaccagaagcaccgtagtttggcctgcgaagacaatacgcaggtgacccggtggccgggcattgtgcctgatccattccacgaatgaaacgctgttttttacctcaatggcgtaagtatagtcaatcattgtttacaaaacagccaatcaacagcgtcgtccgcagccggatttaccttctttgaccacaacttaggtcagccgttcatccgctggccaaaaggtggtcccctgttcggccatgcgtaataaagtgtcacagggtgtaaaacgtgggccgaactgggcggccaggcgctgcaggatcgcggcaacttcacccgcgccgatagtatccatataccggaacgggccgccaagaaatggcggaaaccctataccaaagacggcgccgatatcgccatcgcgcgcgctccggataatctgctcatcaaagcagcgcgccgcttcgttaagcatcatcatcacacagcgctccgccacctgctgcgcggaaagccgcgactgcgggcggccgatgccgagcagcggatagactgccgggtcgggccgttttttgcttttacgcccttttgtctcataaagatagaaaccacgattattttttctgcctttgcgatcgtccttcaaaatcgcgtcaatgatgtttgcaggcgggctaaaacgttctccaaacgcgctctccagcacggggataattttggtgccggtatcgatacccacctcatccagcagttgaatcggccccaccgggaaaccgaatttaaccaacgcgttatcaatgacttcaattggttcgccttccaccagcaggcgcatcgcttcattgatatacggcgcgaggatacggttcacatagaaccccgctttatctgcgacaacaatcggcgttttcccctgccgtttagccagctgcaccacggtggcgatagtctgcgggtcggttcccttgtgtgggatcacctcaaccagcggcattttttccaccggactgaaaaaatgcaggccgattacctgcccagggcggctggcgtgagcggcaatatcgccgattggcaacgatgaggtattcgacgcaaagatggtctgcggcccgccgtattgttccacttcgctgaccatccgctgtttgagagccaggtcttcaaataccgcctcgatcaccacatcgcgatgagcaaagccctgatagtcggtagtgccggagatcagcgccatctgacgatcgcgctccactgggcgtaatcgacgctggcgaacctgtttattcagcagatcccagctgtactttaaggcgtggttgatgccacgcggctggatatctttaatccgcaccggcagcccgcccttacaggcggtcacataggcgatccccccgcccattaagccaccgcccagtactgcaacgcttctcagcgaaccggggcccgcctcggcgccagggtcttttttcagatcggtactggcaaagaagatcgatcgcagcgcctgcgactgcgggctcatcgccagttcgccaaatgcgcgcgcctcttcagcgtatccgctgctgcagccatgggccagaccattctcgacgacctgcaagattcgcttcaccgccgggtaatttccctgcgttttgcgctgcgtttgtttaccgacaaactggaataacagatggcgccccaggggccctgccagtacgcgttcacgaacaggcacctcccggctggtcggtcgtcccttcagcgccaactccaccgccgcctgcagtaaaatcgcctgcggcaccacctcgtccaccagaccggccttcagcgcctgccgcggccgcagctgcttgccggtgagcatcatatccagcgcggtgctgaccccgatcagccgcggtaaacgctgcgtcccgccggaccccggcagcaggccaagctgtacctccggcaagccgagtcgggttttttcgtcatcgctacagatacggccatgacaggccagcgccagctccagaccgccgccaaggcaggcgccgtggatagcggcaatcaccgggatcgacaggccatggatctcagccataatctgctgtccctggcgcgccagcgcttccgcctcctgcgcgctgcggcagcgggcaatcatgttgatatcagcgccggcgataaagttatccgctttggcggagataaatactacgccgcgcactgacttatcgtcacgtaactggcgtatcaatccccgtacctgactgccaaattcggctttcagggtattcattttttcacccggggcatcaatggtgatcaccgcgattttgtccgcacggacctcaagcttaaaagcggaaacagtatccattattcagcctccacgatcatcgccgcacccagaccacctgccgcgcaggccgtcaccaaaccaaatcccccgccccgtcgccgcagctcatgcagcgtctgggtgatcatccgcgcgccggtggcggcgaaggggtgaccgtaggcgatagagccgccgaggacgttaaacttgctttcatctacctcaccggtggcctgcgagcggcccagcacctcgcgggcaaagcggtcgcttgccagacactggagattggccagcgtctgcgcggcgaaagcttcgtgcatatcgataagcgtgagatccgccagcgtcaggccagcgcgctccagcgccagcggcgtggaccacgcgggccccagcagcatatcctgccagacgtcgatggcggtaaaggcgtagctgcgcagatagcccagcggcctcagccccagctctttagcccgcgactcggtcatcaggatcaccgctgccgcgccgtccgtcagcggcgtactgttggcggcggtgacggtgccatgtttgcggtcaaaggccgggcgtaacttctgataatctgcgagcgttgaatttttacgaatattgttgtcctgctcgagcggttcgcggaaagggggagcataggcggtcatcacctctgcggacagtttaccctcttcccaggctttcgctgccagctggtgcgaacgatgcgccagggcatcctgttgctcgcgggagatcccccagcttttcgccatctgctcggcggtatcgcccatccgcaatccggttgaatattcagccaccgccggggggaccggcagcaggtcgcgtggccgcagacgggaaaacagcttcagcttttggctcagcgtgcgtgccttattggcatccactagcgtgcgggccagcgttttactgaccccaatgggcaggacagaggaggagtcggcgccgccggcaataccggcgcggatggtgccggccatcaggctttcagcgacgttcgccacggcctggaaactggtggcgcaggcgcggctgacgctataggcgtcggtatgtacgctcatgccggtacccagcacaatttcccgggcgatgttcggcgcttccggcatctgcaccacctggccaaagaccagttgctcgatgacttcggcaggaatgtcgctgcgcgccagcatctcgccaaccaccatttttcctaaatcaatggccggaacgccatgaaaagccgtagcctgacgagcaaatggcgtgcgtagccccgtgacaatggcaatgcgatcgccctgacgggtgataagcggtaatgcctgactcataacactcccctgttaaccaagacaaccaagtggtctgacctgataacattcttaactaattttttacattaagccaatcggagaagcgcaaaattgcgagccaaaacacagtgaaaagaaaaggaaacgccccttatcaggggcgtcgagggggaaggattaacgtaagcccagctggaagatcagggattctgcttcgcagctgaaaacaaaatcgatatccagctgcacaccgccgtcaacgtcagtgaaggttgggttaatttggcacggctcagattcgacattgcgggctttttcgcttaacgcggcgagcgtttgctcggcttcagcgcggttggcgaatacgcggctgtaggaggcggtgcagtcggtgttgtcaacaatcgtgccaacatccatacagcagcaaaccggggtttcatcagcgctacatttactcatcgtagatttcctctggagatgcaccttcggtgccagaaaaattatgtgtctattttacgccctgtccccggtaagcctccagccgagaatcgctctgccggcgttaagtgacagaaatcacacttaaaaatgatctaaaacaaaaatccccttctgtcccccttgctctctccgagatttttgccagctggatcgcgtttctgttatcacaattgaaaaacttcataaacatacttgcaacaaatcatctggtcagacctatactcagcgcactggtctgatttcttggttgtaccgcagaccctacactcccgcgcttctgttacggcatgtaacatagtttaaaaaaaaataactcaatgaggttatgggcatgagccagaaaacccgctttacccaatctgcccttgcagtggctgtcgcacttgtttccacccaggcctggtcagcaggcttccagctcaacgaattctctgcatcggggctgggtcgtgcctattccggtgaaggggcgatcgctgacgatgctggtaatgccagtcgtaacccggcattaattatgatgtttgaccgcccgaccatgtcggcgggcgccgtgtttgtcgacccgggcgttaatgtttcgggcacctctcccaccggcaagagcctgaaagcagacaatatcgccccgacggcgtgggtgcccaacttccactttgtcgcgccgattaacgaccaatttggttggggggcgtctatcacctctaactatggtctggcaacagagtataacgatgattatgcggccggcagcatgggcggtaaaaccgacctgaccaccgcgaacttcaacctgagcggcgcctaccgcctcgacagcaactggagcttcggcttaggctttgacgcggtctacgccaaggcgaagatcgagcgctatgcaggcgatctggggcagattgtcgcaggctctggcgcgctgccgccggcgctggcgggccaggtagcgaagatcccggccgacacgcagatcgcccatcttaatggcaacgcgtggggcttcggctggaacgccgggatcctctatgagctggataagaataaccgctacggtttaacctaccgttctgaggtcaagatcgacttcgacggtaactaccgcagcagcctgccggcggcctataaccagatcctcggcaacttcggcctgccggcgggcaccagcggccagacgaccaatggttcgctaacccttaacctgccggaaaggtgggagctgtccggctataaccgcgtggcgccgcagtgggcggtccactatagcctgacctacaccagctggagtcagttccaggagctgaaagccaccggcagcaacggccagacgctgttctataaagaggaaggcttcaaggacgcctatcgtcttgcgctggggaccacctattattatgacgataactggaccttccgtaccggtatcgccttcgatgacagcccggtgccggctaataaccgctctatctctattccggaccaggatcgcctgtggctgagcgcgggtaccacctacgcgttcaataaagatgcctcggttgacgtcggcgtttcatacatgcacgggcagcatgttgaaattaaggaaggcccgtataccttccgttccgaaggaaccgcctggctgtacggcgctaacttcaactaccgcttctgataagcagcgcgccacaaaaaagggtgaacattatgttcaccctttttttatcattcgccgatcactgtgaatcgatatccttcagctcatcctgaatagcctgagcattcgggttgtccgccggggtcagcttaccgccgttggcgataaagtcatgacgctggaagtaggcttcacgcatcagaatgtaagggtcggaagactggcgcagcaggccgtcggaatccagcagctgagcacgtgtctcaatcccttccaccgcccatttaccgatcgacatcggccaggtcagccaggagagcaccggatacaagccatcggccatatcgccgccttcgtcgcgcagggtaaagcttccatagaacggcaactgaacatacgggccatagccaacgccataatgcccaagcgtactgccgaaacgatgtggctcaacccgctgtagctgcggattcgccatcccggccacatcgataagcccacccataccgagaatggtgttcaggaagaagcgggtaaaatgcaccatacctttataggggtcgccctgcaggaagtagttcaccatcactgccggctcttccaggttactggtaaaattgcttaacccgttgcgcgccggctgtgggacgtagtcgcgccatgccaccgcgacggggcgaagcacgtaaggatcaaccacgttaaagttgaaattaaacatcgtgcggttaaacccttctaacgggtctgagcgcccctgcggccgatcgccagagctggaactggcacatcccaccagcaatgtggcgccaagcgcaagcgccgacaggcgataattcatagatgtctccctggtttttatggctatcgcgagttgccatccatgacggaaagacaacgcttccgcccgtaaagatgtgagcgattgtaacagcacgttgaacgatgtctatatcacccaagttgttgatttgatcttagcctgggaataacgaaatcgcggggctcctattctaccggagcgacaaaaatctgacgttaccatttttgcgatttcagagtatgcccagccagacggcagggaaagccgctacgctataactatacagattgatagcgagggccacgaaatggatgaactagacaataacaaattaaaggcagaggatgacgaaagagaagtggaaagtgaggaaaatcagcgtggtgaagagatcgaagtaaatgaagatcgccttccctcgcgggcgatggcgatccatgaacatattcgccaggaaggggaaaaagagatggagcgcgatgcgctggccctgctatggtcagcgattgcggccggcctgtcgatgggggcctccctgctggcgaagggaatttttcacgtcaaactggaggggatcccgggcggttttttgctggaaaacctcggctacaccttcggctttattatcgtaattatggcccgccagcagctgttcactgaaaatacggtcaccgccgttctgccagtgatgcataatcccaccctcggtaacgtcggtttgctgatgcggctatggtcggtggtgctggcgggcaatctcatcggtaccgcggtggccgcatgggccttcaattatatgcctatttttgatgagccaacccgtcaggcctttgtcagcatcgccgaagacgtaatgaaaaacagtccgacagagatgttcgccaatgcgattatttccggctggctggtcgccaccatggtctggatgtttcctgtcgccggcgccgccaaaatcgtggtgattattctcatgacctggcttatcgccctggcggataccacccatattgtggtgggctcggtcgagatcctttatctggtgtttaatggaaatctgccctggagcgactttatctggccgttcgccctgccgaccctggcgggaaatatctgtggcgggaccttcatcttcgcactgctgagccatgcgcagatccgtaacgatatgagcagcaagcgaaaagcggaagcccgcgcccaggcggcggagaaagggaaaaaggccgaccgggcataaaaaaagcgccctgagtggcgagggtttaagcagtcagacggtatggctcttactcaggcgggcaaaaaacgctatactcgtgccgccttgtccccttagttaaatggatataacgagcccctcctaagggctagttgcaggttcgattcctgcaggggacacttgttttgagttcgcagcaattcgtcatagtccgccgaatcccgccagtatcaagcctctcatgaaatctctgttcgcagtagttcgcctcagaccgttgacaaccgcgccttttggcgggtaaaaaacgagtaaaacaactttacccaccggaattttacccatgctcactgttaagcagatagaggcagccaagcctaaagacaaaccctaccgaatgctcgacagcaatggcctgtacctgtacgttccggtttctggcaaaaaggtgtggcagctgcgctataagatcgacggcaaagagaaggtgctgactgtgggcaaataccctctcatgtcattgcaggaagccagggataaagcgtggactgcaaggaaggatgtttctgtcggggtcgatccggttaaggccaaaaagttgtctgtgaaggacaattcattttcagctatttatcatgaatggtacgaccacaagcggcaggtttggtcagaaggatatgcggatgaactttctcgcatgttccgtgacgatattctgccaatgatcggatatctggaaatacaggacattgagccgatgcaaatactggaggtgatccggaggtttgaagagcgcggggcaatggagagggcaaataaagccagaagaagatgtggcgaggtattcaggtatgcgattgttacaggccgggccaaatataatccggcgcctgaccttgctgatgccatgaagggatatagaaagaaaaactaccctttccttcctgcagatcagataccagcattcaataacgcgctatctggcttttccggaagtattatttcgaaaattgccacacaggttttgcaatatacagcgctgcgcacaaaagagctccgttctatgcaatgggaaaacgtcgactttgaaaacaggatgataaccatcgacgaagaagtaatgaaggggcgccgcgttcatgtggttccgatgtcagatcaggtaataaatctcctgaatactctcaaaccgatcacaagccctgtttcctcttttgtgttcgccgggcggaatgataagaaaaagcccatcagcgagaatgccgtattattagttatccgacagattggctatgaggggctggcgagcgggcatggattccgccatcagttcagcacaataatgaatgagcatgggtggccagctgacgcgattgaaaaacaactcgcgcacactgccagcggttcaatccgtggaatttacaaccatgctcagtatctggataagcgcagggagatgatgcagtggtgggctgattacatcgatggtcgcgcaggcgagtaagccattacgcgaattcttccaggatcaggatgccatccgcgccatctcctgagatgccaaaatctgcgagcagctatccagcacgatgtcaggcgtattcctcgattataacgatcccattctgaccatctgcaccaggattcacaggcattgaagggccattggaacatccagatgccccgccgccatatccaccgccattgttcgctggattatttatggcaggaattgatccccctacgccaagttggctatttgccccgcgcgaggcgattgcatattcagttgaaatggctgatgcacattccgatcccggaccgcttatcccgacaatattccagccggtagggctgtttgagtttgtgttcgctactggctgaaatggaggattagccggccccgcagggaggcccgctttgcctcctggagcggaaatcagcgctccgacggagctagtccctccgtcctccccataaatggatgatgcagtaccacctttgccgccctgaccaatagtaatcattactgaggttaatgcggatacatcatacatcccctctgcgtatgcaccagcaccgccgccattgcttatcgaaacttgaccagaaccggtagccggtgcagcagagctaccaccgccgcctcccaaaattctaatcttccattttgttacaccaggagtttttgtaaatgatccggagctcgtaacgacgcgcggaaagccaataaggcgaccattaatcgtgccatctgacgacccgagatttaatagcgcctgctttacagcttcacttccttcatctgcaatttcagagaaattatttgatacttgcagacaggaaagtaaagaccccgcagtcatcatatttgccgcaatatcgtttgttgaccatactcgcggagtggtcccctcctgaccacgaattaccgtcattacatcaccagaaacagacgtgacgtgcatgatttcggaaattgttttcgtggctgcgtcggttatcgttaatttgaaataactttctcctgataccggcgatggaaataaagcccccgttcctgtcccaacggtaataacggtagcggacgcgctaatacccgcagcgagtacactctttgcgttattgttggctaatagcttcagtgccatatataccccagttaaataatcgaattatcagaacgaacatcgcagattgtgaacgtcacgacgccggcgacagtaacatcgtccagggcctcgccctcaattggatcaatgcaggattgacctattaatacatggagcagatatcaagtaagcgcagcaagaaggtcgttgaagtttgtgtaagaagttgatggcgtgtagtctgatggaacaaaatagcgacttacctttccgctgtaaggtgatgatacgtaaatcacatccccacctacccctggtgctgaccccaaacgcagaagtgtaggcgcggagtcaccaagtattgaatatacccatcctgtacctgcattttcagcaaggacgatgacagcgacagtactccctgaagaagtatattccaccgaaaagtaaacccgttttttgactccttgaaccgtcgccgccagagcagcagacgtattgccgatttcagggggaacatacgcgagttcttcttcgatccatgcagttccattccatatagaattttttaccctgaaatttgtaaatgcagttcctgtaggatcgtttatttctctaaacctgaaggttatgtgggacaaagattcaccagagaaagcaaacttcgctgactgaatccctataatcagtgcattactgatatttgggtcttctcctggataaagaggtttataagcaagctgaccctgcgttactggcatgtcaaaaacagttccagacacatttcgcataagcccatcattgcctataactccgtactctccaacatgacggaccgctgacgcttcatattttgcccattcgtagattaaatggactccagctgaattaacatgcatgtcgtcaggataaaccgccctctggtcctgctctgcaacatgtgcaaagcgactccacagcctgctcgtaatatcatactgataaagaaatgatgcgcgcttaatttctcctgtcagacttctatctgatgcgcgtaacattgcaaaaacattaccatcaggtgccctgccaacgatgggataagtacatgtccattcaacatcagggaaatcccttgttgcatcaaccatggtgcttacatcgcccgggagggagcttctgaagtagcgcaacaaattagtatgcattgatgtaaatacatgaatgtagccagcgccatccacgactacagagggctgattatgcccaacatcattaacatatgacgccacggtaccatcagtgtttttacacaaacctcttgtcagggtaccatccgcatcacgccttacaatttcgacctgatgataaccagccgtgccaaattctttgcacagcccatagtattcaaggccctgaaaactatcgacggggtgccaccaccccgcctgattgctttcagaggcctgatcagagattacagagatcgacagatcagccattcaccgttacccccagatacgcagctcttttaagaaggcgctcagcaaccagcatgatctctgtattgcttaatttgcgtggatataacgctacgccataccctgaccacgctgcaaatgcactgctggcattacttccaccaaggaatgtggatgaggtgcctgtattaacggcagtgctggcagtcgccgcggttaccgagtttcgcgtcgccatgccaaaaacatgtccagttaaatcgccttgtaaaaacacaacaaatgcgccgcttgccggcaacactatatctgacacgacgctccctgcagtcattgagcgcccgagttttttatctgcactggtagtaaggcggatatcccgatggcgcataataccagcgctaacaccaacatcgaccaaaccgatcatggtataagcatcaggtgaaaatgtgcctaaagtcaaacggctgtctactccggctgctgctgacacgcctacagatgaaaatgcagcgttacctgacaatgaaaaattaccgccagcactcccccagtttttgctacgtcttgactcagggatcgcagaactctcaaggtttccccataccagagggctggctaccggtggaatataattattagaatatgctgctgcgtccgtacctgctgccataattgcaacgcccatgaatatccccttactgtaagttgattgctctttcagccatgcgctgacgagaattaagataaacggtattaacatcctgcattgataatgcagaatcgaaataaataaactcagctacatcaagacctttagttttaaacatagatacatcacagtacgcattaccaatggcaatattcctgccagacaatataagtctgtcagtatcagcctctcttagcacctgataatactcgccgctaatactaataacctgatagcggtgaccagaacctgttagttttactacatgcgagataaatagccatttatctaccggagtctgatcgaatgggtagcgtctggaagtggctctgtatccggatgtttttgaacgaacccagcgacggtcgtctctgtcagaaaagagagagatctggtttccagtataggtatcgtcatcgtcacgaggcgaatacccattttgggtgccatatactaccacgcaatcactttgcggagattgaacaggaattctaactactgcacaaactgtatattcccctgcatcaggaatatctgtaactaaagcccctccccatgctgacagagatacatagtttttattaaattctggcgttgactgaggtgagaggattcttccgtgaacccttcccaccatagatgtgtcaggataaccaaaaagccagtgatcgacagagccggtttcaagaattgacggaactggctcgccaccacttccgccattatcctttcccacaaatgtgccatctaatttatacccaaatattacaaatccaaattggtcggttgtacattgcgcccagtctggtgcatcaaaaataagattatcacctaccctttgccttcctttgctgtctacaagaatcagctcgttaccgaattcgtcagggaaggaaagaagcgactctgaatctgtcagctcgttatttccggcaaccaaagtaaatctttctgacaaaacatctaccgcattaccaaaatcatcaaccagcatgaatcctggtcctgagtccatctgaactatcttaacctttctggtctcaaaactattttcggttacttttccgacctcataaccaaaataatcacataatgacaagagggatgaattttcaccttcgaaaataatggatgatctttccatgaattcagcgagcacagcctgaattaccatatcatacgaaggcattttccttccggttggctccagcgtcccgccattatttataacttcaatagccagtgcactatcatcaggactgcgataataggttgtgctcccttcggggatgttcgcaatatccgcctgcgccgccgccagcgtcatgtactgccggctgagagggatcaagttctgccgcgtttcctcgacaaccttatctccttccgccttaattccgtctacggtgtaatgctcacccccgaggcgatcggtgtatgtcaggtcggtactggtgacaaccttatccagcatggcgccggcataaactgcatcccggatatccgtgctcggaacagcgttatctgtgggagttggtaacggtacttctgccattgtgcatgtcgccctataaaaggcgcacgaagccctcagaagtgaatctgatggtgtgcgcgaaggttggttgttacgggtaaataatgtctgaatactcagatagcgaaagcgtctgagtatcgtcgccgtttggtttggcgctttctacgcgccagatggtggagttaagttctgtgtttgttgcgatgaaataccggctggcattctggactataacccggtcgtaaatattgaggtcgaaagcatcggccgcggactcaaaagcctttggattatcgtcaacaggatatgcccgccagcgcccacggtaattcccgagactgtcggtcatcaccacccacatctcaccgagtgagaagtcgaggcgctctgaggtcgaaaacacgtcaccggatcgcccggtgatatagcctgtttgctgggtgttgtcgtacatgtcaggacactgcacaaccgtaccgcgcacaacctgagtcgactccagcaccttcaccgtcatggtcagacgtgagtagagaatttttctcgcctcaagccaggcccggtctatcgcctgagtggcgtttcggcagccgtccaggctgatctgcatcgcattaaccgtggcgtcctcaacctcagtgattccgctgctgtctatctgcaggtagatgtacgcctttttgttcgtcagcgggtctacgtagtccagcgccacgccgtcgtaaccgcccggaagagacatttgccaggcgactttgtactcgtcccagaacatgtttgagcgcgcaaaaaccgcatcgggatttgtcactttctcatcacgccagaacgtcagcacatcgccgatattattgccatcaacgcgggctacattggcgatcgtcgctatgcgctcaccaagcggctgtttctcatccgagaaggtgtaatcgaaatacccaagcgcctcatcaggcagcgaatcggcaatggcatacagagcggcgacgtcaatactggctatgtcctgcttacctacgacaacccactcatgcaggatagcgtcagcaaacgaacgacttggccgcagcgtgtaatcaaccgcgccggttgtccggtcgtagctgatggtatgccgctgcgccagcatgttgtacttctgctcgcggtttgagttgctgtcgttcggccccttaatcgtgatgcgggcaattgtgtcctccggataaacgacgttttcccgtacgttaaccgcgtggatcgccatcagcgtcacgacgttggcgtcattgctgttatcgaggcgctcgatggtcaccgcatagcgccccgccccgacagccgggacgaacttgtgcgttgtgcggaaataccgggtcgtcacctggaagtcgttatcgaagaaataatcatgctgctcggatgtgcccggcacctgattgttgtcgtcatcgacctgccagaacttgatccgatattgcgttgtgccggccgtcgcgccgagctgaacaagcacatgcacccagacctgcgtcgagacgattggcgacactgacggaccgataacaaggggtgtctggtcattcagcgtgaacagagtcgagttgataaccgcattgcccggcagcgatgtaatttcacccgacagttcgccgatataaaacgtcgtgtacgacagcgtgtcgtcgccaataaagctctcagaggagataatattcccggcgccggtgacattccgcgtgacgcttgtgccgccatcgtaccaggtggcattgatgacgaatgacacgggatgcggcactgccagcgcagcgaagtaggcaaagttgtcatcgttcgacagcacgacagcctttagctgattactctcgatcgccaccgatgtcggcaccgtcgtggtcgctgtctgggccgggaagtcctggctttcattcaggcctggcacagtctcgttatcgacgtcatcgaactgatacccgacttcaatcgtgccgatcacgtctcccgggttataaatcgcagaacttgctcccgccaggctgccgagattcgattccgagtatcggatcgacgatatggtgtaccggccgtaaccgacctcaaaccattcagtaagctgtttgttgttgtcgacgaactcgaacagtgcttcctgaatcaggtcaggaaagacgcggcactggccgtaaatattcgggcgccccttgtagagtcgcgcgcggttcgtctggccggttaagtcgttgttgggggattcgcctgtcgccaccgataccgacgcactaggcttatttgacagtccgaacaccttcagcgcgccggagaggattttcgtgaccggacgcaatatcgtggtgatgagctttcccaccccgccttctggctggtcgaacacagccacagtatcaccggatcgcagtggccgactgatatcgtaatcgtctggcagcgctcggccattcagtttcacgataacatcgcggtgcagctgcagagaatccagcaggctcaccagtgtggtgccggcatctaccgttccccgctgcagcggagcgccaggcagcctctgtaactcatatcgcaccatgcaccatgtactccactttgctgtaaaccttcagtaatgccagcggactgtcgcagcgcacgaaaccgaattcgccgcgggcatgcaggcacttaaccgggctgatcatcacaccgatatgcgccggcacttcgccgcggtaaaaaacggcgatgcatccggtggccgccaccgacacacgccgccagtgggcgcgctcctgttcgtagcaggtgatgaaatccgcacccgattcgtagccggcaacgtgatgcagttccaggccgagcacatgccggtaatagagaaccaccaggccccagcagtccatctgctcaaaactgcaggcgcggttagcccagggcttgccgttaacaagcccgataaagtcgctctgtctcatacggtgattagcccgggatagtctttcgtggtgtaaatgatggagttggccagagtcagcgggttagtctttccggcggtcacagtgacgttgctggcatcggcggaaatgtcgttaacatacagcgtccagtctttcagggatgatgcatcaccgatcgcgttccactgctgatacaggcacttaatcggcgtcatacgcgccgccccgcgccagcttttcagtgtctgccggacatgctccgtcgcggcgacaaacgttatggtcatggatatgaccgccgttccgtcctgcgccggctcggtcacgctgaaccgcgcaggctcgaaggcatttccgccgaacgtcgccgggcgaaacaggttattgaccacccggtaataaccaaacgcagggtgataaaactccaccgtctgtttgatgtcgcttgccggccgccgctccttccactctctcaatgtcggcatcagtcggccctcggcataacttcggtgatcaggtaatccagccagtatccatagccaggctgggcctcaacaatccagtcgtcgtagtcctcggtaatgtcctcgataccgttactgatgaccgttgcggtccaggtgacaatgttgccgtttttgctggtctgcaccggcatatcgacgaaatgcagcgtctgctgctgaacgccctgcgtatcacccaggtcgatcggcatctggaaccaggcgcgcccgcggtcacagtatgtcggcgagcgcagccacgacttaaaccgctcggcctgggcaagcgtgaatatccactgcagcgtccaggttgctttcaggtccgtagtgatcggcgtgattatcaatggaccgactgccgtctgcgtcgtctgccaggctgtatcctgcgtcatgttctgatcggcgcgctggggaagcggcaggaacggagggtattgaactgttgccacgtttcctccgggcattaaaaaacccgccggagcgggtttggtttagtaagcgcagttacaagttaaaacaacttgttgatcaccgatgaaaagtcagggaagtcggctatagtcatgagcctaacgctatctttctcaaggattatgacgttaacttgcccgccaatataaactctttcagcacttggcattgcatcctgtattgccctttgttcaaacatcattgccttgataattcccaagatgtcttccccgtcagggactgagcactctggtttgtaaaaccaaccatgagttatttcctctgacctgaagcattctgaagatcggtaggcaaatctctttattcttcccgatgactgagatattccaacatgatagatggtgaccgtgcactcatcacctacgttgtattccttcttatactcctcccacatatcctttagtgtggatggagcatggtaatcaagattatccacgtctaataaaatcatgcggctgtttacaaattccgcccagcgggaatgaaatccacccattcctgtgccgcatataatcgtttttatagttggtagatatgtcgctttattggtaaggataaagggattcccttcggcatccacaccaagagtatccgtcgctacaaccgcgaattcatccgtagaaaagcaaatgaaagaagacatggcatttccttttatctcataattagaaggacccactggctttcatggaaagtccgaacctatccatcataccagatgtcatcggtccaccacggtcaagatcctttaagaacgcatcaaccgtcaccacattaccttcttgcactgcttgggctgcaaatgaatgttgcccgccagtggtctggtcgtagaattggatattgatctctattggcctcgttgactgaggtccagctgaaccgctgtcgccgttactctggctttggtattcactacccgtcgatgccttcttgatacgcggcgatccgcttgtcacatccttgttgctgaataccttcccaccatcacccggtatcatgaaaaggcctttgctggtctgcatgagttccggaaggtttccttcgcctacagggtaaacattaccaggtgataccgagccaccattcttacgtccgccactatagtttattccgcttatggcgctaactatctgcgtgccagcagacaatgcttgcgctatagcaggaatattggcgggccacgggatagccatggcattactgatagcggtctgaagattcaaggacgcctgtgcaatcgcaaaccctttactaatagcgaaaagcgcttgatatgccgcactcgacttccctgctgcttgacctatcgcatccgccagggagccagcaaaattcgacgattctcctaaaagcgaactgacattctgctgataggtctgttgctcctgcagaaggatggcctgacgttggtaagaggcctgctgcatgattgcagttttagcgtcctcgtacagtttggtgttttgcttatcaatttcctggtacttagctagggcgtcaagtttttgttgctcctgcaaattaatctgtgccagtggatcaactgcctgtccagttgaaggatcaacagtagtttgcgcggaagctatctcctgcttggcgtacttctgtccctgctcagcctctttgcgcttctggatggatatagccgctcgctcgtttgcttctcctaacgccctcgcctcttcaagttgcttttgagttgccccactccctagtgactgttcggcgcgcaatccagcctcctgaatgcggcgcttctcaactgactcagtagataggttctgtacggcacgcaacttgtccagtttttgcgctactgattctgcagctgatgctgaacgcttatcttgctgctctcccttcctctgagcctcatgacgggcttcttctgctttctgaaggtcgtagttttctccagccagatcgccagcttttgatatctggtttgggttgtcagtaaccttcgccgcctgcatcctggcttttgtcactgctctttggcgttcatcctgaattttcagtaactcgttctgctcttcgaggttaagaattactttgtcgccatcagcggtaggaggagaaacctgcagcgctttggggttgaagttttgtccagcctgatttgctcggtttatttcatcagcagtgttgccgaaagccttcgcaaccgcgctctgcacctgctcaagtgaccaacccttttggatcagcccatcatgcacacccattgaagtgagcatgttgtttgttaatgttctgttggcttcagctgcagtttcctgagtttgcgccaacttatcttgagcgttggcaagatcccttgatttcttggctaactggtcagaaacctcagcctgctgacgggcaaaatcagcaccttggcccaatgattcagctacagcttgagcttctggggtgaaattacgatatctagaacttaaagagtcaacctctgcttgcagatcggaaatttcatctttctgcgctctaatagactcgttagcatcggcgatggtgcccctgagctgggtattattcatcgccttcattgaggcgtttactttgtccagactatcggcaaagcggagcgcctcctctctggcttgttgagctttctgccagaagtagaaaatggctgatgctgccagcatggctgcgccaccaggaccaccaatcaaagaaagcgctccacgagcaaggcctatacctaccgaggcagcacttgctgcagttgctgctcgtgcagatgccgcggcttgtgcagtttctgcctgcgccaaagacaatgatgctgcacttgctcttgatttagctgcaattaatgcatccagcgcaagcatttcagctgcgctacccttggccacattatattctgcctgcgctaaggcaagggaggacaaagccgcctctttgtctgcaaccgcctttctcttcactgacgtagcagctattaacgcagactgagcggcctgggcattggcagtggcctgacgctgggccgccaaagcagactggatctgagaggcagcagacattgtcaatgcgccgacatagcggcttcccataattgctgctgctgcagttaatgcagcgcccagaacgtctatgttttcacttgcagtcacaactgcatcattaaaaatagcggcgccagtttttacggtagagttttcgccaaagaatttagttacgttgttaccagcaacctgcagcgcctggctgatcgtcgtcgttgtattggcgaactctttcccgatcactgctccttgggatagaagcccattaacaaccacgtcggttgttaacttgccctgcgcagccatgttccgcatttcgccgatgctaactcccatggagtcagcgagagcgacaataagacggttaccctgttcgtttacagagttgaattcctcgccgcgcaaagctccagaagcaaggccctgcgacaactgaataatcgcgttctcggcctcttgcgccgttgcccctgatacaacaaacccttggtttatgattgtggttaacttcgccagatcatctgcgctggtcccgtactgcctggttgccctttccagtcttgcgtagagggatgccgttgcatctaaactactgcgagtttgctgagtaatgttgaatacgcgctctgttacatcagcaagttgctcgttaggccgcagtgagttagccagcttgttatttacagttgcccaggcatctgcatattcggaaatttgcttcgcagaaagagcagcggccaaagcaacggctacgcctgacaggctggacatagagcgctcagtgttattcacggcgcgcgtagtgctatcgaaaccacgttccatcagatcgaggcgttgattaacgcgctgttgcgctacaagcaagccctgcacgtccatttcaatatcgtaataaatgccgccagcgttctcagccatttgctatctccgggcaataaaaaaccccgccgaagcgaggtctttgttagaaccatgaatcagaaattgttggattcttttttatctttatatctctttacttctttatccagttcttcttttgacacaaactcataccgcacacttacatacccttttgacattgcatccattaaccgtcctggtgaaggttcaacgtttaaggtgattgtcatgccatctttctgatactttctttgccatgtgccgcacgactcatcttttatgcattcatagaaatctgccccatcacggcttaccttttctttaatttcaactgggctaccatatttttgctcaagcttctgagacatatcaccgtaaactttccttccttggttaaaaaagtacccattagcatctacaggagttgagaatgagacgcttgttaacccgagtccccccataaaaccaagaaaatatcgaccttcaaaagatgcaggttttggtgcggtgtcagcacttataaaaccgacaaaccctgtgttattgacttttgtgcctgcaagtttttgatctattgtctgttggatagtttgcccccatttgaatccaaacggggcatccggtttgttatcacaaccagttagcaaaaaaatagcagctaaaatgaacatataaaaacgacttaccatatccctatccccatcagtaaatgatgcggcaatcgtagcaaaccaaacatctttagtctgcccatccttccgcctttttctttttaaggagagcatccaggccggctgtgtccttctgcttcttgaggatcgtcgcgtattgcctgtaaccatgatgtccaggggcaaagaattgcccattatcgtacatgcctggatttttcttcatggcagacatagctaatggggcaagggtatctacagcaaggataatagttagcgcagtctttccatatcctttgtcgctctatcgacatcgatatcataaaacacgacagccacgccttttgcgctgagcgctccaatggcggcgcgcaaaaaacagcagcacatttttatttttgacgaaagggagttcgcttcaatgaccacgcctaacccacctttgaaaatcgagataccgtcagaaatggaagctgattttatcagcattcttgaacaaggtgacattgcctactcctatccggttgatgagtgcattactacgcattattttacggttaactccgctcaggacatcataattgagatagttaactctaaagctttatggggagctataggatatgcaatttgcaacctgatccaccgaaacaagcataaaaatctcaaaattgagctagatgacctgaagataagcgcatccggattcaagccagaagaccttaaaaacatcattgagctaattcaaaaaattcgcatcagcaaggattaagcccacctgagtgggctatttactcttggctgctgcacgctttcgtcggcgttcttctcgctgctcctcgcgctgcatatcgtcgaagaccttcatgatcgccttcatcatcatgaagttgacgaagtggtgattaacgcagccatgaatgcgtaactgctcggtgaactcttcagccgatcgcagcgcgtccatcatgttcttctcgcccttcatgaactccgagaagtcgcgccccgctctggaggcgcactcaacgattcggttattcatggtcacgccgccgcatacagcaacttcatttgccccttaacgggaaatgcagccatgcaacgggcctcgaagtccttctggtcaatgctgcaactggcgatgttggtaacggcgaccagttgctgctcgaccttctccagcgcatcaggcttaaggtgctggtgaatcttctctttgctgtcgcccgccgcctgttttgccgcctgatagacataatcaggaagcgcgacaccgtatacccaacgagcggtgatctggccgaacagcgccggacaaccgccgacatgaccgaagtaaggaagaccggacattttcgacagagcctggtagaacgggtctttaaagcgcttctcccacgacgttggttgctggcagaccatcaggccgacaatctgatcttcggtgagttggaagtttttactcagcagcagatttttaatgtgtcggtcacaggcgcgggcgaatttgactgacaaccagcgggcgaactccaccgctaactccggatgaagccaggtaccgccgtttcgccctttctccaccctgactaaaaggggagaaaaatcctcttttattccggagccagcaataccaagctcctccgccagttcggcgatataaattttcgtcgtctcggtctttagccagtcctttggaagcttgccgtgatgctttgcagcaactgtggcgttgaaccagcaatctgccgtaaaagggaatgaacggtcatcgtaattcatggggatgatattagacatatcggtattaccttttagtgatgaaccttgtctcacaggaatccggcccacagaaaggcaccgacagccagccggtatcctcaagggtcatcctgaaaggttctgtgtgaagtgcgcgtgagatgcgcggtgaaatttgggtataaaaaagccccgggctgtgccgaggctggtttatttggttttgctggcttgttcctgctgcatcatcgcctgccaccggcgatcatcttcttccatcactgtgtcaaactcctctcgggtaaaccctttctggttcgggtatttggcgtttagtagtaatgcaaattcggtcatcgtgaggttctcagcctcttcccggcttatgccgaaatggttgcgggccgccatgatgtagtcggctgcgcggaattctgcggttgtctcgttcgtttcgtaacgctgcagcttgcgcaccttcgctttgccgatgatgccgtgcatcatcaggttttgcgcgacgatgaccatacattccggcggcatgctacctggtcgccagacgaagccacgcttgcgtgatttccccggcttcatccatccaaccagatcgccgatatcatcgtcacagcaagctgtcagtatcgtatgcgctgccatgattgccttgcgtgacaggagcccgctttgcataaaccgcaggatgcaatcaggaaggcggctgtactcatcgcggatataggcctcagctgcgcgctgcgcgaatggcgtcgcctcgtcattgcacaggtcatagaacgcctgaacaatctcatcgggctctccgatgcgcgccatgttgcggaacgacggccggaaaaagaattcccggtcaccgaatcctataacgcattcgcctaattctttaataggggtcatagtcgctccataaacagtatcaagggcgcagaacgccctttgtactattcacgaaatggcctggtggttaactgatagtgaccgtgcaggatgcagacgtgatcttgactggtgtcgcggaagaatcggtgacttcacaggtataaaccccggcatcaccagaagcagcgctggccttgttgaaggtcgccgttgtttgcccgctgacaaccgtgccgtctttcttccagacgtaggtgtaaggcgaagtgccaccctcaaccgctacagacatagtcagagccgatccggccgtcacgctcttggtcgtcggcaggttggtggtgaaagccagcgccggcggagctacctcaaataccaccgtgtctgcatcagctactttccactctccggagaaggtggaaatatcagaggtgccgaaatcaccagaccaggaagtggtgttgaagtagcccatgatataagtgccagcgtcttcaccagtgaagtcgaagcggacccagactgtcggctgtcggccggcctgcacttcatcgaaaatatatttcgagatggcaatagcgccaacttccgtcgtcttgtctttcttacggaactcaccttctcctgagatggtgaagtccatattgttgaccaggttctcaaccagacctttcgtatcgtcagcctcagaggtgacggtattcatggaatagtcgaagcccttggtggtcatggcgccgaggcgcttccattcggaaagcgcaggaaccgtatcagcacagccaaaagccatgcggagcacggctaccttaccaatcagcttgccggtgtcattagcgcagccttgcatgtatgcctctcaattaaaaaaggccgccatatggcagcctgatgggtgattctggcgattattcgccgtatgtgcaggagacgagcagccgggttactaaccggccctcttcggtggggatcggcgccggtacattgccgacaagccgcagcgcgccaacgcaatcatcggcgccggattgcgcgctgatgtactcgaccatggcgtttaccgcggcgtcagcagcatcgggattggccttcgaggagatcacatcaaccataacataccagtcgccgccgaggtcaaaggtgatatcggtaccgccggaaggcctgaacacgatgaactgatcagtatctttcccagtgtcgcgccattgccgccactggaccttaaaccccgcggtaagcccctcagccacaaagaggtctttgaggcgcatatacatcggaggggtcatagcgaaagctccttcttcaccaccgcgtcaatctggctgcgggtatcctcgaagcccttcgttaagaactccttgcgggccgttgctcgcgtgaagttctgtttcactgccgggtcgtgaacatacaccgcatagttggcggagtaaccgacgcgcccggttaccctggtaccgttagccatgatttctctgaactggctgttgatgagcgtcgacgtatcgatcggggtgtaaagcgcggcctgcgcgctgccgataagcatcgcagactggattgctcgcacgactttacgcccctggacgtctttgatgatgcgatcgaggttggccttggcctggcggatgccgcgaactttagcgcccataatcagactcccgtaatcagtgcgaaatcgtccgccagtcgctcgaacgtatctgcgaactggacgatctgccgaatctcatcggcctcatccggcggtgctgcatcagtcgacgcgccaatcaggatgtaatctccctcccgcgccgttgcgtactcggtccatatcgtgtttttaacaacgagctcccggccaaggtcaccgatttttgcagagagtccgccctggtagtcgcagaggatagcgatcggcgcttcccacccgtacggctgacctccgccgtcggtatcgctaccgtcagcatcgcgtatgcgccgccagattgtcgccgtcgcggtgtatgaccaattcgcggttgccgacatcagtcatccctccatcgcagcacaacggcgcctgtggcgcgtatgcggtcgcagttgatgaaccactctccgtcgcttttcaagtacgccgtcgtttgctcgccggtatcggtgatcacccacacccgggtaaacgtccgcggcagcctttgctgaactgaaacccacgccatcagcagcccccgaccaccataaacaggcccacactgttgccggcgctgattggaagttcactggtgcagccgctggtatccagtttcgccagagagtcgcgcagccaggtgatgccatcgtcaccgtaatcgaacgagcgcgacgccccggacggcgccccctgcgattttattcgccgggcaccagaagacgtcgccatgagcgcagcggcatacatcaggatgagctttgccgtgcagtcgtcatatcccgcaccatcgaggcacgggatgatcttgttcaccacgcagagaatcggatcgagcagagcggccgggatggagtaacccaattcaccgaggaacgcctgcacgtctgccgctgtgattgggtcagccatgattatttcgccttcttcgatttgctggcagattcatcctgctgctctgcctgctctgcctgctctgcagcatcatcaacaggcgtagccacttccagcacctgatcttcatcactaatgatttcaaccagaccggcggccgcccaacgtttagcgacatcaccgcttaccgaaacctgcgcgccaacctccagcttctggagattggcaccggaaagtaggttgtctcgagccacttttaccagtgccataaatgccccttagctgtgcgcgtagataactgatttgcgattgttgatatcggtcttaaccatcaggcccatcgccccccaggtacgccagacgtagtcgctgttgtagaactgacgagggtccgcaacggtacccacggcctgacctacaatcggagcgataacgccggcggtaagcgggacaatcaggatctggttaccggtcagttgcgcatcttctttgatggcagcaataccggagagcttcaacagctccagcagaatggtgtctgactggtagttatcgctgaagtagcgctccaggttagtgatgatctgcccggaaacgtaccaggtctgctgcgcatactgcaggttggtcagcttcatcacgtcacgcagcgcgatggcagcgttgcgaatttgctccgccgttgcgctggcgctggtgaagtcgatattcaggccggaagcactgagatcgacaacctgtacgcgctcatcggctttaacgcccttccaggtcttgccatcaaaggcgatataattgccagcggaatcacggaagcccttgaagacgtaatccacgtactgacgacgaacatcatcaacagaaccgcgctgagcgtcggccagagaagccagagcggagcctttgttgaaaatcgggtcacgccactggaatttgaatccagaatcatggatcggaaccatcgtaccgtcgaaggtgtacgcgcgcgcatccagcgccgcaccaatctgtccggacatagaggtgtgcgcccagccgcggccgccggtgcgagcgtactcgtacactgactcttcaagacggacagagcgggacaacgggatcagatcgttaagcagagtgaattcagtattcggttcgaattcagccagcacagtctgatcataagcgcgatacaggcggcggatgtcgtcgacagcgttcgtcgcgtccagcgccggagtgtttgccgcatcaccgcgccagcgggtgcgggatacgaaatcagcaacggcctgagcactcatattgcgcgccagttgcagctcattgaactgcgcctggttcgcttcgaggttgcccgtctcagtcgcgcgtcgggtggaaaatacaaacattcagtctctccttacttgaacacgacgcgaaccagatcgcctgctgtggcggtcagggacttgtcttcttcgacataggcaaagatggtttcaccctctgccagtgctttaatttggccattggccacagaaaccggctggcccttggtgtaggtaccagcggcagcgcgaacgttgaggaaaacgcccggcgttggctggatgtttaccacccagtcaccgatcgcataggcatcgtcaaccgttttgcagcgcaaatagtcgtagttagcaacgtaaagaattgcgtcttcagcgccatcaacagacggtgtaggcttggctgcactgaaaaagataacggtacccggcagaaacgctgcggccgcagaaccttcacgattaagttgcgggttggggaaaatcccgcccgcgtgaattacgtgtttcccgtctttagccattttttactccggcatttcgctgaaagaatcgttgttgttgaccggacggaatgcaccattcaggccggtagaggtctggcactgagcaaacaggccatcaagggcggcgccgtcaagcgcattcaccgccaggtcatccagcccgaatttcgcttttacggcagcgcgtttttcgcctttctctttgtcagcgttcacggcaaggcctgacttaacggctgccaaatcatcagcaaatggcttaaaccatgccggcgcttcttcgctgttgctggcctgctcttttttcttaggcttgccggtggcgggatcgatttcgtcgccgccctctttcttggctgccgccttctctgccgctagctggttgtaagcgtccatcagttcggcatcggacttgccttcagtcggcttacccgcggcttgcagcgcattgataatcagttctttcatcggatcgttctctccgttggttttaatctcgtactcaatgggtttgcgcacgacttctacaggttcgccgacaaacacggctttgccgtcgtcatcgatgaggtacttctgtttgaaatacttggcttcatcgcggtagatgaagctgtctggccacaccgtttctggccatagccacttatcttctgtgtcaccctcacgcaacttgtcgctgatagcgcgtgaaatgtcgtcaaaagagaagttggaggcgttggtgaagaagaatttggtcttgttgagcagaccttcgcgggtgcagtcgataccatcagcaaggcgagcaacttcgatctgctgctcatgaccttctgagttgacgaagatgcccacgccttcttccggagttccggcgccaggctcatcgagcagcaccgccacatggtcaaacatcatgttggtggcgatctcgttgtacttcttgcccttcgactcaccattagcggcaatgccggaatataggagtccggtagagatatggatgggttctgagttggtaccggagatcatctcatcaaggcgattaatcaggcgcttgcccttctcgcttgactcggcgtactggcggttaacgtacatatcacccgtcaccttcccaccttcgtggctgacgttctgcagccatgcgcctacgtgatattcattcaccgcccggacatcgcgagcagacacatgcttgccgtcaaccttcgggtggccaagcggcatcgggttacgctcaagcgtgttgtaggccttttcgatttctgctgccgggtacaacttccggttcatcacgatatcgtccacaacaggcgtgatgccgcgaaccacgatatgtggcttgccgtcgatggtttcagtggtgatgtttgaagcggagttgacgacggtcagcacgttaacgcgattgcgtttcatgctgggtcctcattggtggatttcaggcaataaaaaaggccgccgtggcgacctatttaatgtgtttaaactcccatcggaatgaactgtaaatgtattcaccgccctcttccctgtcggtcagtttggcagtaatttcgaactgactacctattgggtacaacttcaagtctgacaactttttggaacattcgacagccagtgatgggcttgcccattgtccaggtgttggcctgatatgaaccttcccttttctaccagaggtactggctgggtagtagctctcaacaatcaacttacgatacggctcatcaggttttgccataaaaacctccgcaaaacctccttgtatcatgcagcctctgccaatttccactgctctcgctctttcttcaatttctccgcgagaccttcgttaaaaatgctgccgtcgtcgttgagcagcactggaatctggctgcaatagcagttgtaccggttgccgttctcagcgtagaagtctcgcacctgctcggtggtgtagaccttgccgtgacggctggcgtgccagctgcgcgtggtcggcttgagtgccgacagccacagcaagccggtattcaaacctaaccggtcagcagcccagtccgtctcgttccattgcgcctgccgcagcgcgccgacctgctcagtctgagcaatggtcttggccttcgacatcgatacatcgaggcgcttgctgatgacgctggccgtctcgcgaggattcaccccgcgcgcgaccgcatcggtaatgatgttggtcagatcgccgcgggcggtgtcgctgatgaccttccagtcgctaaaagtagtcagcctggccgccgctatctggttcagataaccggggctgcttaaaagctgctgtagcgttgtctggctggcgtacacctgcgactgctgcgacaggttgttgaaggcctccagcgttccgcgctgcgcctctgcggcgacgtaatccatcgcccagaggttttgttcgccgccttccagcaggaaatcgtcgagaattacctgtaccgcttcgagcagatcagccaactcctgcgctgacatgtcatagatgaacttgccggcattgacctggtagagcctcacatcttcgccgtggtcgtggcacaggaagtgccagttgtggctgttaacctctcgctctctcccggtcaggcgctggtcgaagagcgatttcagagcgcgcttgatgccgagataccggtcctcgatatcccggaacattgcgctgacctgcttcgccgatcgcgtcgggtcaaccttactgcgtggcactactggcgtcccgactttcgccttttgctccggattcatcggaaagaggatcatcggtagttaccttttggtttgggtccggagttttcacttcttcgcgcggttcgagctcccccgcctccctgacctcattctcatcgacagcaggtgtgccgtaggcttgctgggtatccttcgcgactgcagccatttccttcatgttggcaatcttctctttctcacttggcgcgagcagatcagaccaggttaacgttatttctcctgacttaggcggatcgataacctctacagtccacagtctctcgatgaccgcggtaacacggtctgtctggaatccatttctcctcccgttacagcgtttggcaaaatcttttttgtcctcatcagaagcaagcctccctgtttgctgaccaaaaaggatggtgaaaggaatctgaactgaagaggaaaactggttcgctgacactgtccatgtagggctgggatcggcagcggcgacagaaaggactttagcctcaccatcctgggtaaccaaagccgaatcggttcccgagttaagcttctggatagcggcgtttagcgcctccgccagacctgaatatccagccttcttggcatcctccatgattttttcaatcttggtatctttcgacatgttgatgccgagctgcctgctggcatttttcaggaacccctcagcgctaccgccggaggttttcgccatgtcaagaaggtcgttatagcctgcacgcaagaaaggaatgccagccaaagaagattcatcttccgaaccttcgcaaaaaatgatgattcgttctgggtggatattgatagaacgcatcggcccgacaatatttccgttatccccaacaggttgctcctggaaataataaaacttcggcatggcgtagttaggagacttctgatcctgctctaattcccccggcttcacttgtgattcccatgcaggaatcatctttactaagccgcgctcacgcgaattacgcataacctcgcgatttactggttcagaccattcccggctatctgcaaactggaggatgagggctgagtagtgcccgacaaggtttcgtctatccgcgtccttcaccttagcccagtacttcttcatgagcttggtgactttcttttcccaaggcgtcgacttcttggacttcttcgtctcatcaccatcaactattacaggattatcagaccagcatgcatcgagcaatttatggacggcaccgaatgcggcgccattgcgctcatacatgttgtaaaagtgatcaaagtcgagacgctcaggatagccaaattcacaccacagatggtgccgcttggtattacctgatctattgaaaccagtcgcataaagctgtcgagatcgcgagacctcgttgaggctattcacaatcagcccagcgaggacttgcatttctgtatcgttactcactgagttgtccttatgtgaagaatatcgcccctgaacggcgaggagagtgcagcacgcggtaacgggttgcatcccaatcgtggtcttcctgctgggtatctacgtcatctgggtttttgctgtcgcgaactagcactggaatgcggctaatccagcctcggcaatgctcgaacacataaaaggcaggcttctccgggatgccagactccagctttttgccctcaacgacagcctcaagcatgtcagcgaataccgaggctccgttgactcgcgagccaggcttcttattggcctccagccattcgacgccctgattctccattttctggccgatcgataactcatcgtctcccgtgttgaaaatggcgctatcagccgggcccgggataacttccgaacatattccaggaacaatgttcagttggccctgcgtgacaccgtcgatttgaatctcttcaggttcgttgacgtcttcaccaaccagccgcttgtcaatccacgccacgcctttcgcaacgttagtggatgaaatattcaggcccttgttgagctcgtcaggcgggcatccgtaccattcacctatcaggataagggaaccggcaggcgggcagaactgtcgaccatcaggtagttcggcggctgttccatcggtctgagcccaccagaggttagagaacggctttgactcaccccagtcatgagagcgatcgacggtccaactatccgggatgcggaatggcttaatgacgtgcagcgcttcattccacaggtggtcaaatctcccgccactagtcacatcccaggaaccctctacccacgctttgcgccggtttgggtctttgatggccatcagggtcgcgatgtactgcgggtcgaggtacgggttctctttaaacgatccgtggatagctacgcgggtaagcgtgatttcctcttctcgttctgtctgagggttgaacaccatttgccggtctcgctgcacggttccgcgcggcgctggctcaatgaagcgtttcttcacccaggtatgcccgatgccaaacgggttggtcgtgctgaacgtctccagcgggattggcctcagtaatttgccattctccagcgggtagttttccggcctgaacgatgagcgtcggcaggagaacatcatttcgtagaattcaggggactgctgtttcgtcagttcgttaaagccaatgaacgggaattcctgcccgtgataatcccagtagtcgtctgcctctttgccgaagcggaagagaagctcctcgcctgtgggccatacccatcgcaattcgctcgcagatgacagatatcgagcaccatcgttgaacagacgaaacatacgcttcgactgcgtgatgatgtcggcaaggttcttatattcggtatcgaagatgacgccacgccagaacgagccatagcccacgccaacattgcgccggaaccgggccaactgcgcagcagttttaccgggtccgcgagtaccttcgaaaagtatttcgttacaagggcaactcagagccagagactgtgatccaggcagtggcttccatacagctttgtaattcatccaccgagcacctcaccctgttgtttctgcgccgccgcttcccagtcatccacgttatcgctggttggtaccagcatgacgttatgcgtgacctctttcgtttcagccttattctcaatgctgtatgcctctcgttcgaggccgataagcgttttcaggctgtcgctcaggtctttcatggatttaacgcgggaaggaagactgattattttgtggtagagatcgttgagcttatccatgcctttgtcatcaggcgatcgcatcatctcgcccaggtcttcaagcgcggccacgttgccacactctccggccaattcatcgaatagcgtattggtcagttcgcgagcccgccggatgtctccccggtgctccatgcgtaccgttgcaataacctcggctgtcgcctctatcagtacgcgttcggtcaaagtgctttcgttgcgtaccgtcctgcgtacctcccgcttgcgtaccaagtcgtcagccttttgctgaatcttcgcattcaggtcgcgcgaccagtcgtcacgcttggcacgcttacggatagcgccttcgctgatgccgtgctgcgatgcgatttcacggagagacatcaccccggcccggtatgccgtctcgatggcctcccagtcgggtttgctcatactccattccttattttatctgctcggcactgctctcagggcagcgccattactgttttcattacacctagcggcgtgaatggatttatctcctataagagacaaaggctgttcagaaggaattagggcccactatagagaccttgtccaacgtgcggcggatttaatagtggcgagtatagatacatcaccgcgtaagagtttaatgttaccggagtaggaacagccacagggtgaaattaagttacacaatagaaatcagacttagcccaataatcaaaaaggagaataaatgttgaaaatcagtttgccgagcaaaataataaatcacccaatcacctatctcttcaccgcattcattctgagcgtggcccactactttttgaccggctctcctctatatttctaatccccgtcttatccagattgcactgccccagcgcagagtaaagcttcgcgtttaactccagactagcctgccacgtgaacggaacctccattccggggatcggtgtgtctgcagaactaaacatgggaaagccacccgtgggtggcctttgtgatggcttcgaagagtcaaaattaagtacggggaaacaataactccgccgcgcgctgtatttctcgcggagaaatatcatcaatatccgttgcaacaaggtatgactcttgcccaccgtgtgaagtcctgacgatagcagtcatgatatctatgtacacctcacgtccatcagaaagaagatgcctgactgatttaataccatcagcgacattgattgactgaggcttttgcccttcaagaatgagaatgacctgattcatttttttcccgcttgattagtacatggggaaacattatcacaggcattcaatgaatgccttatttcaaacactgcgtggtgatgtattcctgcagggctctcagggctgtttggtcgctgaggattccggaccggataccgagaacgtttcgtccagcaactgcagagagttcgacggtggcatcatcgcccatgctgggggtgccggtggtttgggttgcggctggcactggacacttgcctttgacgagcacccgaccaccattatcaagcttacgctgcagagcatcatttttagctttttcatcggctaattccttcgtgtatttggcatcgagcgccgcgacgtctcgctggcgggtctgcatgtcagcgatggtgtctttcgccaggctgagttgctcggttgctttgtcccgctgccttttgaattcggtcgcgttatcgtggtagtggctagccaaccatccgagactgactatcaggcagatcacaatggcgctcataatggcggttaaccggctcatttctgcccccacaaccaaacttcacgctcaatctcgcgacgagttaccaggcctttccactgcttgcccttggcgtaagtccagcggcgcagctgatcacatgcacctttctggtcgccctggttgattttgcgcagtagcgtggaggtttggaagttgccagcgccgacgttatacgcgaatgagtaaagcgccccgcgcattgtctcggggatctgcttctggatgtaagggttaatctggcgggcgacggtgttcaggtctttgctgagcagcgcacggcattcagcctcggtgtacttcttgccgagcatgatatctttgccagtgtggccataacagacagtccatacgcctaccacatcctgataggggtcataacgcacaccttcaagaccatcgttaccagttgggccggtgatgagcgcagaagcaatggctatggcgccaccgccgatggcagcgataacgctattcctcagttttggtgtcatagccattgagccgatcctcgcgttctttccgcctgtagtaccagttcaccccacaggtggtaatggtgcaggcgataccgacaataattgcccagtcactcagggtcatccccgctattttgtcggccaaaatccatacctctgccttaactgccccggcatacgcctttgctgagacaccgcagcccgtcagtgcggtcccggtgccgtatgaaagtctgctgtaaatggtgctcatttttgtcataacctcacctccgttgatgacggatggcgctgtgcgtaaaggggaaaagaggcccagaccctgcgggctgatttatcaacaaagcacgtcggggatgattcccgagggtctgggcatgctcaataaaaaacccgctcaaggcgggaagaaataccaagggtaaaaagtgacggcgcggtagccgtaatggtcccaaggtagagggattggagcatctggcggggatcgaacccgcatattctggttggaagccagacgtaattaccaaactacgacagatgcaatctggttcagggctctgcgcggaagggctttgacgtgtcgtgcagcacgtctctacccaagagccctgaccggatcgcaggcataaaaaagccccgcactattgcgaggctcggtgttctgataggtcaaacgcaaatacggcaacctacactaaatatattgctcatttgttcattgaaatgcaagcacgttatgactattttttgcaattttcctcacgctttcgcgatcgttaaacgcattttgcagcggctggtacaggcaaaagagtgccgcgttgataacctgcttaacttcccggcggatggttgaaatgcttgggtgcttatactggtttccggcgcgcgtcttcatcaggcgaggcttgctcacagcatgctgccatgaggcgatccttatctcgcttgagttacagacgtaataggcaaaaattaccttccatgcgttctcatctacgtttttcaggtaatgccggattacggcatcaatcagcaacccatcatcatcgctgcatacaggccttgatggtgcttgcggttcaaccgtggccatgaacttggcaatcatatttatcatcgccttgtctatcttccctgtctggcaccatgcgccccaaagctggagccactgatctatccactggtgctgttcgttggttaattccagtttcatgctgtctctcccaggcgcttatagatacggacgaaattgcgtaatattttgtagtcaaccagtacggtgccgcggctacgcaagaggcggagcttttgccaacggtcgcggatgcgttcgataacgtcacggctcatgcagcctcccgctgtttcagtgctttgagcttggcgcggtactcatcgcggatacgaataaagtcttcccggcggtagttggtcatttcgtggggtccgttaagccagtcgacatactcctgtccataacgagcaaccaggccaacttcatattgctgagcaaccgtcgcctctttggctgtgtacttccccgacccggcattgcacgatttgcactgcttatgagcgttgcgctcttcaaaacgcgactcagggtaagcgccgaccgttttgaagtggccgcagtcccactggccgccatgcagatcaggcgggttggtctcgccgcaactgatgcatggcaaaccagcatcacgagcgcggatgtaggcgttgaatgccttctgagcctgggctttgtagtaaccgttaggtctgagttcagccaatcttgctttacggcgctgacgcccctctttctcggattcgcgctggcgcttcaccgccctggccttcgccacttcccgggcttttgctgtctgttttttgccgatcgcgctggcgcattcaaaactgcataccacctgcccttcccgggcaggatggaaccattcgcggcagtgggcgcatttacgacgtgcaggtttacgcatgtggcctccttgctctcaggcgaagccacttcttatcgaccaggcgggcggtgtagtctttcagggtcgggatgtcggaaggcttaacttcgaccttgcgtttgcggcgtgccggtacgcggaagatgccgcgctccatgaccttagcgagcagactgtgcatgcgaagccctccattcctgggcccatgcaatccgactactggacttctcgctgaacttcacattgtgctcggtgccgaaccagtaaatcgcctcgataacctcgaccatatagcgcttgctggatttggaggtacgaacgccgaagtagacgcggccgccgttgatgcccggggcggatttctgctcacgctccgggttttgtgtctggctgaccagcacggtgatgaggtctttccactctgccggctccagcttttcgccgtaccagataacctgatcgcttaggtctttcaaaagtggccacatgaggcgattctgtttgtcggtgcggctttcttcgcgcgcctcgataatcagcggcgatcggtggtcgacgggcagagactggatgaaactgacggcgttacgcttaacgttgtcgttgataaggcagaattgttgcttcacgcttcacctccggagaggtcaaacgctgaatgcagaaaatcgccggtggctttcgccatcggtgacagggattgctgtacggttttgtgcgccatgtgtccccacttggcgccggaagtaagtcgtcagttgctcaggctgacgaggtaattatcgcccgtcacggggataaaagcaaaatgagcatatacgagaaaatcgctattttttggcgttctgctcagccatttccagatagcgcggatcggatgctcggggtagctggatgctctgctcgcggtagtagcgaacgcgctccatgaaatactcgcgcagatgctctggctgctctctggccaccacttcggcgacaactggcatgttcaggcgctctttgtaagcgacgccggacgctgcgaggtcaacgttgaccttgtcctgctcgtctttcggtttggctgcaatgttccactgtgacattaaattttttccttatcaaatcccacctcagacagtttcctggcaagcttcatagaatcagtaaagagtgtaaccaatgaacttttaagtccaatttcttcaacaaattctttaggagttacgtcagtaaggtgatggtaatatttgataatctgaagctgaacagtaactgttctgtctccttttggggcgcaatcgaccgtctttctgatagtggaaaaaacatctgattttttcatagggtaccctccttggcagagtataccctaccagaatactttataatgtcgcggatttgcttactgcggtgggtttaggcatcagtcgtcgtcatcttcctcatcctcgtcgtcatcgcaggaatcaagcagcggattcatgcgccgccctacctgactggcgtacccgcggcggcctaggttgtgcagcacgccgtagatttcgaacatttcggttcgctcatcaccaatatcaagctcacaggccagcgtgtggcattcagtagcgagcgccgatatcttctcaagcaattcggccttattcacttttcacctccagacgccagacagcctgaccaatgcgactctcgtggggacatttggataccagcccatccttcgccagctcgatgagcgcttttcgcaggtctgcgtttttccactccaccccggggaatttgcgctccatcgcgcatcgaatattccaggtagccacgcgatagggataatggccgtgtgcccatttctcctgttgatccactccctcgatcaacacctgcatgattttgctttttacgtcactcacctttcgcctcctgcggcccagccggcagctgcatccagtgggtgggctggcaataaataccgtcgccagttctccacgttgcgaacctgaaatagccatccagctcattacgctcaaggtaggcaaccatctgctccttcttatctgggcagtaaacctgaacgtcaacttcacggtctggcatccgctcacttaccggaatccattcacccggcacggtagcgggttcactgccgggtgactgcggggcggctgcaagcatggcggcgcggcaggcgttccagcccttcacctcagcgatggctgctactgcatccacggcgtacatgctcagtgtatttggaattggtttttcctccggcactaccggctgctgcgcgtggcgatagagcggcgctatgtttcgctcgaggtcggtaatgacgctccaaattgggactgactcgacgccttgtttcgccatatcacgataactgtcggcatacgccagcacaggattgcgatccagctcgctgtccgctaccggctgcactggcgacctatctggacctttgcgaatagcttttgccagctcgatagggtcatcgtaaagccagtctcctgtttcagggtgattggcttctgccagttgggcggcccattccagaccgtctttgtgcccctgcaggtagtcgagaggcaaacaccctgactcgctgtccattgcggccagcgccatgctggccaatgccgaagcctcaccgcattgcacatggtcagtctcgataatgttgagtagtgtttctcgtgaaaattcgctcatttccggtccaccttaattttgctgagcgcctcaaagtgcctgcgcatagttgcctgtacttcgggatgctgccagttggtatggatgccgccgtcttcgtcgatggtgaatttaacggcgttttctttgagaacgcgcttcaggcgctgctcggggctttcgattatgaacatcaatcagcctccaccttgatgccagcggcagcgagcatctcttcaatttcccagcgcgcataaaccggatagcgctctgacccatcgcagcagcggtctttctcgctatgagatacagctacatcatcccagtaatcatctggcgcatgacctgcctgaatccagattaagtgagcgtgtggcttcggcagcttcacggtgacggtgcgggactccagctctgcgatgcacttagcctgccagtcaacgaagtctgcaagtccaacgcctttttcgcgcaaaccgtagtcatccctaagcatgtcatatacatctgctttggcctgcgccttctccagcgcctctaccagcgcgaggatgtttgcagggttagccagggcgatgaactctccattcctgtctgtctgagcttgggtgaaatcaccactatcgacatagaggattgagccctgagattcatcactgcctacgtcatactcaatgctggtatttttcggaaaataaacccattcacccggagtagccttctctgctgccgctttcaggctctgcgccagttcggtgatatcagtcatggttgactccctaaatctcaaaggccaattgcggcataaagcggtcgcgttcggcgttatagttgagcgcactggcgctgttcattgactcgatacgctcaacgagtacagcggctctcgtttctttgctggccggtgcataggctgatttctgccatgatttatcgataccgatattgcgggccacgtttgtgctatcagctgatgacagcggtatatggcggaaaatatcggcattaagcatccgcaggccgtgcagtttgcaaatcgggtagccgttctcatccacaacatgccggattaagtcacgcaggcgagccacacagcggcgcggccgctttgcgtcgtattcgcccatgctgccgattgccacgcgggggaactcattgcagagctgaataaaccgctcgtctggttcgttcatgtgccacactggagccccaataaactttccgtgtggccactctgctatcagcgcatcgttttcctcgctactgccgccgataacgtccgggataatggcgaatgagaaccgcgggtgattagcccaacgctcgacgaaccggtaatactcgttccagtccacaacgcgttttttcgtccagaaactgaatgcgccgttatccagagcaaatgactgagtaacctcgctagccagtgctaactgcccggcgtttgcaaagctaatgaacgcatggcgccccttccacgctttcaacgcacaggtatctggcgtgattggccctccgtggaagtgaatcatttggccccctcgctgcggaacatcatgattgtcaggtcgcctttagtggccaggcgaatggtagagccaggttccagactgttaagctcaaaggcgtcataaaactcattcacagctttctggcggcgagattccttacgacgcttgtcccactgcctcagagcatttttggtaatccactggcctgttttaaccatgatgtatgcccatccaagaatggctaaaccagtattgagataagtggcgacgctcatttgtcggccccctcgcgcagcttggaggaaacgtcagaaagcatctcctttacgctatctgcgtaaagcattccctttgtatgaccaataagatcaagtaccatctccaccccatcagccttaatcccggctacgatgcgatcggtggcgggggttctgatgcctttaagaatgactacatcgcaagggtcgccgttcgtgctttctatccattcaatcgtatgatcaacagccgatttgagcgccacattctccgcagccagcttatccatttcgatgctacgacctttccagccctcccacattgcagccatcatcatgaaccagacatttccgcaccccaccttcttctcgttaaagaaccaggttacgaattcaatgctcatatcgttttgctgtgcaatctgttcgatttcgtttttcattttcttactcccgccaggcactggttaaacaggttagtcattgggtttactccgtcaggacgctggcgatactgaacagacggatcgctttcggttacggctgtcgtgtcgatcagtgtgtaccggtagctcctgcactccccttctcgcttaacctcgccgtcacggttcatctgccacagggaggaattgaccactgaagagtcaaggccggtaccgcggcggatatcctgaaagctgcagcctggatgctggccgatgaagttaataacggcttgtttgcccgagttctttttcatcaaaatccaccccgcttggttggtttttcctctttctcgcgccggcgctgactggcagcctcctgatcgcagtcataaatcgccccgtgacgttgctcgcaatagacaacaccagtctcaccatgccggttaaggcgcaggaggagctctgtgtcactctggtttgcgttctcgtcgtaggcgccctcccggtatatggccagccagtaatcgcagtcctgttcaatctgcccggtgtcgcgggagtcactcggcaaggggcgcttattggttcgcttctcaagctcacggttaagctgagtcaggagaaccacgacgcaatccagctccttcgccagcgtcttgaggcctttggtgatcagcccgtaagccaggtcatttcgctctgccttatcggcagtcatcagcgtcaggtagtcaacgaggatcattccgaccttgccgcgttcacgcttgatgcgacgtgactcagccacgacatgcgccagtgaaatacccggtgtgtcatcaatcaggagattgttggtttcaataagggcgcccataacgccggtagctttcttcagatcgccgttccagtcgccgcgatatccgtagtcttccttcgtcatatccgggtaaaacaggtttggagagatccgccccttctgcgcagtgattttctccaccatctgcccttccggcatttccagtgagaacatcagggccggctcattttctaccgtggcgcagttgatccccatctgggtatagagcgtggttttacccatcttcgggcgagcgcctataacaaacaggctgccgcgaacaatgcgcttcacaccgagcaactcatccagagagcggatcccggtagataacccacgggaacgaccatccggcttgagcctttcgtcgaattccgccgaccagtcagtaacagcgtcatagaacgtgcgaagccctgtccgtatcccggtttttacgtgctcggttatctcagtgaataatccctgaattgcgtcaaacttctgttctgccgtcatgccgttacgggcataaagcaactcgatcgccttcgttgttttctcgatgccgtagcgctccatagcggtctcacgaacacgcattgcataggccacgatgttcgccgcgcttggcgtgttcttcgacatttcagccaggtatgcaaagccaccaacggtttccgtcagccctttgctatcgagagcatcaaacagggtcagcagatcgacaggcttatggtcgcggtacatctggcgcatttctgcgaaaatgacctggtgctgacgcgagtagaacgattccggcttgaggatagacagaaccttctgagtgcgttcgctgctgtcgtcatccagcagaagtccgccaagtacgctctgctctgcttcaatgctgtgcggaggagtcatgaaatcagaggtcatcacaggctccctcgcgcgttttggcgtagacgtcgacgttcaggaagtattccagcgacttgcggcgccaagttttcccggtgcgctgatcagggcgattctcaagcatccagcggcagttactggcgatgtagctcaggtaagactcccagtcggccagggtaaagctgtggccatcaagctgacgggtgattttgttggccttctgccagaacgagcggatcaggttacgtcgcttgtcagtaaggatcctgatgccttgtgcttctggcagaacctggtggtaaacctcaacaacctgctcacagctgagagacggttttttcggttctgattttttcgatgctgatgcactctcttctacgtcagtagaagagatattatttaatatattgtttgtggcactctgttggcattctgttggcacaacctcacttgtacgcagcgtggttactgggtttgcgttggcactctgttggcattctgttggcacaaaaaactgctgataatcgtcatatttggtgacggttaagagggtgaatttcttgtttgccagggtggtgaccatgcccattttggcgaatttgttcagaagatatttcacccggtcaggtgctattcctgtgtctttcgacagggtatgtcgcccggtgatcacctgaccgcgggaaactggatactcaccaaactctgtggttaccatcccgtcagctgaattcacctccatgatgagatggatccacagatggacggcttcactgtcggtcttgtagaacggcagctctcttactttacggtgcaggaataccaacccctgccctgatggctgaggtttttccatgggcttctgagaccctctaaaatcggatatgcggagaacgttactcacggccttcctccttccgtttcagctcttccaggatggcgcgcattttcatgccaaccaccgggttaaccgagcgaatgaagcgatcgcgggtaacatttttgtgtgtttgtgcctggtaaaatctgttgctcttaggcataattactcctgtgaattgatccagttaattcgcgtagaaagccgttagtgtttgcccactgcggctttcgcctttctgttcccactcatgcttcaaagtcacctttctctcccggcctgttagaaatcaggatggccagcagcagcgacatgttcggaagcagactttcccgccagcgactcaccgtcgacttattcactccggccactttggctatagttgtggtccccagttcagctatctggctgtgtaaccagctttctatcctctgagcctccactttgttgcgtgtcgttgaactctccatctgtgatacttcctctggtggtgtttgaaaggccgattaaatcggcaacttattgagattgagatggcatctcgccataaagcagccacttagggtcgcaatggagcgcagttgccagttcgaacaaataacgtgggcgcttggttgtcccggcctcaattgcctgcagagactgctgtctcatgccaactttttttgctaattgcgcctgagacagattcatctcttcgcgcttttttttgaggcgttgcgaaatggtttccatgttacctcctacagttttatctgtattttgtgacagttatttctgtttgtcaattacagttttaactgtgaatatcaaggcatacattgagagggatttatgagccttgcagatcgcgtaaagcaaaagagaattgagctcggtctaacgcagaccgaggcagcgttgaatgccggaataactcagcagtcatggcagagcattgaaaagggagacaccagaaaaccgcgtaacattattggcatagctaaggcgctaaagtgcgatcctgactggctaatgaatggcggagcctttatgcctattgctgaagttagcagcaagaaggtgcctctcataagctatgtccaggcaggggctctcgcagaaaaaaatcccattgaggcatttgatgggagttttgagtacatccttacagacaacgaagtttctgattttacttttgctttacgcatcgaaggcgattcgatggagccagacttcaaggccggagatgtgatcattgtagaccccgaagttgagccaacccccggagagtttgttgtggccaagaacggtggggctcaagcgacctttaaaaaatatcggcctacttacacggatcacctgggctgccagcatttcgagcttgtgccattgaatgatgactacccgattatcagtagcgatcatcaaccactaacaatcatcggcgtgatgattgaacacagaatctatcgaagaaagcgctaaccccctccccctctcagaatagaaccggcgtatgccggtttttttttcgccccatcaaaataaatcacctttcattacagttagatatgtaatcaatgacaaaaaatacagttttgtctgttgacgaaaatacagttttatctgtaaatttaagccatccaaacaacaccggcaacgccggacgtaagtcaaacgctcagctggccggctttaaggcaaaggtgaagagatgatccgcgaagaagacaagcctgcatggcgtaatttttggttaaaggtcgttccgtttttggttgcagtcctcgtagttagcattcagtgctggggtggaaaatgagcaaacaaggcattcgttcactgatttactgcctgctgatctgcggcgttatatggacagcgttgattatcaaaattctgcacgttacgggggtgttcaatggttagtcatcattacgggacacagaccgttaaccgcggcgccgttctcccagggatgctcgttaagcatcgggaaagcacctggacagcatcagcaaataaacgcggccgcctgtacctgcatcgcgggattgagcggacttacacaaccgacttgctggttgaagtttatctgaacgggttgggacaaggtctcagccggtaatcgaaacgaagaatttaactgaactatcaggcggctttcatcgcgccgggaggcacgcatgctgaataaagaaagacttgatgagttattagattattcgcctgattcagggttatttacttggaaggttaaccgccggggaaaggctaagtctggatgtatcgcaggaagcaaaaatggacaaggttacattctcataaaaattgacgggaagttttattttgctcatcgcctcgcgtggctagttacgcatggaacattcccagtcaacatgatagaccacattgatggcaacagagaaaacaataaaatcaataacctaagagaggccaccgctgagcaaaatatgtggaatagcgcagccgggaaaaataacaaaacaggagtaaagggtgttagctgggatggcagaaggaaaagattccgggccagcatatccataaaagggaaaaacaaagaaatagggagttatttgtcacttaaagatgctgagtcggcaataaaggattatcggctgaaactcaatggcaaatttgcaaataacgaagttattaataacaaccttttggaggggaaaccatgagcgaaataatggatttagtcgtcattgagaaaaagaacgcgatggcggttttcaccaataacgaccagctcgacccgcttattgaagcgatcgaaaaagaggctcgcagcctggttccggacgtaaccaccaaaaaaggccgcgacgccatcgcatccatggcccacaaggtcgcgcgctctaaaacctacatcgacaacgcaggtaaagatctggtcgctgagttaaaggcgctgccaaagcaaatcgatgaaagccgccgcgttgtccgtgagcgtctcgatgcgctgaaagatgaagtgcgtcgcccgttgaccgaatgggaagccgagcaggagcgcattaaggccgaagaagccatgaccgcccttcacgtcgaagcactggccatgaatgaagacttcgatcggcagctggcagctcggattgagtctgaccacgaaatggctctgctgatgaatgacgctttcgatcgtgagcaggcagataaagcggctgaggctgagcgccagcgcattgcccatgaagaagaaattaagcgactggcagcagctgcagcagcccgcgaagttgagcagcgcgcacagcgtgaacgtgaagaagcggcgcatcgtgaagctgtgttgaaagcacaagctgagcaggcagagcgagatcgcattgcagccgagcagaaagctgaggctgaaaagcaggccgctatcgaagcggaacgccgcaaagcacaggaagaagctgaccgcatccgccgagaggcagagctgcgcgaacaggcccgcctggctgaggagaaacgtaaagccgatgagcaggcgcgccgcgaagccgacgttaagcaccgcaaggctgtgggtgccgaggttgttaaggctctgatggccaataccagccttacccgggatcaggctatcgaggtgcttgccgcggttaaagacggccgcattcctcataccggtatcagttactgaggtgcttatgaacgcataccgcgcatatgacgtgatcgaagagcgtaagtgggctgaacaaacgctgtcagaagagaaggaaaagtggattgaagatcgggcgcaggaaattatcgacgccctgccgaaagagccctcaggcctgttccgcttctctgtgccgatggacaaaagcccatacgaaggcctccgcagcgattccgccggagaggcatataacgatttcatttcggcagttgcttacgcccaggcggaatacgactgggatcaccgcaccggctgcccgttttaaagttaaggggaattctatgagcacagcactttctacaatggcagggaagcttgcctcccgcctcggcatggatgccggaactgacctgatgaacacgctgaaaaatacagcatttaagggtgggaatgtcactgatgagcagttcacggcactgctgatcgtcgccaaccagtacggactgaacccgtggacaaaagagatttatgcattcccggataaaggtggaattgttcctgtagtcggcgttgacggctgggctcgaatcatcaacgaacatcctcagtttgatggaatggagtttgcctacgacaaggaagaaggcgcgtgtacctgcaagatataccggaaagaccggacacacccgaccatcgttactgagtacatgggagagtgcaaacgcaacactcagccatggcagtcccaccctacccgtatgcttcgtcacaagacgctgatccagtgtgcgcgtctcgcatttgggtttgctggcatcttcgatcaggacgaagccgagcgtgtcattgaagggagtacgacagaggttcatgtagggcatgagtcggatggtcgtcgcccggaactgatcgcaaaaggcgagtctgccgcacgccttggaactgttaagtaccaggaattctgggtggcgttaagcgcagaagagaaacaggttatcggcgcggttgagaagcgtcgcatgtatgacatgagccttgcagtcgacaacgcagaacctgtcgatgccgcagcgccggaggataaatgatggaacaacgcaccccagaatggtttgccgctcgctgcggaaaagtcacagccagccgccttgctgacgtcatggccagaaccaagtctggctatgcagcaagccgacagaactacatggccgagctgatttgccagcgcctcaccgggaagcttgaagaaggtttctccaacgccgcaatgatacgcggaacagaactcgagccggtagcacgcgagatgtatgcgctgaatgagttcgatgccgaaatcactgaggtggggcttatcgatcacccaactataccaggattcgcagcaagtcctgatgggcttgttaatggtgatgggcttatcgaacttaagtgccccaacacctggactcatcttgagaccttaaaaactggcgagccaaaacgccagtacctgttgcagatgcacgctcagatgatgtgcacagggcgcaaatggtgtgatttcgttagtttcgacgatcgtctaccgccagacctcgcctatttcaaaaagcgcattcacttcgacgaagcactggcaaatgagattcagtccgaagtgaaaaagttcctggaagagctggagaaagagatttccagcataaaaaaccacgaccatgccgcatgagaaaggcagacacgaaacgaggtgcgcaatgactgatttcggcggatcgaaaactccaaaaaatgaacgtgactactggcaaacgccgattgaaattttcaacgcgctcgaccgcgagtttggcttctggctggatgctgcagcctctgagagtaatgcgctatgcgctcactatctcactgagctggatgactcgctgaacagcgaatggacgtcatgcggctcgatctggtgcaacccaccctattccgatattgggccgtgggtggaaaaggctgctgagcaatcccgggcgcagtctcaggccgtagtgatgttgctaccggctgacatttctaccggctggtttatttcagccatgcaatcagctgatgaactcaggctgataacgggtggccgtgttcagtttgttcctgcatccgttacaggaaagcgccagagcaacccaaaaggctcgctcctgtttatttggcgcccgtacatcaccccgcgacacatcatcacgtccatatcgctggctgagttaaagcggatcgggaatctggaggctgcatgacgccagaagaaaaagaaaacgctctccgcgcccaggctcgtcgctgcgcagaagagataaccaaagcgatgagcgtaaagcctaaaccgaagtggaacgctgtatgcccccccatccttcgcaagcactacgagaaggtaaagccgatgggtgtcagcctggtgaaatttgtcagtgttattggccgcatgaatgggcggtatggagtggaatcatgagcaaaaacctacacatcgaactcggtgataaatacgtcgtcacagggtcaacgcatgacctcatcctgaacgagaaacgcatcattaaggatggtaagaacgccggtcaggaaacgctggctcgactcggctactacagcaagtttgagcacctggtgaaagaactttgccatcgtgaaattctgcaatcagaagcgcagtcactggaagagttacgcgactacatctttgctctcggcgagaagctgagtaaggcggttgagtcatgaaagaacgcggaatgatttttaacggggagatggtgcgggccatcctcgacggccggaagacgcagacacggcggattatgaaacctcaaccagaaccatgcccccggggtggacactggtggccaagcaacgtgttcaaaacaatgcttcatgtcgaagaagaaatgcagaacggcaaaggcggctggggtgggctggttggagatgcttgcccgttcggggacgtcggcgaccgcatctgggtgcgtgaggcttatcgtttcccggcatcgttagacgatgttagcccaactggtgttggtgaaatggctgtggcaacaggatacagaaaaccatgggcgccgaccttctacgagtttacaggcactttcagtgatggatggaaaggattcgaaacccctccaaaagtttctgacgccggaaagcttcgcccatccatccacatgccgcgctgggccagccgcattctgctggaaatcaccgacgtgcgcgttgagcggctgaacgctattagcgaagaggatgcgcgagcagaaggcattattgacggtggctgtcttaattgcggagaacctgagccatgtggatgcgccaacccagagcctgacgctaccgatgcttttgcctacctgtggcaatcgatctacgggcaggaaaactggaatgctgatccctgggtttgggttatcgagttcaagcgcattgaaggcggtgcagcatgaaagtgaagacagaaagtcttacaggactacaccttgatgttgcagtagctatcgcgttaggtggagaagttaccaggccgcaagatgctcaggtctatttaaatggaatgcatcagctatgtggcgagaaaagcaaacgccatagccgctatgtgttttcaccatctaccgactggagccagtgcggagagttaatggagagcttttcgatcagttgttaccagtcggcagatcccgccacaggaaaagtctaccactgggttggcgtgagcgagttagcgtctccaggtaagcgacgtggactccttgcagacaatccccgcgctgctgtatgtcgagcagtcgtattcgcgcagttgggtaatgaagttgagttgcctgatgaacttaaaagtgaggaatgagcatgagcgcagaaatcatcgatcaggccaacgagctggcagagcgccggctggaaatgaccatccagaatatgcgcatcaatcatgcggcagtttcggctactcactgccgcgactgcggggaagagatacccgagcggcgccgggaactggtggcgggatgccagcgttgtgctgactaccaggaagaggttgaagcacgtgataagcatttggctgtaacgagaggtggaagatgaaacatgagatgcaaccagatagccttgttgatctgaaattcatcatggcggatactggctttggaaaaaccttcatttacgaccggattaagtccggcgatctccccaaaaccaaactcatccacggcagagcaaggtggttatatagtgaccattgtaagttcagagaaaagctcttgtcccgctccgatgggtaaagtaacgagtaaaatatttttcacacgtaaaaaatatcatccatttcaatcccctgcacatcaggttagatgtatgcaggggacaccatataaacgttgcccgccattcaccacgatgacctaaacgccagccagaacgtattcttctcgtaatcataattagccaacgatttcagtatggttagtcctgccagaaaggaacgtgtctttgtcaatcacgcacacaataaaccgacagcaacgcgcatttctgcgtacaataccttctgactttttcagtcacaagccactaccccggtgtaatcttctccggacaacaaaggagccaggcgttgatatgaaacagatcaccctcagcgatatgcagcagcagagcgaagcggcagccagtgctccgcgcctgcgtgcccatcgcaattttcatcccgaactaagcgacccgatacagcgtctggccatcgccatggaacccggcacctatatccgcccccaccggcacagacataccttcgaacttttactgccgctgaaaggccgatttgtggtactgaattttgatgaccacggcgtggttacccgccgggtggtgctgggtgaaacctgcacggcgctggaaatggaagccggtacctggcatacggtgctctcactcgacgctggcggcatggtatttgaagttaagcaaggtgcttatcaaccgcttgccgaaatggacactatggcctgggcgcctgctgaaggccagccaggcactgccgaaatgatggcctggtatgccatcgcgcaaccgggtgaccgcttcctgtctatgccgcaataactacaggtagcttcgacaggcgccgcaggcgtctgtttgatacttcctgccgaccacaaagtttgccaaattgaccgtcccttttttcgtgctccgctcatactcaccttaaatattgctgctaaacaggaagaaacgcttatattcagcaaactatttttctctacgaataagagatgataagataacgggaaagagtaaatatgcggcagcaaaacaataaaaacagccaatttatcgatatattattctcaatgtgaatggattttgttaatcaggtaaaggaagtcagcagaaaaaataaatcattgtcattgatacttttgctcaccatggcgatttattttttcatcgacatacaattcttatgaatattacagaacggaatatctggaagctaaataatttaccaccaatggagtattgctctctggcgcgggcgcaaaaattattaaactgcgaactggaagacattcttcactggcatgatataggcgcaatcaatctatgtcttaagcttaacccaacgccgggaatattaaaaatcgccgtcctctcccatcaggaaaaagaggtaaccagcgcgtttaatccatttacctcagtcgaggcaggagaaacagtctggtcgcatcactcccatatccgcagcattctgcgacttgaaggcgatattccgacgatggaaaccctgcgcggaaatacggtaacccagttcaacgtaaaggtatttgcttcagggctctggcatccacactgtcggaacctaatggcgctgctggaggcgccagatgatattcttttcgaaaaccgcctcagcatgatgctgccggataaaccatttgtttattgtcatttcattccagaggaagacgaacgcccctcgatatcattgaaccgcatctatatcaccagccaggccattgagaaaatatacgcccacagtattagcgcccggcctatggacgtgacgaaaaatccgctactggatcaaacccgttacatccagcaggaattaaccgtcctgccgcaaagtgaggtattgctggaatttatccattatcttgttcagtcccatactgtatttaatgagaagttgcagaatatggctgagccagacaagactcagctctttcatcacgtgctggaaaggcttaaggaagaaggcatgcttatagagaatgcccagcccgatgaaggcgatatcggcagcgaagccagccgtgagtcgcagttcgccggcgagtaacgtagtccttcaggcaagggactggcggttttcctgctcaatcgttatcgcgttctctcgggccagggtgatgaattcgcgcgctgcggcgctctgccaggcgccctgccgctgcaataaacaggccgtgcgctgcagccgcgcaggtcttagctcaatcgccaccacatcatcaaactgtccggcgatcgccgccggtagcagcgttgctaacgttgtgcttcgaataaccgacagaacggccccgatggagttggcctccatccgcacgtctggttcgagccgatgaaggcggcaataacgatcaatctgctcgcgggtagcaaactcgctgctcagtaaaattagcggctgggcgtcgagagcctgcagttgcaagtcgcgctctcctgccagcggatgcgcacggctcaccaccagcgcaagcgtttccgtcagcagcggctgaaccacaatttcctgtgaccggctgtcgtcaaaggcaatccccacatccagttcatcctccagcagcatcgcctccatccgctcctggttcatctcctggataagcacttttactccaggatagcgtcggtagtacgcctccatcagcgggcccagcatataggtagtgaaagttggcgtcatagcaatgcggagtttaccgtgctggagatcttctgcgtcatgcaaggcgcgccgaccttcctcaagctcgcgtaacgcgcgacgcgcatactccagccagatctcaccggcatcggtcaggcgaatacgtcggccagagcggtcgaaaagctgaacctccagcatcgcttccagctggcgtatctgctgtgacagcgcaggctgggagacatgcagcgccgcggcggcgcgggaaaagccacaatgttcagccacagcgataaagtaggaaagttggcgcagaagcatcggcccacctataagaaattccaataggcattatcataaataagtcttttaacttatgaaacaagagacgtaccctcttcgcacgaccctcaacatatttcacctttaacatcgttttatgcaggagtgactatgtccgctcacgatcgttatcttcagcgcgcattagtgctggcaaaacaaaacattgctgacggtgggcgccccttcggcgccgtgctggtgcggaatgatgagattgtcgctgaaagcgtcaatacctttcatctgagcggtgacccaacggcgcatgccgaactgaacgccgttcgcgatcttgccgccagacagggaagcgcggcgttgcgcgaatgcgtcatctatgccagcggacaaccttgccctatgtgcctgagcgcgctctatttaaccggcgtgcgggaagtgtttttcgccaatagcaatcaggacggggagccttttcagctctcgaccgccgcgatttatcagcagctgcagcagccgctggaccagcaaacgctgccgatccatcatcgcccgcagccggagggaactgaactttatcagcgctgggcggaacggcagtcatgacaccagcgctgcgacagaacctgacgctggcagtcctggtactgactgggatcaatatgcggccgctgcttacctccattggtcctttgctgccggacatccgcgcagccagcggcatgagctataccctggccgcactcctgaccgcgctgccggtgatcgcgatgggggtgctggcgctggccgctggctgggtcgatcgctatatcggtcaaaagcgcagtattgcgctgagcctgctgattatcgcggtaggcgccctgctgcgggaaatcgccccgaatagtggcttactgctcaccagcgctctggccggaggaattggcatcggcattattcaggccgccatcccggcggtaattaagcacctctttccccgacggacgccgctggtgatgggactatggtcagcggcgctgatgggcggcggcgggttaggcgccgcgttcaccccatggctggcgtcacatagcgcggcctggcatgatgcgctagcctggtgggcgctccctgcgctcctggctctgctcagctggctggcgatttgtcggcatttgcctcgcgcaccgcatcagaccagcgcttccccccgggtcgcgattattggccagcgccgcgcctggacgctgggactctatttcggactgatcaatgccggttacgccagcctgatcgcctggctgcctccttactacatccagctaggcgacagcgcccagtacagcggttcgctgctggcgctgctgaccgtcgggcaaaccgccggcgcgctgctgctcccggcgctggctcgccaggaggatcggcgccagcttcttctgctagcgctggcgctacagctgattggcttcggcggctttatctggctgccagagcatttctctgcgctctgggccattgcctgcggcgtgggattgggcggcgcgtttcctctgtgcctggtgctggcgctggatcacgccggacaaccggcggtggccggcaggctggtagcctttatgcaggggatcggatttatcatcgccggtctgtcgccctggctttcaggcctgctgcgtagcctgagcgggaactacacgcttgactggtcctggcatgcgatctgcgtcctgctactcatggcgctgacgctgcgctttatcccggcacactacccggccgagtggcgacagcgcgcctcagacctgccctgaaccgacggcggcgcgtggcaaagataatgccgcgcgctctcgttggccttctccgcccgccccatcgctaaaacccgtttccttcgcgtcgctggcgctaaatttattaccctgtgaaattaatgtgtcgccgaatcacgacactcgtaagtaactaaaaattaataaaaaaatgcctcttgtttccctgattttttaggcgtacattagcgccatctggagcactaaacgcacagaattacgggctgctgcagggtgaagttacactggcgacagtccttgaaaaacagaacaattaattcatttgaacgtcgcacaagcgcgtggagtgatgagtcgtgaaatacttttttatgggcctctcttttatggtcatcgtttgggccggtacttttgccctgatgatctagactgcagcggtgtcaaaaaaaacgggagccttcatgctcccgtttttattttgccgtgctgcccgcagcgctagctcgcggaggccagcagaccatccgcgcggaacatcgccttgataccgcggatcgcctggcgcgtacggtcccggttctcgatcagcgcgaagcggacgtgggtatcaccatagtcgccaaagccaatccccggcgagacgcaaaccttcgcttcattaagcagctttttcgcaaactccagcgaccccatggcggcgtaaggttccggtattttcgcccacacgtacatagacgctttcggacactccaccatccagccggcctcatgaagccctttgaccagcacatcgcgacggcgcttatactgttcggcaatatcgcgcacgcactgctgatcgccctccagcgcagctatcgccgccacctgcagcggagtaaaagtcccgtagtcatgatagcttttgatacgagcgagggcattcaccaaagtcttattacccaccataaagccaatgcgccagccggccatgttatagcttttcgacagggtaaagaactcgacggcgacatcccgcgcgccggacacctgcatgatggagggcgctttccagccgtcatacacgatatcggcataggccagatcgtggacgaccagaatgtcatactgcttcgccagagcgacaaccttttcaaagaaatccagttcgacgcactgcgcggtcggatttgagggaaagccaaggatcatcatcttcggcttcggatagctctcgcggatggcgcgttccagctcgttaaagaaatccaccccttccaccagcggcactgagcgcacctgcgccccggcgattaccgcaccatagatatgaatcggatagctggggttcggcaccagtacggtgtcgccatgatccagcgtcgccagcatcaggtgcgccagcccctctttcgaaccaatggtgacgatcgcttccgattccggatcgatatcgacgttatagcgttcttcataccagcgtgaaatggcgcgacgcaggcgcgggatcccccgcgaggtagagtaaccatgggtgtcaggccgttgagcaacggtgcagagtttttccacgatatgcggcggtgtcgcgccatcgggattacccatactgaaatcgataatatcttcgccgcgccgacgcgcagccattttcagttcagcagtaatgttaaaaacgtacggagggagacgatcgatacgcgtaaaacggcgttcaggactggattcagccataggttcctctaattaacgttagcgcccggaccgtccgagcgacgctgccgctgttgcggctcgtttagaaaataacctgaaaaaattcatgttgtcgagaggcccgttaaaaaatattccctggcatataaaacgggtatcgactgcgctaaatgcggcagttcattggcggaataatcccgggttgtataaaggtggtaacacactgatatctttcttaacacagaatattatcgttaatggcgaagaccgccgctatcgcgatgctttttaattaatccccattaaaaagtgcgacttttccgctttatggttccacggctggtcttctgccgtcaggttttttatcatgtccctttctggccactgacgcggcgcacccatgcacgaaatctttactatgatgctggcggtctatgatcgtgcggccctgatgcttatttgcctctttttccttattcgcctgcgcctgttccgcgaactgttgcataagtcggcccatactccgaaagagctgctggcggtgacagccattttctcgctgttcgcgctatttagtacctggtccggcgtcccggttgaggggtccctggtgaacgtgcgcattatcgccgtgatgtccggtgggatcctgtttggtccctgggtgggcgcgattgtcggggcgattgccggcgtgcaccgctatttgattgatatcgacggcgtgaccgcggtgccctgctttatcaccagcattgtcgccggcctgctgtcggggttgattaatcgtaaagtggcccgcgaacaacggtggaaaatcggcattctggcggggatgatgtgtgaaactctgaccatgatcctggtggtggtctgggcgccttccctgagtctcggcgtagatattgtttcgaaaattggtatcccgatgatcctcggcagcgtctgcatcggctttatcgtgctgctggtgcagagcgttgaaggggaaaaggaggccagcgcggcgcggcaggcgaaactggcgctcgatatcgccaacaaaaccctgccgctgtttcgacacgttaacagcgattctctgcgccaggtttgcgagattatccgccgcgacattaccgccgacgcggtggcgatcaccaataccgagcacgtgctggcctacgtgggcgtcggtgaagccaactatcaacgccacgacgatatgattagccccaccacccggcaggcgattcgttatgggaaaatcatcataaaaaacaatgacgaagcccaccgcaccccggagatccactccttgatggtgatcccgctgtgggaaaaaggggtggtgaccggcacgctaaaaatctattactgccacgcccatcgcatcacttcgacgctgcaggagatggcgattggcctgtcgcaaataatctccacccagctggaagtctcccgcgccgaacagctgcgggagatggccaacaaagcggagctgcgcgccctgcaaagcaaaattaacccgcattttttatttaatgcgctgaacgcgatctcctcctcgattcgccttaatccggacaccgcgcgccagctcatttttaatctgtcgcgctacctgcgctataacatcgaattaaaagacgatgagcagattgatatcaaacgagagctgtatcagatcaaagattatatcgctattgaacaggcgcgattcggcgacaagctgacggtcatctacgatattgacgacgacgtcagctgcgtgatcccgagcctgcttatccagccgctggtggaaaatgccatcgttcacggtattcaaccctgtaaaggcaaaggcgtggtgacgatcggcattaacgagtgcggcaatcgggtacgcatcagcgttcgcgatacgggcaacggtatcgatcccgccgtggtcgcccgcgtggaagccgatgagatgccgggtaacaaaatcggcctgctcaatgtgcatcatcgggtgaaacttctctacggcgagggtttgcatatccgcaatctgacgccgggaaccgaaatcgccttttatgtccccaataactctacgccgcaggcgctgacggagtcgctgttgtcatgagcggagaaaagatgaaagttatcattgtggaggatgagtttctggcccagcaggagctctcctggcttattaacacccatagccagatggagatcgtcggcagctttgacgacggcctggacgtgctgaaatttctccagcacaacaaggtcgacgccatctttctcgatatcaatattccgtcgctcgacggggttctgctggcgcaaaacatcagccagtttgcccataaaccttttatcgtctttatcaccgcgtggaaagaacatgcggtggaagcctttgagctggaagcctttgactacatcctgaaaccttaccaggagtcgcgcatcatcaatatgctgcaaaagctgaccaccgcctggcagcagcaaaataacgctgcttcaggattagccagcgcagcgccacgggaaaacgacaccatcaatctgatcaaagatgagcggatcatcgtcaccagtattcatgatatttattatgccgaggcgcatgaaaagatgacattcgtctatacccgccgggagtcattcgtcatgccgatgaacattactgaattctgcagcaaactgcccaccgcgcatttcttccgctgccaccgctcgtattgcgtaaatctcagcaaaattcgggaaattgagccgtggttcaacaacacctatgtgctgcgcctgcgtgacctggagtttcaggttccggtcagtcgcagtaaagtgaaagagtttcgccagctgatgaatctgtagagagcggaaagcaccgccatccgggctacgacggtagcccgggagaagaatgcttaaagcacctggcccagcgtctgacgcagatgcgcgccggagcccagcaggcctgggttatcatgcacaatcaggtaaaccgggatatcctgaacataagctttaaaacggcctttgtcttcaaaaccgccgcggaaaccagaggctttaaagaactccaggaagcgcggcacgatgccgccggcgatatacaccccgccaaacgtcccgagggtcagcgccaggttaccgccgaagcgtcccataatgacgcagaacagcgacagcgcccgacgacagtcggtgcagctgtccgccagcgctcgctcggtcacctcacgcggctgcaggttctccggcagtcggccgtccgatttgacaatcgcgcgatacaggttgaccagcccgggacctgagagcacgcgttctgcggaaacatgccccagctcggcgcgtagctcttccagaatgatcccttcttcttcgctgttcggggcaaaatcaacatgaccgccttcgcccggcaggctgacccaacgcttatcaacgtggaccagatgcgccacgccgagcccggtcccggcgccataaacggcgatcggtttgcccgctaccggcgcactgccgccaaactgaataaggtgctcagctttcagcatcggaatggccattgaaacagcggtaaaatcgttaattatctccagatgggcaaagccgaggttgcgcttcatttcggcgatagagaaagcccaggtatggttggtcatcgccacccagtcgccggtaatcgggcatgcgatggcaatacaaccttcgttgaccgttacctggtgctcctcgagatagacgcgcaccactgcctccagactggggtaatcgagcccggaataggtctttgcacgagagatctctccactcgccagatcacatagcgccaggcgggcgttggtccccccgacatctcctactaaagcaaattttgtcattccgttacggctccgctaaagtcaaaataaatcttttggcacactgtaaattcatggcggcttaacaacaacgtccaacgcgcagacgccccttgtttagcgacacaggtcacatttagtttgtaatctatgcaaggtagcctgtaaaggacgcgccggatatcagatgtcaccttaactttatcgtttcagcaccatttgcatcgacggtctccgctgacgaaggcaaagtagtgctccagcacttttacaaggacatttccatgctccatcctcgcgccagaacaatgctgatcctgtcggtgccggccatcctgataggtatcgcctgcagcctgatcctgatcgtggcgatgaaggttgccgcgctgctgcagcgcgtgctgtggagcaatctgcccgcgcagttgggggtgagcgccgacagcccgctgtggatcatcgccatgctgacggcgacagggatcgcggtgggtctggtcattcgttacagccccgggcacgccgggccggatccagcgaccgagtcgttaatcggcgctcccattgccaccggcgcgctgcccggactcctggccgcgctgatcctcggcctcgccggcggcgtcagcctcggcccggagcatccgattatggtggtgaatatcgcgctggctgtcgccgtcggctcccgactgtttccgcgcgtcagctcgctggactggaccatcctcgcggcctcaggcaccatcggcgccctcttcggtaccccggttgccgccgcgctgattttttcgcaaaccctcaatagcagcaacgatacgccactgtgggatcgcctctttgctcccctcctcgccgccgccgccggcgcgttgacgacgggtctgtttttccatccccatttttcgctgccgatcccgcactatggtcagatgcgcttcgttgatattctcagcggcattatcgtcgccctgatcgctatcgccgtcggcatggtggccgtctggtgtctgccgcgactgcatgccctgatgcatcggttgaaaaatccaatcctgaccctcggcatcggcgggctgctgctggggatcgtggggacgataggcgggcccttaacgctctttaaagggctggatgagatgcagcagctggccttcagccagacgctaaccgccgcggattttctgcttatcgcgctggtcaaactggcagccctggttcttgcctcagccagcggctttcgcggcgggcgaattttcccggcggtgttcgtcggggtagcgctggggctgatgctgcatgctcatgttgacgcggtgccggcggcaatcaccgtttcctgcgcgatcctcggcatggtgctggtcgtcactcgcgacggctggttgagcctgtttatggccgccgtggtggtcccggatacgactttgctgccgctgttgtgtatggtgatgctcccggcctggctgctgctggccgggagaccgttgatgattgccaaacggcataccgattaaacgcggctgtttcgctcctcaagggcctgcgtcaccgcgcgcaggaaatcggggatatccattttcggcagcatcacttctaccagggtgagggtatcggaggtgatgctctccgtcatcgcctcccgcagttcagacgtctgagtgacccgccggcagcgcgaagcaacgtcaggggcgaaggcttccggcagccgctgccagtcccacagagcgatgtcattgtagcgctgctctggaccatgaatcgcccgttccacggtatacccttcgttattcagcagcagaataagcggcttttgcttatcacgcagcatggagcccatctcctgaatggtcagttgggccgcgccatcgccgacaattagcaccacccgccgctccgccgccgcggtttgtgcgccataggcggccgggagagtaaaaccaatcgagccccacagcggctggacgatcagcgatgcttcagagggcagcttcagagccgcaataccaaaggcggccgtcccctgatcggcgagaataatatcccccggacgcagggcgccctgcaccgtcgcccagaaatttttctgggtcaactcgccttcagcgccctcctcagcctccggcgccacgacctgaggcgtagcccactccgccgccagcggggcggaaagcgtcatcagcgcggccaaagccttatccatcggcaccccgctgaaccagtgatcgcccaccctgacggcgaagggctggatctcaatagtcttttcccgcgccagatgttgggtaaatcctgcggtgatggtgtcggtgaagcgcgtgccaatgcagatgatggtgtcggcgttttcaatcgcctcccgggtctgcggcgcgctggcaatcccgctgtaggtgccgacaaacccgctctgctgctcatcaaacaatcccttgcccatgagcatcgtcgcatgggcgacaggcgttttcgccacccactcccggagcgtcttctgcaggccataacgttgcgccaggaagtccgccagcagggaaatgcgtcggctgccccgcagcaggcggctggcatgttcgcagaacccggcaagctggttttcatccgccggagcggggtccaccagcaagcgctgggctggggcaatcgctgccgctctggcgacatcggctggcagcatcaaatagccggggcgatgatgcgtcaacatatcgcgcagcacacggtcgatttcatggcaggcgttgccggcggtcagcagcgcctggctacaggtgatctgctcgctcatgcgggcgaaatggcgaaaatcgccatcgccgagggtatggtgcagcagttcgccgcgctgctgggcgccggtagagggcgcaccgacaatatgcaataccggaatatgttccgcatagctacccgcaatgccgttcagcgcgctcaattcgccgacgccgtaggtggtcagcagcgcaccggcccctttgatgcgcgcatagccgtcagcggcatatgccgcattcagctcgttggcgcagccgacccaccccaaggcgctgtgcgcgatgacgcgatcgagaaactgtaagttgtaatctcccggcacgccgaacaagcggtcaataccgcagtcgacaaggcgatccagcagataatccccaatagtgtaggtcggttgcatatccattatcctcattttagtgcaggtgtaatttgagtattgaataagcgatccgcctgtccagatgggaggtgataatggcagtgtaaagcaataattacgcagaaaaagcagtgtactccacgcagaacattgtttagtgtaaacgtatacacaccctgttttgtcggcggaggaagaatggtttaccaggcaagcaccacgcgatatcaaacgatggagtaccgtcgctgcggccgcagcggtctgcaactaccggccatttcccttggcctgtggcataactttggcgatgaaacgcgagtggaaaccagccggcagatgctcctgcacgcttttgacctcggtataacccatttcgatttggccaacaactatgggccgccgccgggctcggcggaaagcaactttggccgcatcctgaaagagtcgctcctgccttatcgcgatgagttaatcatctccactaaagcaggttacacgatgtgggacggcccttacggcgactggggatcgcgaaaatatctggtagccagtcttaaccagagccttaaacgcatggggctggaatacgtcgatattttttaccatcaccggcctgatccacagacgccgctgatggaaacgatgcgtgcgctcgatcatctggttcgtcagggtaaagcgctatatgtcgggatctccaactatcctctggcccaggcgcgggaggcggtgaagatccttaacgacctcggcaccccctgcatcatccaccagcctcgctactcgatgttcgaacgcggcgtggaagaaggactgctggattttctgcagacggaagggattggaagcatagcgttttcaccgctggccggcgggcaacttaccgaccgctatctcaacggcattccggccgactcgcgcgccgccagcagcagtcgttttctgcagccggaacaactgactcctgcccgattagaaaaaattcgtcagcttaacaggcaggcggaagcgcgtgggcagaagctgtcgcagatggcgctggcctgggtgttgcgcgaagagaaagtcacctcggtgctgatcggcgccagcaaaaccgcgcaactggatgatgccgtcggcatgctgcagaatcgccatttcaccaccgaggagtgcgcggccatcgacgccatccttgcgctgtaaagcaaatgttactttagcaaaaagtgctctttcctgcgctttcggagttcgtccgatgcggtgggtctttaccggcccgtaatatcaggttaacaggccgcttacggccccgatcgtgaaggagaagagtatgttcaggtcactgattctggcagcagtactgctggccgcagggccactggtcgctaacgctggtgaaatcaccctgctgccgtcggtaaaattacaaataggcgatcgtgacaattacggtaactactgggacggtggcagctggcgcgaccgtgattactggcgtcgtcactatgaatggcgtgataaccgttggcatcgtcatgacaacggctggcacaaaggctggtacaaaggcagagataaagcctgggagcgcggctatcgtgctggctggaacgaccgcgatgaccaccgcggcggctggggacgcggcccgggtgggcgcggtcacggtcatggacatggccatcactaacaaacgaaaaggggagcccatcggctcccctttactttattcagcatcaggaatcaattaatccaccccgagcagcgaccccactattaaccagccgttcaggctcaccacaatagcgactatcgcccagccgatgcctctcacccaacgggtattcaccaggtcccccatcagcttcgcattgctggtaaatatcagcagcggcaccagggcaagcgcaatgccaaagctgagcaacacctgactcattaccaggatgcgcgtaggatccagccccagcagaatgacgacaaacgacggcagcatggtgatcgcccggcgaaaccacagcggaatatgaaagcggataaacccctgcataacgacctgacctgccagagtgcccaccacggtcgacgataaaccggcggcaatcaggctgaggccaaagatggtcgccgccgcgtggctcagcagcggctccagcgtcatgtaggcctgatcgagatcggcgacgccggtatggccattaaagtggaatgccgccgcagcggtcgccatcatcgccagattgacgaatccggcaatggtcatggcgatcgccacatcccagcgggtcgcgttatagcgttcttttcgcgttccgccatgcagatgctgagtcagcgatgagtgtaagtaaatgacgtgcggcataattgtcgcacccagtaccccggcggccaggaataccgcctccccgttgggcagcgtggggatcaccagccctttcgtcagaggagccagcgcgggctgggaaaagatcaactccacgacataggccacggcgacaaacagcaacaatccaccgatcaccttctccagtggtttttgtccgcgccgctgcagcatcaggatcagaaaagtcgccaccccggtcagcaccgccccctgcagaagcgacacgccgagcaccagcttaaagccaatcgcggcgccgataaattcagccagatcggtggccatagcgataatttccgcctgtacccagtaaaaccagacaacaggacgcgggtaatggtcgcggatctgctcggccaggtttttgccggtggcaatgcccagtttggcagaaagcacctggatcagcatcgccatcaggttagcccacaccacgacccacagcagctggtagccaaagctggcgccggcctgaatgttagtggcgaaattacccggatcgatatagccaatggcagcgacgaaagccgggcccattaaggcgagcttcaccttgcgcgcggcgcgactactgctattctcaacgcgactgctagtcatcttctgcctctggaaatatagcctttgctatgtttcatgctatcaaaatgcgaatgattatcaagttcatttagaatggagataatgattgctgtgatagaagggaacaatagctggccggaaatgaaatacgggcgtcagaaaacgagatccagcccgctattaagagtagtacaagaatgcaacttttaaaacctttacgtaacataacaaaagtggatgttggatcactatttttgccattggtcacagttccttgcaatagtgtgcaattgatctcgttttctttaaagccgttgcatagaatgtgcacggaaatttaacctgcctcatatttggagcaactatggaccgcgtcttgcattttgtcctcgcgatcgttgtggtggctatactggccctgttggtcagccatgaccgccaaaagatccgtattcgttatgttgttcaactgcttgtcattgaagtcctgctggcctggttcttcctcaactccgatattggtctgggttttgtgaaaggattttccgagatgtttgaaaaactcctcgggtttgccaacgaagggacaaacttcgtgttcggcggcatgaacgataaaggcctggccttcttcttcctcaaagttttgtgccctatagtcttcatttcggctttgatcggcattttgcagcatattcgtatcctgccgattgtcattcgcgcgatcggtaccgtcctgtcgaaagttaacggcatgggcaagctggagtccttcaacgccgtgagctcgttgatcctcggccagtcggaaaactttatcgcgtataaagatattctcggcaaaatgtcgcgcaaccgcatgtacaccatggcggcgacggcgatgtccaccgtgtccatgtccatcgtaggcgcttacatgaccatgctgcagccaaagtatgtcgttgcggcgctggtgctcaacatgttcagcacctttatcgttctgtcattaattaacccttaccgcgtggaagagagcgaagaaaatctgcagatgtcgaatctgcacgaaggtcagagcttcttcgagatgctgggcgagtatattctggcaggttttaaagtcgcgattatcgtggcggcgatgttgatcggcttcatcgcgctgatctcggcgctgaatgccctgttcgccaccgtgaccggttggttcggctatagcatttccttccagggtatcctcggctatatcttctacccggtcgcctgggtgatgggtgtgccggcaagcgaagcgctgcaggtgggcagtattatggctaccaaactggtctccaatgaattcgtcgccatgatggatctgcagaaaattgcctcgacgctctccccgcgcgcggaaggcattatctctatcttcctggtctccttcgccaacttctcatctatcggtattattgccggggcgatcaaaggtctgaacgaagaacagggcaacgtagtttctcgcttcggtctgaagctggtgtacggctccacgctggttagcgtgctgtccgcctcgattgcggcgctggttctgtaacagacgtcagtcatctgagccgggcaatgcccggcttttttttgcccgacattcacccagcggctgtggtttaccgatcagataaccctgcagataattcacgcccagctccagcaagcgcgctttttgcggttcgctttcgacatattccgccaccacgctcatctgtttcgcccgcgccatctcgacaatcgatttcaccatgatggcgtccagcgggtccgtgaggatgtcgcggacaaagcagccgtcaatcttaatgatatcggcctgtagatgtttcagacgttcatagttcgcatagccggtgccaaagtcatcaatagcgatggcgcagccaaacgcgcgcaacgcttcaagattttgccgactggtgtccgcattagagaaggcctgctcttcggtcacctcaatagttataagttctggcgagacgctatagcgttgaaacagcgcgataatctgccctgcgctgttcttttgcatcagagttgcaggcagcaggttgaccgagaatcgctggccgggatgcttatggagcatactgaacaaggtctccagcaccagcatgtcaaaacgttggctgaggttaaactgcacaatcagcggaatgaatcggtcgggcataatgacgctatcgccacagcgcatgcgcgtgaggatctcatgataaccctccccctccggattctgaatcggttgcgcatagagcatcagcgcgcgatctttgagcacttgcttgacgcgcattaggaggcgcacctgctcggtagtttgatccaccaccagatcctgctcctcgtccagcgccagcacccgacgttcactgcccgcctgttcggaaagccagcttagctggcccagcatctggtaaagtccctcaccctggccgtcatcgcggccccaggccgcgccaaactccaaatccagcggctgattgtgccagctgaactttttgtggttgaggaccgcgaccatatgattcaagcgggacgacggctccggtccatcaagcacgaggatcagttcgctgcccggtacctggaagactttatccgccgctcccagcagcggttgcagcgcccgaataatctgccgtttacagtccacccccatcatcagaccataatgccgactgagaaagtcgagattatcaatacgcaggctgcagatagcctgctgaggacagctctgtaaatggctctccagcgcgcgcaggttaggcaagccggtcagcggatcctcttccgcctggctacgccagcggcgtttgttgcggtcgctgcgggcatagatgtcggccatataaaacaaacagatagtaaaggagatcagaaccgacagcacaaaggagagtgaatactcgctttgcaccccctggagaaagtttttgttatataccaccagcaaaaaggccgagacagaccatgaaatacgcaatagcgcatggcctattcgactgataccgataaagtagacaataaaaataaccggaactaaataaccggcaataaattcagactgatacggcgcacacaatagcgttaatatcaccgccaacgcgataaaccaatatagggtaaaggagcgatattgcggtgccagccacggtaaacattcctgctgccagaaacgtcgggcgtagcgcggactgataatcatccgcattggataataaagaaacgtcgtaaaaattaatgccgcactgattaaactttggatatctattacagtataaatcaacggcatactaccaaagtaactggtaatagctaatggaaacgcaaaatattgtccggcgagatacatggtgattttcaggagcaccggcgcgaagaagccgccccagaagatccgcgcccccatatgctttgccgttggaccgcagcgccagcgcttccccaccaacagtcgcagaatagcgcaggagacaaacacggcgaacagttgacaaaaaagtaagataaacgcctgcggcagcgttaatttaatgagaaaactattggtgatggcaaacgcgagaattaatggcgcaattgcatagcggccaaagataaaaataacagaaaacatcacgctgattggcagccaggcaatataaataaggttgccgtcaattatcgtttgcggtgaaataaaacgagccagcggaatagcgactaaacaaatgataaaggccaatagagtttttttgatattaatgttaattttatcaagcattattgttaattaaaactccagaaacctcatcacgtttaatgggggaaatgttatgttgcttatttagggcaggcaaggcgaattatcaggaaaaagtctgaaattactttcgattttaattgctggagattaactgacgtaaccagaaagtgctttacatgaaacccgctaaaaacaaaaacccccgcggaagcgagggttctgaattttggtggagctaagcgggatcgaaccgctgacctcttgcatgccatgcaagcgctctcccagctgagctatagccccacaggacttctttacgaaccaaatccgctgggtgcagaatttggtggagctaagcgggatcgaaccgctgacctcttgcatgccatgcaagcgctctcccagctgagctatagccccgtaacgtaaagcgtgtcgtgttgacgggcggcataatatgaattcctcgctcaggtgtcaacggcaaaattatccttcccgattcaatcgctgaaaaagcaggcaacttgctgacattgcgagccttatcgcagtcagaagttaaacaggtcaccttttcacgtaaaaggatgctataacatgggcagctaattcccatacatttactcaggaaatagtatgctcaaggaacgaatgacacctgaagaaattgcccatctaaccggctacagtcggcaaactatcaataagtgggtgcggaaagaaggctggcaaacctctccgcgacctggcgtccagggcggcaaagcgcgcctggtccatgtcaatgagcaagtcagggagtttatccgcagcgcccagcgcgtggcggagacgcccggcatctattctccccatgatagcgatctggaatcgctgctgctgaccctcagtaaagaactcacccccagcgagcagaagcagcttatgtctttgttgctgcgcgaggggatcaccgggttactgcttcggttagggatccgcgatcggtaaaccatgatgaaactgaaagataaaatgacgcccgcagagcttgccgactgcctggggctggccagacaaacgatcaatcgctgggttcgcgagaaacaatggcgcaccgaagcaatacccggcgttaaaggggggcgagcgcgactggtggttatcgaccaaccggtacgcgagtttctgaccaacatccctgccagacgccatctgcttaccgacaatcatctcgcggaatcgccaggtgcatacctggtcaatgaggcagacgcgatctggcggcaaatcacggaaaccctacagctgatgactccggcagaacagctgcagctccgcgatctgctggcccgggaagggattagcggttttcttgcccgcctcggcatcgccagtccggaataacaggcaaaaaaaacggcagggtaacctgccgttgtttcagctgcgtcgccgtcaggacgcctggccttcgcgttcagcgataaaagccagcgctttattgatacgatctacgctacgggatttaccgatagcatggacagtaacgtctagcgcaggagattgccctgccccggtaaccgccacgcgcagcggcataccgactttacccatccccacctccagctcatcagcagttgcctgaatcgcgtgatggacgttttccgccgtccagtcgctaatcgccgccagcttatcgcgaaccacttccagcggctgacgcgccactggacgcagatgttttttcgcggcgtcgacatcgaattcagagaactcttcatagaagtagcggcagctctgggccatctctttcagcgtcttgcaacgctcgcccagcagtttcaccagctcagccagctgcgggccgttgcgagtgtcgatattttcctgctcgatatgccactgcagatacgttgccacatactccgccggcagggtattgatatagtgatggtttaaccacagcagtttatcggtgttaaaggcactggcggatttgctcaccgcgcccagcgaaaagaactcaatcatctcttcgcgagtgaaaatctcctgatcgccatgagaccagcccaggcgcaccagatagttgagtagcgcttccggcaggtagccgtcgtcgcgatactgcatcacgctcactgcgccgtggcgcttggaaagttttttaccgtcatcgccgttgatcatcgacacgtgcgcataaaccggcaccggcgcattcagcgctttgaggatgttgatctggcgcggcgtgttgttgatatgatcttcgccgcggatcacgtgagtgatcgccatatcccagtcatctaccaccacgcagaagttataggtcggggaaccatcggtacggcgaatgatcagatcgtccagttcctggttgctgaactcgataggtccgcggatctgatcgtcaaaaataaccgaaccttcctgcgggttggcgaaacgcacgacgcacggctcatcgtcagcatggtgctcgtggctatggcggcagcggccatcgtaacgcggcttctcacccttcgccatctgctcttcgcgcagcgcttccagacgttctttcgagcaatagcatttgtaagcggtaccggcttccagcatctcatcgattacgttgttataacgatcgaaacgtttggtctggaaataggggccttcgtcccattgcagattcagccagttcatgccatccatgatggcttcaattgcttccggggtggagcgttcgagatcggtgtcttcaatacgcagcacaaactcaccgccgtggttacgggcaaaaagccaggaatagagagcagtacgcgcaccgccaacgtgcagatagccggttgggcttggcgcgaagcgagttttgattttcatgaattggccttacgtttaataaagatgccgatagccggcaatgtccggtggaaattatgggtcaatattctaacaccgtgggctgattcctcaatgttgttcccatcggaacgtcacggtttgccatttttgtttataaatcatgctatggcgccggtttcgcgatcgctttgtttaattttacgacgaacgaacgaattctttagaaaaggcgttgactcattttcaactctccctataatgcgactccacacagcgggggtgattagctcagctgggagagcacctcccttacaaggagggggtcggcggttcgatcccgtcatcacccaccactacttaacgtagtctccgccgtgtagaacagaaaattgagaagtgggtgattagctcagctgggagagcacctcccttacaaggagggggtcggcggttcgatcccgtcatcacccaccactttctcgccagctggattttctgtcaaaatgtgaagtaccgaagtgggtgattagctcagctgggagagcacctcccttacaaggagggggtcggcggttcgatcccgtcatcacccaccacttcgggtcgttagctcagttggtagagcagttgacttttaatcaattggtcgcaggttcgaatcctgcacgacccaccaatgtaaaaaggcgccctaaaggcgcctttttgctatgcgcggaacatggccctgccacgagaccctccgcagcaatcccccctgtcagcgctgatatagcggatcttcaaccctggcggcggttaaattctccccttcttcacgcacaatttcccataacgcctgagcggcggtcgacagcgagcgatttttcctgcatgccagcatcagctgccgctccatcaccggagtcagccgtttcaccgtcagatggctcccctgcggtaacggtagcgccagcgccggcagaacgctgatgccaattcccgattctaccatcggaaacagcgttgccgggtggccaatctcctggacgatgttcgcccggatagccagtctgctgagggccgcatcgatcagcgggcggctgccggacgcataatcctgcaggattagcctttcatcctgcagcgcctgccacggcacttctgtcaggctggcaaaaggatgatcctcccggcagagcagcaaaaatggttccgccagaaccacttcacactgaaggtctgccgccgggcccggatcaatcacgatgccaaaatccacttccccctggcggatactctccagcacccactgctggggccgatcgtgcagcacaaaatcgatatcgggataacgacgattgctgtgagcaatacactgcggaataaggtgggcggaaatcgtctgactggcggcgaccttgacggtgccgctcagctgctggcctacccgcccggcgtcacgcagggtaatcgtcaactcatcaagcaaacgttccagcctgcccgccagctgctgacccgcctcggtgagcaccacttcgcgagtagtacggtcgagcagacggacgccggtctgatgctccagctccttgacgctatggctgacggccgactgacttaagccaatcatctcccctgcccggctgaagctgctggcccgggcgacggtgacaaatacttttaactgacgcagagagtaattcatcttttttattcatgaatagatgcaataaatcaattttatttctcaaatgaaaaaaagcacaatagcgcatctcttttcaggagcgtttatgaaacttttccgtattctcgatccgtttacggcaacgctaatcaccgttgtcctgctggcctcattcttcccggcccgtggcgctttcgtccccttctttgaacatctgaccaccgccgccatcgcgctgctgttctttatgcatggcgctaaactctcccgggaggcgattatcgccggcggcagccactggcgtttgcatctctgggtgatgtgcagcacctttattctcttcccgctactcggggttctgtttgcctggtgggcgccggtgaatgtcgatccgatgctctacagcggctttatctatctgtgcattctgccggccaccgtgcaatccgctatcgcctttacttcgctggccgggggcaacgtcgcggctgcggtttgctcagcctcggcctccagcctgctggggatctttgtttccccgctactggtgggggtcctgatgaaccttcacggcgcaggcggcagtctggagcaggtcggtaaaattatgctgcagctgctgctgcctttcgtgctcggtcacttatcgcggccgtggattggcgactgggtggcgaagcataagaagtggattggtaagaccgaccagacctcgattctgttggtggtttactccgcctttagcgaggcggtggtgaatggcatctggcataaagtcggtctgggatcgttgctgtttatcgtggtggtcagcctggtgctgctggccatcgtcatcgcggtcaacgtctttgtcgcccgccgctgcggctttaacaaagccgatgagattaccatcgtcttctgcggttcgaaaaagagcctggccaacggcattccgatggccaatattctcttcccgacctccatcctcggcatcatggtgctgccgttgatgatcttccaccaaatccagctgatggtctgcgcggtgctggcgcggcgctacaagcagcaaaccgatgcgcgtctcgctgaggaaaaggccaacgcggccaaagcctaacgcgctttcttcaggggctggacctgatcgctcagcccctcagttttaatcagcagggtcaacgccatcagctcgccaagatgcccggcagggaattgatccttacgcgcgaaccacaataaatactcttccgggacatcgattaagcgacgtcccttgtatttaccgaacggcatttcggtattggctatctcgaccagctgcgctttatccacgttattctcccagcagacgcatcatttcggcttcgtcaatcacctcgatgcccagctcctgcgctttcgccagcttagaccccgccgcttcgccggcaatcaccaggtcggttttcttcgacacgctgcctgccaccttcgcccccagcgccaccagacgcgctttggcgtcatcgcgcgacagctggctgaggctgccggtaaggaccacggttttgcctgcaaacgggctatcaatctcttccgccttcaccaccaccggcgcaggccagcgaaccccctccgccagcagttgcgcaatgacatcgcggttgctctcttcggcaaagaagttgaaggtatgggtagcgacgacgatgccgacatcagggactttctgtagctcctcaatggaagcctgctccagggcttcgagagtgccgaaatgcgccgccaggcccgccgccgtcgcttctcctacctcgcgaatacctaaggcgtagaggaagcgtgcgaaggtcgtctctttggctttctcgagggcgttgactacgttttgcgcggacttcggccccatccgatccagcccggtcagtttccccgccgtcagccggaacagatccgccggggtatggacgtactctttctccaccagctggtcgatgatcttgtcgcccatgccgtcaacgtcgagcgcgcgacgggagacgaagtgcttgagcgactctttgcgctgcgcgccgcagatcaggccgcccgtacagcgggctaccgcctcgccttccacccgttcaacgtctgactgacatacaggacagtgggtcgggaagacgacatcccgggcatccgccggacgctcggaaagcaccacgttaaccacctgcgggatcacatcgcctgcccggcgaatcaccaccttgtcgccgattttcaagcctaagcgttcaatttcatcggcattatgcagggtggcattgctcaccaacacgccggcaacatggaccggctccagacgcgccaccggcgtaatcgccccggtgcggcccacctggaactccacgtcccggacgaaggtcatctgctcctgtgccgggaacttaaaggccacggcccagcgcggcgcgcgggcgacgaaacccagctgttcctgcagcgccagcgaatcgactttgatcaccacgccatcaatgtcaaagcccaggtggggacgctcttcctcgactttacgatagtaagtaagcacttcctcgggggtatggcacagggtgacgcgatcgctcaccggcagcccccatgctttgaactgcagcaaccgagccgagtggctggccggcagctcgccgccctccagcacgcccacgccgtagcagaagaaagtaagcggtcgcttcgcagtgatgcgcggatcgagctggcgcagcgaacccgctgccgcattacgcgggttagcaaacactttcccgccggtgcgacgagcttcctcattgattttttcaaacccggcctgcgggaggaacacttccccacgtacctcaaggcgtgcaggaatattctcgccatgcagcttgagggggatggcgcgaatagttcgcacgttagaggtaatatcttcgccggtggtgccgtcgccgcgggttgccgcctgcaccaacacgccgttttcgtagagaatgctcaccgcgaggccgtcgagcttaagctcgcagcagtaggtaagatgatctgtgcttttcaggcgatcctgtacccgcttgttgaaggcgagaaagctctcttcgtcaaacacgttatccagcgacagcatcggcacttcatggcggatctggctaaaggcggtgagtggcgccgcccccaccctctgtgttggcgaatccggggtaatcagctccgggtgctggctctccagctcgcgcagcttgcgcatcaggcggtcatattccgcatccggcacttccggcgcgtccataacgtggtacagatattcatgatggcgaagcgtggttcgcagttcagtcagttgttgttcgattggttccatatcacaccatcaatgataaaaaacccccgacaggcgggggttgagaaaggattgagttaacgcggaacgtcaggcgttcgcggctttcacttcgcgaatacgatcctggtattcacgcagtttttgcggcgtcatcatgcgacgctgatcgtcaagcaccacgccgcccacttcgtcagcgatatactgcgcagactgcagcatcagcttgaagttctgcagttcatcgccgtaggaagggacctgcataaagatagtcaccccaggggtcatcatatccgccatgctgtccggattgaaggttcccggtttcaccatgttggccagactgaacaacaccggaccgctgccgtccggacttaggtggcggtggaaaatattcatttcaccaaacttaaagccggcctgctggatactgttgatcagcacttcaccgttaagctgggcgccatgatgcgcggcgacgttcatcacaatgaccgtctctttgcgctctttcggctgcggcgcggcgggctgctgcggctctaccggctgcggttccgcgacggcgggctgcgacgcggcaacaggctgtggcgcaggctgctgcggggcggctggctgcggctgagcgacggtcggcgtcaccggttgcggcgcgacaggctgctgcacaacaggctgcggctggtgttgcggttgtacgggcggctgcgcaggttgcggctgttgccagccagtctgcggagccgcatgcggcgcaggctgttgctgcggtggaaccggggcctggcgcggcggctgcggcggctggcgaaccggttcttcaggacgcgcaggctgctgcatctggcgctcgtaaggcggctggtactggtgctgcggcgcctgacgaggggcttcatgctccccatgcgcgccgtgcggggcgtgagtcaccggatgaacgcggacttctcctacgccttcaacattatcatcaaagtcgtcgttttccgactcatcgtcgcgcgacttcatacgtttcagtgggcgatcgcgaaacatcgaagaacgttctttacggctggtccagaaaccatgtaccagtaaagcgattatggcgatcgcgccaacaatgattaatatcagacgcaaatcctgcatcattatattctctgttgttctaacaccttgccaccacggcaaacatttactcactaagagtatttgccgattacctcaagtgcaagtgcgtcggtcgctttcaccacataaagatgaactaaatcgtgctttttgctgttttttcgaacatttcctaactggttattgtctgacgacccgataaaataagcgagcattcacaccggatgttaaaaaaggagcaatgcctggctatggtttcatcatccgcaccgaccccgcgcagcggcgtttattatttttcgcagggctggaaactcatcgggctgccgggcatacggcgttatgtcttcctgcctttactggttaacgtgctgctgatgggcgctgccttctggtggctgtttacccgtctcggcagctggatcccctcgctgatgagccatgtgccggactggctgcagtggctaaactacctgctgtggccggtggtagtgctatcaatcctgctggtgtttggctacttcttttcgacgatcgccaactggatagccgcgccgttcagcggcctgctggcggaacagctggaagcgcgcctgaccggcgctaccccgccggacgtcggcgtctttggcatcatgaaagatattccgcggattatgaagcgtgagtggcagaagctggcctggtatctgccgcgcgccatcgtgctgttgctgctctactttattcccggcgttggccagacggtagccccggtactctggttcctgttcagcgcatggatgctggcgattcaatactgtgattatccctttgataatcacaaggttcccttcaaaaccatgcgcgaagcgctgcgcagtcgcaaagtgatgaatatgcagtttggggcgctcaccagcctgttcacaatgatcccggtgttaaacctggtgatccttccggtggctatctgcggcgccaccgccatgtgggtcgattgctatcgcgatagacacgccagctggaaatagcggtaacaccttcacttgggggcggcaaaggccgctcccttatatcgcgcttattccttcttgcttatcattatttcccttccgcatatagatatgctaaatccttacttccgcatattctttaagcgggtatgctgatgccgtacccccaaatttcatacagttaaggacgggccatgagtaagatttttgaagacaactccctgactatcggtcatacgccgctggtacgactgaaccgcatcggtaatggccgtatcctggcaaaggtagaatctcgtaacccgagctttagcgtaaaatgccgtatcggcgccaatatgatctgggatgctgaaaagcgcggcgttctgaaacctggcgtggaactggtcgagccgaccagcggcaacaccggtatcgccctcgcctacgtggcggcggcccgcggctacaaactgacgctaaccatgccggaaaccatgagcatcgagcgtcgtaagctgctgaaagccctgggcgccaacctggtgctgaccgaaggcgccaaaggcatgaaaggcgctatccagaaagcggaagagattgtcgccagcaacccggaacaattcctgctgctgcagcagttcagcaacccggctaacccggaaatccacgagaagactaccggcccggaaatctgggaagataccgatggtcaggtggatgtgtttatctccggcgtaggtaccggcggaacgctgaccggcgtcagccgctatatcaaaaacaccaaaggtaaaaaagatctgatcaccgtcgccgttgaaccgaccgattccccggtgatcgcccaggcgctggcgggggaagagctcaagccgggtccgcacaaaattcagggtatcggcgccggcttcattcctggcaacctggatctgaagctggtcgacaaagtgatcggcattaccaacgaggaagctatctccacggcgcgccgcctgatggaagaagaaggcatcctggcgggtatctcttccggggccgccgttgccgccgcgctgaagctgcaggaagatgaggcctttaccaataagaatattgtggttatcctgccttcctcaggtgagcgttatttaagcaccgcgctgttcgccgatctcttcactgagaaagagctgcaacagtagtgccagcttgtaaataatgtgtaaaaaagcaccttttcgggtgcttttttgtggcacacgtcaaagttttacccctcctggcattgattcacctcgtagggtctggtatttaaccagcacatttattttgatgcgcgaaattattcagaagaggatttccgccagctgaatcgattttatgatttggttcaagtcttcctttcgcggcataatgtttaatgacgtgctagacgtcaatggcccgcaggtcttcgcagcgccaggcgctgccgacgccaaggccggaaacgtaacgccggcgctaacaatacaggctaaagtcgagtcgttagactagactttaggtccacaacactaaacctataagttggggaaatataatgttccagcaagaagttaccattaccgctccgaacggtctgcacacccgccctgctgctcagtttgttaaagaagctaaaggcttcacttctgagatcactgtaacctccaacggcaaaagcgccagcgccaaaagcctgttcaaactgcagactctgggcctgacccagggcaccgtagtgaccctctccgctgaaggcgaagatgagcagaaagctgttgagcatctggttaaactgatggctgaactcgagtaagttcacgggttctttttcatatcagtcacaagtaaggtagggttatgatttcaggcattttagcatccccgggtatcgccttcggcaaagcattgctgctgaaggaagatgaaattgtcatcgaccggaagaaaatttctgccgataaggttgatcaggaagtcgaacgtttcctgagcggccgcgccaaggcctccgcccagctggaggtcatcaaaaccaaagctggtgaaactttcggtgaagaaaaagaagccatcttcgaagggcatattatgctgctggaagatgaggagcttgagcaggaaatcatagccctgattaaagataagcacatgactgccgacgcggcagccaatgaagttatcgacggtcaggccactgccctggaagagctggatgatgaatacctgaaagaacgtgcggctgacgtacgtgatatcggtaagcgcctgctgcgcaacatccttggtctggcaatcatcgatctgagtgcgattcaggatgaagtcatcctcgtcgccgccgatctgaccccgtctgaaaccgcacagctgaatctgaaaaaagtgctgggtttcatcaccgatgcgggcggtcgtacctcccacacctctatcatggcgcgttccctggaattgccggccatcgtgggcaccggcagcatcacggcgcaggtgaaaaacggcgactatctgattctcgacgcggtgaacaaccaggttctgatcaacccgtctaacgagcaaattgaagcgctgcgtagtctgcaggctcaggttgcggaagaaaaagccgaactggcgaaactgaaagatctgccggcgattaccctcgacggccatcaggttgaagtctgcgccaacattggtaccgttcgcgatgtcgaaggtgctgagcgcaacggcgccgaaggcgtaggcctgtatcgtaccgaattcctgttcatggaccgtgacgcgctgccaactgaagaagaacagtttgcggcttataaagcggtggctgaggcctgtggctctcaggccgttatcgtccgtaccatggatatcggcggcgacaaagagctgccgtacatgaacttcccgaaagaagagaacccgttcctcggctggcgtgccgtgcgtattgcgatggatcgtaaagagatcctgcgcgaccaggttcgcgccatcctgcgtgcctccgctttcggtaagctgcgcattatgttcccgatgatcatctctgttgaagaagtgcgtgcgctgaagaaagagatcgaaatctacaaacaggaactgcgtgacgaaggtaaagcatttgacgaatccattgagatcggcgtgatggtggaaacaccggctgcggcgaccattgctcgtcatctggccaaagaagttgatttctttagtatcggcaccaatgatttaacgcaatatactctggcagttgaccgtggtaatgatatgatttcacatctttaccagccgatgtcaccgtctgtactgaatctgattaagcaagttattgatgcttctcacgctgaaggtaaatggactggcatgtgcggtgagcttgcgggcgatgaacgtgctacacttctgttgctgggtatggggctggacgaattctctatgagcgccatttccatcccgcgcatcaagaagattattcgtaatacgaacttcgaagatgcgaaagtattagcagagcaggctcttgctcaaccgacaacggacgagttaatgacgctggttaacaagttcattgaagaaaaaacaatctgctaatccacgagatgcgcggcccaaattactgcttaggagaagatcatgggtttgtttgataaattgaaatctctggtttctgatgacaagaaagacaccggaactattgagattgttgctcccctctccggtgagatcgtcaacattgaagacgtgccggatgtggtttttgcggaaaaaattgtgggcgatgggattgccatcaaaccgactggcaacaaaatggtcgcgccggtagacggtaccattggtaaaattttcgaaaccaaccacgcgttctctattgaatctgatagcggcatcgagctgttcgttcacttcggtattgataccgttgaactgaaaggcgaaggcttcaagcgtatcgctgaagaaggtcagcgcgtgaaagtcggcgatccggttatcgaatttgatctgccgctgctggaagagaaagccaagtcgactctgacgccggtggttatctccaacatggacgagatcaaagagctgatcaaactgtccggtagcgtgaccgtgggtgaaaccccggtaatccgcatcaagaagtaatgcttgctgcataaaaatggcgccgaaaggcgccatttttttataccgcgcaggttaccggtcgatagcacttctcgcgggacaagacgcgcaatccctccggggtgctctccagaattcgccgctcgctgtcagcgaccagcagttcgcactgatatccaccggccaggccgaacagcgaccgcgccacgcaggcatcctccagcgccgcctcacctgtcgtatcaaaatgaccaacaatgcgtccctgctggcggatcactaaccgatagcttttcatctgctttgctccagcggcggtaggatcaattcgtcacacccctgggcggcagtccagttcatcacctccagcacgcgctgggcagcagcctgcgtcgctgcccccagcgccagtccggaaagcaacccgctcaccagctccgcgcagaacagatcgccggttccttttaagtctgtctccacccgcgggtgaaccaccacttccactgcatcggccgtcaccaccagcacattgatcgtcgaatcggcctctcccggcgcgctggtgatcaccacccatttgagggtgtccgacagcaggcttcgcgccgcggcgaccgcctcctgccgatcgcgacagcgctggccgctcagcgtctccagttcgaacagattgggggtgatcccttgcgccagcggcagcaggtgctgacgataggcgtccgggatctcagccttgacatagatgccactgtcgacatcgccgatgaccggatccacgagaatgcacaacccgggatggcgggcccgtacgcgcgtcagccactgcgccaggcgttcgatttgcacagcgctgcccatatagccggtggtgaccgcacgcagttcgcgcagcgcgtcgcgctcctccagcgcctgcagatacccgacaaaccactcttccggaataatgccgccatagaacgtctcataatggggcgtattgctgaacagcaccgtcggcaccgccagcacgcgcagaccatgctgtttaatcgccggaaccgcgatgctgttgccgacgctgccatagactacctgcgactgcacggcgacgatatccacttccgacgcccggcttttgtcgtgaaagagcactgattgtatatcatcctgctggcccatcttttctccccccgctggacagcgggtcacgcactgattatgattcgtcctatgctaaattccattttgtcataggtcaataatgttagccggaaaaaccgccagcgaaatcttcgataacatccgccatctggtgcagagcggcgggttgcagcccggagaggttctgccgccggtacgtgaactcgccagccagcttgcagtgaatcgcaacactgtcgccgccgcctataaacggctggtgacctccgggctggccgtcagtcagggacgcaacggtacagccattaaagcgcgggacacactgccggcgctggagggaggtgacccaacgaccccgctgaacgatatctccagcggcaatcctgatccggccagactgcctgatttaccccgctatctgggacagattgcccgcacgccccgcctgtatggcaatgcgcccatcgagccgcggcttggccaatgggccgaggcgtggtttgccagagagatagccgttccctttgcggtgaatctcgccagcggggcgatagacgccctggagcgcctgctgtgcgctctgctgctccccggcgacggcgttgtggtggaagatccctgttttctcagcagcatcaatatggtgcgttacgccggttttaccccctgcccggtggcggtggatgccgaagggatggatcctgacggcctggaggaggcgttacgcaacggcgcacgggcggtgatcttaaccccgcgcgcgcataatcctaccggctgtagcctgacggaaacccgggcgcatgccctgcgggaggtgctagcccgctatccgcaggtactggcgattgttgatgaccattttgccctgctgtcggccacgccatggcactcccctcttcctgcaagcacccaacgctgggcgctggtgcgctcgatgtcaaaaaccctcggaccagacctgcggctggcctttatcgccagcgatgccgctacttcagcggcgctgcgcctgcggcttaacgccggcagccagtgggtcagccatctgctgcaggacctgacgctggcctgcctgaccgacgaggcgtttatcgcctcgatgacggagacccgtcgtcactatcgccagcagaatgagaaactggcggcggcgctggcccggtacggctacagccatgctacgccaggggatggcctcaatttctggctgccgctgccagcggcgagccagccctacgccttacgcctggcccgcgccggctggctggtccgggagggagaggtgtttggcatccgtacgccctcccacgggctacgcctgtcgctgggccgtctgagtgacgctgagatttcccgcctggcggccgatattgcgcaggccttagacgccccctgacgcaggcagtccaccgaacgtatcggggagtgatggcagctgccgacaaattaatgaaaaataaacgacaacaggctagtctttcctgcatgccctgatcgccgaggcggaaaaatcgctcacaacaaggagcaccagagatgcatcaccctgacctggcactgaaagcggtcattgaagcctgcgatcgcgctatctcgcaggaagattacgataccctgatgagttattacgcagaagacgccgcgctggtcgtcaaaccgggcatggtggtcagagggaaagagaatatctgcaaagtctttatcgccattgccgactatttccagcaccgactggtggtgactcaggggaaaatggaggttattgaaggcggcggcaatgcgctggtgattatggagacccggctggatatcccgacggcggacgggatatccaaggtcacgcgacgcgccacctatgtctttcagaagcagggcgaacgctggctgtgcaccgtcgataactcctacggcaccgacctgcttgatgattaaatgcccgccccctggctaaagtgttcttcgccgaacacgccggtggaaaggtaacgatcgccgcgatcgcagacgatcgccaccaccaccgcgccaggattttcgcgggctatgcgtaacgcgcccgctaccgcgccgcccgaactgacgccgcagaaaatgccttcccgcaccgccagctgacgcatggtgttctcggcatcctgctgatgaatatccagcaccgtatccaccagcgaagcgttaaagatccccggcatatactctgccggccagcggcggatcccgggaatactgctcccctcctccggctgcaggccaacaatggtcaccggtttactctgttcacgcagaaaacgtgacacgccggtaatggtgccggtggtccccatactggagacaaagtgggtgatacgccccgcggtctgctgccagatttccggcccggtggtggtgtagtgggcgtaggggttatccgggttgttaaactgatcgagcagtttgccttctccgcgctgggccatctccagagccaggtcgcgggcaccctccatcccttgctctttgctgaccaggataagctcggcgccgtaagcgtgcatcgcggcccgacgctcctggctcatgttgtcgggcatcagcagcttcatccggtagcctttcagcgcggcgatcatcgccagcgcaataccggtgttgccgctggtcgcttcgatcagcacgtcgccgggctgaatttcgccgcgcttttccgcttcgacgatcatcgacagcgcggcgcgatctttcaccgagccggccggattattgccttcgagtttgacccacacttcgctgccgttgtccggtcccagacgctgaagtttgaccagtggggtattgccgatggtttgttcgagtgtattcacgatttttactcaataaaaaagccgggcggcgcttcgcttacccggcctggcagacgcgtgataattccagaccgggtaagcagagcctcacccggcaaaagcacatggatttaagctatcaggccgactccgccagagcaagctcgccgcgcggctcgatacgctcggtaccgttgtacaaacgcgcgttttgcagcccgacgaacagccgttcgccgcgggacggcgcctcgtcgcccgttaacaccacgctcagcggttcgtcataccaccccagaggctggacgactaattgggtgtagtgccctttcggactggcctccaggacctgcaccggcagcggcgaatccaggctggtccgccggctgatgtccacttcccacgggcgcaggaacaggtccactggcccctggtatgccggggtatagcctaacggccagcggtgggcgccgacgtggaactgtccaccgcggatgaccccctgcaggcggttcacttcccccataaactccagcacgaaacgggtagacggctcacgccatacgcgctccggggcatcggcctgttcgatgttgccctggctcatgaccaccacccggtcggcaacttccatcgcctcttcctgatcgtgggtgacgaacacgctggtgaatttcagctcttcatgcagctgacgcagccagcggcgcagctctttacgcacctgcgcatccagcgcaccgaaaggttcatccagcagcaaaatttgcggctccaccgccagggcgcgcgcaagcgccacgcgctgcttctggcccccggacagctgcgccggatagcgatccgccagatgggccagctgcaccatctccagcagtttggtcaccttggctttaatcgccgccgcattggggcgttcgcggcgcggcagcacggtcaggccaaaggcgatgttatcgaacaccgtcatatggcggaacagcgcatagtgctggaaaacgaagcccactttacggtcgcgagcgtgcatccgactgacgtcggtaccgtggaagcggatatgaccgctggtctgatgctccagaccggcgataattcgcagcagggtggtttttccggagcccgagggccccagcagcgcaaccatttgtccggaagggatatccaacgagatatcattcagcacctgggtgcgaccaaacgatttcttaatattggcaatctcaatgctcatgatttccctcctgttgcgcgcgttctttctgattggccagacgccattgcaacatactctttaaaaacagggtcagaatagccattaacgtcagcagggcagcggcggtaaacgagccgacggtgttgtaatcctgctccagtagttcaatttgcagcggcagcgacagcgtttcgccgcggatcgagccggaaaccaccgacaccgcgccaaattcgccgatggcgcgggcgttggtcagcaccacgccgtacagcagcgcccagcgaatattgggcaacgtcacccggcggaacatctgccaaccggacgcgcccagcagcaccgcggcctcatcttcatgactgccctgactcatcatcaccggcaccagctcacgcaccacaaacggacaggtaacaaagatggtcgccagcaccatgcccggccaggcgaacatgatttgcagattatgcgcgtcaagccagccgcccagcggaccgttagagccgtaaaacagcagatacaccagaccggcaaccaccggcgagacggcgaacgggatatccagcaacgtcagcagcagctggcgccccggaaaggtaaaacgtgtcaccagccaggccagcaaggtaccgaacaccaggtttaccggtacggtaatcaacgcaatcatcaccgtcagccagatggcatgcagcatgtccgggttcgccaggttttccagcaccggcatcaatcctttgctgaaggcctggataaagatgtagagcatcggcaccacaaggatgaaggcggagaccagcatcccgacgccaatcagaaaccattttccccagttgatacggggcgcgtcgtagcgtttcaattgagtaacttccgccattagtgacctaccacgcgtcgaccaaagcgactctgcagggtattgatggaaaacagcagcagcagtgaggcggccaggatcaccgaggcgatggcgctcgccgccggatagtcaaactcctgcagacgaataaagatcatcagcgacgttacttccgtcttccacgcgatgttgccggcgataaaaatcaccgcgccgaattcgccgaggctgcgggtaaacgacagagcaatgcccgccagcagcgccggcgacagctccggcagcaccaccttgcggaaactctgccagcgcgtggcgcccagcgtttccgccgcttcctcatactcgggccccaactcttccagcaccggctgcacggtgcgtaccacaaacgggatgctggtgaaggccatcgccacggcgatgccgagccaggtataggtgactttaatatcgaacttcgccagccattccccgtaaataccgttcaccgaaaacagcgaggccagggtcagaccggctaccgccgtcggcagcgcaaatggcaggtccattaaggcatccagcagcgtgcggcccggaaaacgatagcgggtcaggatccaggccatcagcagaccaaagacgccgttaaaaatcgaggccacaaacgccgacagcagcgtcaccttataggcagccaccacctgcgggttggtgatcacatcccagtactgcgcccaactcatctgcgccagctgcatcaccagcgcgctgagcggtaataacaaaatcagacagacaaacagcaggctggtgccaaggctcagggtaaaacccggcagcacgcgcttggacgacacagcaaacattacttacgccccgccgccagcagtttgtccagttcgccgccgctggcgaagtgggttttcatcacctcaggccaggagccaaacttatcttccacgcggaacagctcggtctgcgggaatttatccttcagagcatccatcactttcgggttgtttacccgatagtagtagtcggtaatgatagtttgcgcctgtggcgtatagagccagttcaggtaggctttcgccgccttttccgtgccattggctttgacgtttttatcgacccaggctaccgggaactccgccagaatgttggttttcgggataaccacttcaaatccctgcgcctcatactgcttgcgaatattgttcacttccgattcgaagctaatcagcacatcgccgaggccgcgctcggcgaaggtggtggtcgctccgcgcccgccggtgtcaaagacttcgacgttcttgagaaactgagtcataaactgttcggttttagctttatcgccgccatcagctttatccgccgcgccccatgccgccaggtaggtgtatcgggcgttacccgaggttttcggattcgggaagatcagcttaacgtcagagcgaaccaggtcgttccagtcatgaatgtttttcggattgcctttacgcaccaggaaacccatcgtcgaatagaacggtgagctgttgttcggcagacggctttgccagtcggccgggatcaggttgcctttgtcatgcaggatctgcacgtccgtcacctggttgtaggtgaccacgtccgccttcaggccctgcaaaatagccagcgcctgcttggatgaaccggcatgcgactgcttgatggtcagcttgtccccgccattgtctttcgcccactgctgctcaaaaggcgggttaagggcggcaaacagctcgcgggagacatcataggagctgttcagcagctccgtcgcctgcgtctgcgccaccagcagcatggaagccgccagcgccagatatccttttttcagtgatttaacggccattgcgcacccttatcaacgttgaacattttctgatgatcatcatatttataacgggtacgaaaggagtaacggttttatataccgtttggcgatttggaagtcgaaaagggaataagcaactggcaaagcttagctgaaagcggctcgcagattagacgggtcattgtgacaaacggcagccaggcgtgcactgtgtttatatgaaaaacacacagatatttgctcgtcagctcagacgtagcttaacgcccgcagaacgtcgaccagggtactgactgggcaaccgccgttttgctagcgatacgtttcgccgccagcgccccgttgccccctatattctcgatttcgcctgctgcgcaatacggctggcgattgaactggacggcggccaacacgatgacgccgcacccgctggcaacagagcgagggatggcgagttttacgcttctggaataatgagtttgaagagcatgaagatgcggtgatggaggcgatacttgaagcacctgagccgccaatgccctcacccctcccctctgactgagggagagggagtaaaagaatccgcacgcagatcccatagccgcaccttaccgtcccctctcccctttggggagaggggacgggtgagaggaaaaattacagcgcctggatacgctccagcgacggcgcgaagtaatacccgccggtcaccggtttggtgaagcgcagcatcgcgtcgcgtttaccgtcggtatcgccaaacatgctcagcagctgctgctcgatgttatacaggcgcgcgcagtaggcgcagaaatagaggccatgggtgccgctggcggtgccgtacggcaggctctgacggacgattttcagccctttgccatcttcttttaagtccacgcggctcaggtgcgacgtgaccggacgttcatcgccatcgatctcttcgttagcgtctttagtacggccgatcatcatctcctgatccggcacgctcatgcggttcagctgtttgagattatgctcccagcgctggacgaacacgtagctgccgcccgcatccacgccgtctttaatgaccgccacttcgcggcgggtttcttcccccgccgggttttcggtgccatcgacgaagccgctgaggtcacgctcttccacccagcggaagccgtggatctcttctttcacgtcgatagcgtcgccaaaggcggccagcgcggcctgcgccaccgagaagttaacttcatgacgggcggataaaatatgaatcagcaggtcatactgggtggacggcgccagccctttgccatagaccgggaaatcttttaactcatccgccccttcgccgccgctcagctgacgccagacgttattgccgaacgccaccaccgcaccgagtttggcgtcggggaatttagcctggaaggtggccacgttatcgacaaaaattttgctcgcttcgcgcagggcgttaacgtcccctttgagattggcttcaatccaaatcgccgcgcggcaatgttccggcaaaatgccgctctgaacctgagacatcgctcctcctgaaatgatgcaaccacaacgctgtcgcgttgctaacgcgccattgtaaccgtttttcagagctgtcgtgtctcttcagatcaatttagcgacgccagataatcttgctgaccttccagtttttcagcgtatcgtcggagggcatcagctcgtccggaccgctccagtggccagtgaaggcatagctgatatgctggctcccctcggcctgacactcgacgaccgccccgttgtcatggctgcctttctggcagttgccgaaggctttgctgtacaggtcgctaaacggtgtgccgattttcacgccgctggcggttttgatatccgcatcacgcacgtcaatccggctgatagcaccgttgtcgccattgatggtcagcgccacgctgttgtttttcagcgcttcaaagtagtggacgatattgcccttatcggtcttcattccgctgcgtaaacggtagtcgctgcccagcgcatcgctaatcgcctgttcattgagcggcgtggaggccgtcagtttacccactccctgctcggtcacctcggtggaagcgccaaaccagttccacggataggccgccgaccagttgactgcgctcatcgtggagcagccggtcagcgccagcggaagcgcacagagcattacacgtagcgatttcatatctcaatcctttctgagtcattcaacgcatgttggagttcacgatcggcaaaaagtgccattaaaaggtggtctggtgaaaacaggcgcccaggcgacggctggttaacagccaccacagggcatagccatccgcgaccagcagcgcaatggtcaacgaggagggagattcgccgctcagccatagcatcggctgccacagcaacagcagcacttgcgatagcaccagcagccagcgcatcgcccgccacaggcgcggcaggcgctgacgatagccgctaagcagaaaggccagcaccgccggcacgcctggcagtaaaccaagccagaagcgctcgtgatcgggatagaacagattaagaatcgcgtcgccctgctggcgcgatgcgccggctatcaaaaacagcacccacgtgcgggcctgcaacaacagcacgcaccagaaaagcaaaggcaggcgcagacggccatgggcatcaaaatcggcggggataaactcagtattcttcatcttcgatcaggcgcttgcccagggtcaggacatcggcgtactcatagcccaaccgctcgtacattccctgcaccacgtcgttgtcttcacggaccataatgttgattttcgggcagccgcgggcaatcagctttttctccagacggttgagcagcgcgttcgcgataccccggccgcgatattccggatggacgccgagataataggccgatccgcgatgaccgtcatatccgcccatcactgtgccgaccacttcgccattcacttccgccaccagaaacaggctgacgtcgtgattcagcttgcgctcaatatccatctccggatcgttccacgggcgcaacagatcgcagcgctcccacagcgtcacaacctcttcgaaatcctgctggcgaaaaacgcgaatctccatggtattccccaccattgacggttaaaaacagtgattatggcgcgaatataactgatagccaatatcaggcgaaatcagcgacaaaaaatggcataatatgactttgtcatgtattgaaatgaaaagtaaaacaattcttattttgaatggtcgtaacggcaaacgcgatacgatataacattggacatcacttgtttacaattcaggccgaatgagcacttttaaacccttaaaaatacttgcttcgcgccgtcaggtgctgaaagccgggctggctgcgatgacgctgagcggcgtcgcctcacaggtcagcgcaaaagaacagccactgaaaacgtcaaatggacatagcaaacccgccgccaaaaaggccgggggtcgccggattgtaatgttagatccgggccacggcggcatcgataccggcgctatcggccataacggctcgaaagagaagcatgtggtgttggcgatcgctaagaacgtgcgcagcattttgcgcagcaacggcatcgacgcccgcctgacccgcaccggcgatacctttatcccgctgtacgaccgcgtggagatcgcccatcagcacggcgccgatctgtttatgtcaatccacgccgatggttttaccaacccgagcgccgccggcgcctcggtgttcgccctgtcaaaccgcggcgccagtagcgccatggcgaaatacctctccgatcgcgaaaaccgcgccgatgaggtcgccggtaagaaagcgacggataaagaccatctgctgcagcaggtactgttcgatctggtgcagaccgacaccatcaaaaacagcctgacgctgggctcgcatatcctgaaaaagatcaagccggtacataagctgcacagccgcaataccgagcaggcggcgttcgtggtgctgaagtcaccatccataccgtccgtgctggtggaaacctcgtttatcaccaacccgaacgaggagaaactgctcggcaccaccgccttccggcagaaaatcgccaccgcgattgccaacggcattatcagctatttccactggttcgataaccagaaagcccattcgaagagacgttaatgaaacccgatgccgcgcaggtaaaaacttttctgctccagctccaggacaacctcagtcagcagctgagcgccgtggatggcgcgccgtttattgaagatgcctggcagcgggaaggcggtggcggcggacgcagccgggtgctgcgcgaaggccgggtgttcgagcaggcgggggtcaacttttcccacgtccatggcgacgccatgcctgcctccgccaccgcgcaccgcccggagctggccggacgcagttttgaagccatgggcgtctcgctggtggttcatccgctgaacccctacgtgcccaccagccatgccaacgtgcggttctttattgccgaaaagcctggcgccgacccggtgtggtggttcggcggcggctttgatttaaccccttactacggctttgaagaggatgccgtccactggcatcgtaccgcccgcgatctgtgtctgccgttcggcgaggaagtctatccgcgctataaaaaatggtgcgatgattacttctatctcaagcaccgccaggagcagcgcggcatcggcggcctgttctttgacgacctgaacaccccggattttgaccactgcttcgcctttatgcaggcggtcgggaacggctatgctgacgcctatttacctatcgtcgaacgccggaaagccacgccgtacggcgaacgcgagcgccactttcaactctaccgtcgcggccgctatgtcgagttcaatctggtctgggaccgcggcaccctgttcggcctgcagaccggcgggcgtacggagtcgattctgatgtcgatgccgccgctggtgcgctgggaatatgattatcagcccgagcccggcagccccgaggcggcgctgagcgagtttattcaggtgcgcgactggctgtaacggccggatggcggctggccacccggtagcggagtctcttccctcacacccactggcgcaggcgatggtgcagcgtcatcgacggtttctcagcaaacagctgctgatagtcggtggcgaactgccccaaatgccagaatccccactgcatggccgcctccttgaccgtctcgcgctctgaccaggggcttatcagctcccgacgcacggcgttcaggcggatccgtttgagccaggcgttaggaccaatccccagtatcgcatggaaggcgttttgcaaggtgcgacggctgacgtacagctgctggcacagatcgagaacggttaacggctccgcgctgttttccagcacatattcgcgcgcctgcgccagcaggcggcggtagctctggtggctgacgctctctgcacttaccatcggctgcgcttcttccagcatcgtgcccatcgccagcaacagattatcccgcaggactttacgcacggccggctgatgaagggtatccggatgctcgctaaaggtggccagcgcctgctggacaaacccccacagcgcggccttatgcggctcgcggaccgccagcgctgactggttgcgtagcatatgtagcacccgttccgggtggtgcaggaaactggcgtgacgcgcaatcacctcctgcgaaatcactaccccgagaatggtgtaatcatccggcgtgctgagctcgaactccgtaccgccgggacgggtggcgatttctgcccggcccagacactgcgagccgataaacccctgttctccccgggtcgccggaatgccaaaccagaaggagttcggccagaccaggcaggactggcgcagcgccagcccggtatattcgcggaagacctggatctcatcgagcaggatttcggtaaactcgccgcgaaactgccccggatgcagctgatcgtagatctgttgccaggcggtaatggtcagggcgtgctcatacacatcggttgtgtgtcgttgatgaatattgtcaatttcaacctgaggcgtcagcctgatgtcttccggcaacgcctcgcaacagagatggtgcaaatttgcagaacgacgctttttcataatcgttaaagccgggggcaagccgctcccggcacctccgacaggttatggatttttgagacgatagcggctactgcgttttcgtagcgaccctgcggaaaagagctgctccagcgcctggcgggccttatccagcggccaggcaaaatgcgcggcgacctcgccggccgtcatgccttgacgaactgaagccagcagcgtcagtaaggcttccgatgaagccgggtcagcaggcggcatggtcgctggcggcggtggctgaaaaccgccgatcagccgctgggtatcctcttccgggcggccaatttcccgacggctgatcacgcagccggtccgccgggcagcggcggccccggcatccagcgcggcgcggcaggccgccaggtcgccctccaccaccagcgttaacctgcccgggtcgagcacttcatgactgagcaggcgcacattggccgccttaagcatggcatccgcagcgtctacagccgcgaccatgccctccacttcgagcaatcccagcgcattgatcatcgctccctccattacgcacgctgtacaggatgacgggcaatatcgagaacggcatcggtaaaggcattgcaggcggctttacaggcggcctggcttcccgtcaaaaaggcggccgaatagttggtttccgatggcggcgggacgtaggtcaccagctgaacgtcggccgacttcatcgccgcatcgataccaaacgtcgcctccagcggcggcgccaccagataagcgatcggatcgcccaacgcgatgccagcggccgatgaaagataagagccggtacgcgacaccacgtgcgccagaaaggcggtatcttgcgcgtcgttagcccactggaatgccgccccaccttcaatatgcgccatcatggcatccagcccggcgcgaacttccgccgggttcgggccgccaagcatgatcagtacttcgccggcggtaggcgacggaccatgggccgcaccggcgtagagggagcggccatagaccacctccaccatcgcctgctttgtcgcttcgtcggcggcaatatacgtcacatcgtcagaatctgccgtgatgagtccgaggctacgtatatgcgacggtaatttaagctcgcgcgcgaaaccgtcattcaccgaggcaatcacgcgcatcgcggtgaccgagggtcgaatcaaatctaatgctggcatgatgcctccttaacggctcatgttgatgccggaggctttctgctccagcatgcgtttggctaaatccacgatcaccgcggcggcttctaccggcggggtgccgccctggtggatattggagatacaggttcggtcggcctcgacggtggtcgccacccgcggggagtacaccgcgtagcaggagaggctctccgactggccgagccccgggcgctcgccaaccagcaggatcaccaccttcgcgccgaggatctcgccgatctgatcttcaatcttgacgcggccatagcgcacgaagaacggcgtcccgaccttcagacccgcctgtttcaggccggcaagcagcggcggcaggatctcttcgtagttggcggtgatggcatccgtcgacaggccatcggagaccaccacctgcacatccggatccatcacgcactgcgccttcagcgcatcaatcgcttccggactgaggcgacggcccatatccggacgcgtgaggtagaggttcttatcgctaatctcggaacgcacttccagcagcccctgcgctttcacccacgcttccggcacctctttgagcaccgtgtctttcgagcgcgagtgatcggccaggaagcgcagcagcgcctgagtgcgcggacgcgggccggcgcggccggtgcaaacgcgcgccgcggtactgcgttttagttcggtcagtacttcggcgcggtgcggatgttgtaccccaatccaggctttcgcttccgctgagcccaggtccagcgcgcagctttccaccaccgcttcgctggcgcaggcgacatggcaggccggcgtcgacgctgcgggggcctgcggctgcgactgtggttgtcccattgacgccattacgctgcgtacaatgtcttcaatctgtttttgatccatgatgtgtcatccccgcgtcatcagaagaacagtgacggatcgcccgcccgtttggtcaggcgaccatttgccataatgcccatcgtttccagccagcgttcaaactccggcgacggccgcaggcccagcagctggcgcacggtcgcggtatcgtggaaggcggtggtctggtagttgagcatgatgtcgtcgccgagcggcatgcccatgatgtagttgcagcctgcggtcgccagcaggatcatcaggttttcgttgaggttctggtcggcatcggcatggttggtatagcagcagtcgcagcccattgagatgccgctcagcttgcccataaagtggtcttccagtccggcgcgaatgatttgccggtcgttatagaggtactccggcccgataaagcccaccacggtgttgacgaggaacggatcgtagtgccgcgccaggccatagttacgcgcttccatggtcacctggtcggcgccgaagttagcgccagcggaaagcgccgagccctgcccggtttcaaagtaaagacagttctccccggcgatgcggttaaactccgcccccaccgcccgcgcttcatcgagcatcgccagctcgacgccgaactctttaagccctttttcactgccgcagatgctctggaagataagcccccccggcgcgccgcggcggatggcttcaatctgggtggtgacgtgcgccagcacgcagccctgggtcgggatgttaaacttgtcgatcaccccgtacaccgtatccagcacccggctcaggttctccacgtcgtcagtgaccgggttgacgccaatcaccgcgtcgcccgcgccgaaggagagcccttcatagatttgtgcggcaatactctgcacgtcgtcgcgggtatcgttcggctgcaggcggcagctaaaggtccccggcagaccgatggtggtattggcttttttgatcaccggcctttttttaccgccgtagatcagatcggcgttggagcagatcttggccaccgcagccaccacctcggaggtcagccctttgcggacaaaggcgatatcgtcgctgatgacctcgtcgttgagcacgtattcccgcaggtcgctgatggtccagtgtttaatccgctgataggcggtttcgttcacgtcatcctggatcaggcgcgtaacgcagtcctcctcatacgggatcaccgggttattacggatatcggccaccgtcatatcggagagcacctgcttggcggccacgcgctgctgcgaactctccgccgctacccccgccagcacatcccccgaacgcagttcgttggctttcgccagcacctcttttacatccttaaactgataaacattgccgaacaatgtggtctttagtttcataagtcgttccctcaggaaggaaatgcgagtgatttcaccgtcaccggcacaaccgatccgccaaaaagaggcgtaccaatgtcgatatagtctcccgcccggatgctcacctcatcgatgaccgccagcggaaggtgtggaagctgtggccgcagcagcatgcccagcgctttgccaaaatcctgctcggccaccagcagcagcggacggggattgggaaagcgggcgacaaacgccagcagggcgtcaattacggtcagtaaggtggcgtagcgcaccggaagtgaagcgggaagcgccagcacgtaagcgtccgcctcgggagccagatcgagctgcgtcagcgcctggagccaggcgttcggcagatcggcggcatcctgcgggatagccaccggcaaattgcgcagcggcaatggaaccccctccagccagatggtgctcccggacagggacagcgtatgcgccccggcgccaatcaccgtggcgcgcacggtttgcgtcggaaactgcacgttcatctcacgcaggcgcggatgctcatgcagggccgtggccagcagcggcccgatatcggaaaaacagaaaggatcggcgggctgatggcggtagcactcccccactccgccggaaagggtaatcacctccggctgaatacccgcaggcagtacttcggtttgcatcagcccctgcgccagcggtgagagggtgccctcgatcacctcgacgatcagcgccgccatccggcgcgccacctgcgccagctgcccggcggtcagcgccagggcgttagtgccggcgccaaacagcgcatcgacaatccgctgccccggcgggtgcgcgtggaccacgcgcccctgagcgtcggtttccagcaggcggccgccgacgttgaggcaggcggtggcgctgacgtttccggcgtcaaacagggcatagttcgaggtaccgccgccaatatcgatattgagcacccggcacatccgctgccgggacagggtctgcgccccggcgccgtgtccggcaatgaccgactccagatgcggcccggcgctggcgacgacaaaatcgcccagcgactgcgagagcgccatcaccgccgggcgggcattgcgggttttcgcgctttcgccggtgatgatgatcgccccggaatccaccgcttgtggagcgatccctgcggcccggtactgagccagaatcagcgcctcaagctcggcctctttcagttctccctgcttatcaaccggcgtaaagaagaccgggctttgccagctaatgtcgcgtttgatgaattcataacgcggcacctgggaaaccgccgcgcggttcaccagctcgaggcgcgagaagatcacctgcgtggtggtggtgccgatatcaataccgacgctcaacagctggcgcgtgttcacgagtgcgcctccgcttcgttgttggcaggcgccggtacgttttcatcttttggcaccagcagcatcgccacgccaatcgcggtaacgccgccgaccagcttgccgacaatcatcggaaagatcatggcgttcatgttggccgccgcaaaaccgagatggtcgccgagggcgaacgccgctgacaccgagaaggcgcagttgatcacttttccgcgggtatccatctgcttcatcatgccgaacatcggaatattgttcgccagggtagcgaccatgccgccggcagccatattgttgatttttagcagattaccaacgcgcatcagcggcttttcaaaccagcgggtcagcaggagcaccatcggataagcgccgagcagcacgcaggagatagagccaatgacttcgatggcgcgcatcacttcgccgggctggtcgccaggcgccataaagatcggatcgagcccggggatcagctcccagccgagcaggaacttgatcaccgccgccgccaggccgatggtgatcagcgccacgaggaatttggcgaagatctggaagccgttgatcattttttccggaataaacttcagccccagcgccaccagcacggcgacgatgatcaccgggatcatattcatcaggatcagcgcgaaggtaaactctaccggctggccgttgatctccaccccggaatacatcgccaccagaccgccggcgatacagccgatgggaatggtgacaatgcccgccagcacgccgagcgccagccagcggcgatcggttggttcgataatgccgagcgccaccggaatggagaacacaatggtcggccccatcatagagccgaggatcaggcctgagtacatccaggccgccacgtcgccgcccgcgagttctttagcgaggaagaaaccgcccatgtcgcacgccagcagcgtgccggcgaacatcgacgggttggcgccgagcatctcatacagcggaataatcaccggaccaagcagatgagccagcactggcgccagggcggtcatcccgaccatcgccaggcccagcgcgcccatcgccataaacccttcttcaaactgaccgccggatccctcaatgcttttccccagtttgccgagaaagcgcgccgagccgccgaactgcgacaggatcctgtccacggcggcaatcagcataaagaacatcatgatgtacatgatgatttcgttaattcccatagcccttactccctgtcatttatgatttgtagatactgtgaataccgggacattagccgcactcaggcgactttcccgggccgcggcgtgaacgccttacccgggctacggcatagcagacggctgtgatcctgtagcccggctaagcgcagcacgagccgggaaagccacagccacacgcctccgggaaaatcggcatttatcgcgccgccgcgtacagctcgataatctgctcccggctggcggtgcgtggattggtgcgcaaacagatgtcctcctgcgccgcttgcgcccaggcggcgtagtgcgcggacgtcgcgccagcctccgtcagccgcatcgtcagaccgacctcggcgatcagctcgcgcacggcggcgatagcctcgcggtcatcggttttcttgccggttaacgcccggccgatctggctgaagcgcgcccggcgcaccatgcggttaaactccatcaccgttggcagcagcatggcgttggccagaccgtgcggaatatgcagcgccgcccccggctgatgcgccatggcatggcatagccccagcccggcgctggaaaacgccatccccgccatgcaggaagccagcagcatgttctcccgcgccgccagatcctgaccgcagcccaccgctttcggcagcgcctcgccgatcatggctatcgcccccatcgccagactgtcggtaaacggcgtggcgtggcgggcgctgtaggcctcgacggcgtgggtcagcgcatcaatcccggtcattgccgtgatatgcggcgggacgccttcggtcagcgcggcgtcgaggatcgccacatccggcatcagcgaggcatgcgccagcacctgtttgcgtccactcaccgcatcgataatcaccgtcacattggtggtttcagacccggtgccagcggtggtcggcaccgcgatcagcggcagacgtgggcgcaactcgctgtgctccgtcatctcccccagcgtctgctcaggattggcgaccagcagcgccaccgccttcgccgcatccagtaccgatccaccaccaaaggccaccacgccgtcgcagcgcgcgtcccgcagctgggcgacggcggcgcagacatcggtgacgcagggttcgccggcgggacagggccagagagtcatagcaatccctttcatcgccaggctacgctccagcccggcggtcattcccgcctgatggagaaaactgtcaaccatgacaaacagatgcctaaggccccgggactgcgcttgcggaccgcaggccgccagcgcgccgacgccgtgcagcgtcaccggcggaacgttgaagcttttcatttgctgaagattcagcgtatcaaaggcatggaacagcgccgtctgcagttcagcttgcatacatcccctccgctttttccctcccgctgttggcgattgccagcggggtcataaacaggctgtgctgcggcaaatgcaccggtaatgccgggaagcgctgacgaaacagctcatgcacacccggctgcatacaggcgccgcctgccagccacaaatcgacaatcccttgtccggcaatatgtcgggcgacaatttcggccatcttctcgtacaccggcttaaccaccggccagatctccccggcgtggctgcgcttgtactgctccgcctcctcaagcccgatgctgcgattcccggccagagtcagggagatatggtggccgccggtggcttcatccgccgaatacgtcaccctgccctgtttaacgatggcgatcccggtggtgccgccgccgatatccaccaccccggcgttatcgagctgcagcagatcggccaccgcggtaggctcatccagcacatgactgatctccagcccggcggactccaggacattgatcgaaatgcgcggatcggtgccgggcggaaacgaggtcgccgcatgggtgaagcggcagcccagctcctgctcgagagtcgcaagatgtcggcgcacgagggtgacggcgccaaagaaatcccagacgatgccgtcgcgcaccacgtcggcccagtcaaggcataccgcaaccggctggccgtcacggtcaaccaccatcgacaccacgtcgcaggtgcccaaatcgatgcccagccacagcggcgactcgctggcggcgggcgcctggttacacagggcagcggctttttgtagtctcggcgaaagccagcgttgttcgtcgtgcgccatgttcatcccttatacgattcgaaacgcatccaccagcacgcagcggcgcagacgaacgaaggtccgcgcgctggtcaccccttccccggttggggtggtgatggtcatggtggtccagccctcgccgcccagcccaagcccggcgatgcacggtccatttttgacgaagatgctggtgtcgatggcattcgccatctggttcatgttgtcgatgttgcgcgagtgcatcgccgcggtgtggtggcagccgccttccagttgcaccgccagggcgatggcctcttcaacgttcgccacccgcaccaccggcagcaccggcatcatcagttcagtaacagcaaacggatggctggcgggcgtttccacaaacagcaggcgggtttgcgccggcacctgcagaccaatcgccgcggcgattttgcccgcgtcgcgaccgacccagtcgcggctgaccgtgcctttgccgcgctcgtcaatatttttcagcagcagcggctggagctgttcggcctgcgccgccgtgagtttcaccgcctgctggccttccatcaggcgcatcagttcgtcggcaacgctatcgaccacgatcagcaccttctcgtcggcgcagataatgttgttatcaaaagaggcgcctttgacgatcgcctgcgcggcgcgcggtagatcggcagtctcatccaccaccaccggcgggttgccagccccggcggcgatcaggcgtttgttggtatgtttgcgcgccgcctcgaccaccgcttcgccgccggtcaccaccagcaggccgatgccagggtacttaaacagccgctgggcggtgtcgatatccgggttcgccacggtcaccagcaggttggccgggccgccggcggccactaccgcctggttaagcagggtaattgccctttgcgagacctttttcgccgccggatggggggcgaagaccacgctgttgccggcggctatcaggctaatggcgttgttgatcaccgtcgccgccggattggtggacggcgtcaccgaggccaccacgccccagggcgcattttcaatcagcgtcaggccgttatcgccggtgagcacctgcggagtcagacactccacgcccggcgtgccgcgcgcctgcgccacgtttttggcaaacttatcttcaacgcgtcccatgccggtctccgtcaccgcaagctccgccagttcacgggcatacttttcacccgcctcacgaatggcctgaatcacctgctgacgcatcgccacccgctttaatccctgctgggccaccgttgccgccgcgacagcgtcatccagtgaggcaaaaacgcccatatcatgaacggtgccggcaggctggctgctgtctttcattttcagcagtaccgctttcactacctgttcaatgtcctgttgattcatgatttttcaccctacttatggaagagcacctgaccatcggccgcagcctcatccacgataccaatcacgcacagatcgaccggagaggcgccgtgtgcgtgcgcctgtcgcgccgagctgccgctgaccagcagtacccactctccgcatcccgcgccgatgctgtcgatggcgaccgcacattgcccgtcgggctcgccgcgggcattgagcatctccaccatcagcagtttgtcgtgggccagaccttcatggcgtacggtgcagaccacatatccggttaccacagccagcttcatgtccgtctccgcgtgtgatgtgcaggccggaaaagcgcaacgccatccggcattcatgccttttcatggccggatagcgacgcgctggcgtcttatccggccagaattttccggcaccccctcccccgttagatgttgctgtcgcccttgaagctaatcgggaagacctcttccagatcgccatgcgggcgcgggatgacatgtacagagaccagctcaccgatacgctgagccgccgccgccccggcatccgtcgcggctttgcacgccgcgacatcgccgcgcaccatggcggtcaccaggcccccgccgatctgtttcactcccaccagcttgacgcgggccgctttgaccatggcgtcggaggcctcaatcagtgcaaccaggccccgggtttcaatcattcctaatgcttccattgtgttttcctctcataaggggtcctgaaggggaccattcattcaaccagcgtggacgagtcggggatccggcttgcgtccgtctggcgcggtaccgacgccaccagcgccagttcgataatttcctctacgctacagcctcgcgagaggtcgtgaagcggggcggccaggccctggatcagcggcccgatggcgcgatatccgcccagccgctgggcgattttgtagccgatgttgcccgcctccagcgacgggaagaccagcacattggcccggccctgcagcgggctgccgggcgctttgtgcgcagcgacgtccggtacaaaggcggcgtcaaactgcagctcgccatcgaccatcagctgcggcgcccgctgacgcacgatctccgtggcctgctggacgttagccacacagggatgccgggcgctgccgtatgtcgagaaggacagcattgccacccgcggcgcttcgccagcgatcgcttgccaggtctcggcgctggcaatcgcgatatccgccagctgcgccgcggtcggctgcggcaccacgctgcagtcggcaaaccccagcggctgtccggcatactgcggcagcatcagaaacagcgaagagagcgttttacatcccggctgcaggccgataaggcgcagaccagcgcgcagcacgctggcggttgacgagagatttccggcgatacacacctcggcctgcccggcgctgaccatcgccgcggcgaacatcagcgggtcggccagcttgtcgaccgcgtcagcgggcgctttatcgccggcgcgcgcctgccaggcggcggcaaacgcctcgcgcatcgccaggttgctgtgcggatcgatgacctgcaccccggtcagcggcagacgttcgccaagggcgaactgccgcagcgcgaaggggctggcgacgaggatcggatgcgccaggccctgctgctgcagataatgcgccgccttcaacacgcggacgtccagcgcatccgggaacaccaccctggcgggggcacgcagcgccagtttgcgacactggtcaatgatcatcttcacctcccagctgctgcagttggctgagcgccggcggcgcgtccgtcacgcccaggatcatcatcacgtagaccgcgctggaaaggcggttgagcgcttgcataatatcggcgcgctggaccgcaaattgcggcgtaataaacacctgcgccgcggtcacctccgcctcgcgcactttgccgcgcagcaaattaagcagcgcgacatcgcgcccatggcgggcctccggcaccaggtgatcgtgacccaggtaacgcagcggctgatgggacagacgatgcagctgcgcctcgctgaatccggctatcgactgcgccgccagcggttcctccagcgcatcggcgcgcatgatgttgcccagccgcgaacggatgtccgtcagccacggctgccagggctccgccagttcaatttgcagccacaccgtcagggcgatggtgctgtccagcaccgcgcggaaggccagccgcggatcgtttttcgccaccagggtatcggccgtcagatgagttaaggtgtccggctttttgcccaccggctgctgacaaagctcgcagcaggcctggggcggatggtcgctgctggtcaggacatgcaccggctgtggcgtctgttcgtcatcctcgacaaacaggcgcccctggcggtcgagaaatttgacccgcagatgccgactttccagcagttccctcgccgagggcgtcaggcgggcatcggcaggaagatggatttcaccgccttcgctgagcgtatgattcgctctgagccacgcttcggtaatgaaatcgttcatagcgattgccagtttgccggccaggcgacgtacaggaagcgcaccgtcgacggggtaccgaattcgatgctggagcctttcgggatgaacatgacgtcccccgctttggcgaccagcgtttccccctgatggcgcacatgcagctcgccctccagcaccatatcgatttcgtcgtagttcagcgtccacgggaagaaggcgttctcccactgcataaatccggccgccatgctgctgccatcctggtcagtcaccaggtccgttaagccgacgcagtgcggctgggcgccgtcgaagcggccaaacttcacgctgctgccgtcgatcactttgatgccgcctttgccggtcactgcctcaaatcccggctgcatcgcctcctgctccagggactgcttctccttcatcaccttttccatcagctgcgccaccaggctttcggtaaactggccttccggcagctgcgccaggatggtttcccggatccgctggctttccgttttgtcgctgtccgccgctgtcgccgccggcgcggcgccatcgtcttcggtgatagtgaatcccagcagctcggcgacttcgcgcgcttccggggtgataatgctggcgcgcagaactactgacatcgcctgttcgccgcgcgcgtgggcggcacgaatatcgttagcggtaatgagtttcttcacctggcccttcctccttttggctgagctcactcaagtaattttccagcggcgcgacgctttgcggatcgcaaccgttgagggcgaaaaccggcgcctgaaaccccatcccgtccagcagctgccgcaccgcggcgacgttggcatccggcagatccgttttgctgatcgccacgataaggtgctttcggctgccaatatccagcaacccgggtggcaggcgactttcggtatcattggccgcatggacataaatcagggtgtccacatcctgcaaggtggtaattaaggcgtgataccagcgcggatggctgaaatattccccgggtgtatcgatgtcgccacgatcgttaaattccagcgcctgcgtttttctggcgagggaataattcccctgcagggcattaaataacgtggtttttcctgcaccgacggcgccgacaatcgcaatacgcttcatggtcgctctcaattaacttttcgttaattcgcacaaggtataatttaataagcggcctaatccgccgatggtctgcagaagcgcctcctccaccgcgccgaccgagccgtagatcaccagcgcgccgctaaaccggtcgagaaaaccgatgtgcacgtcggcggccttcatcgccagatcgccggcgatcatcgctgtttctcccggcgtcagcgtcataatgccgatcgcgccggattcgggtacgccgatctttttcgccagctccgctcccgggtgggcaatcagatgcgccagcgtgacctgtttgcctggtacgaattcctgaataatgcgttctttatccatgactgattgccccctgaaatctgtcctcatggtgacgacatttcagcgcggcaaataacaaatttcggcaagtggggttaaaaggtgaagtggatcactcaggagagaaaataatattgcggtggaattaaaaaggcaggctcagcgttttttactcaccggcctgcctgatattgcgcgcggaaacggatccgcgcgttaacgggggaaatagaaaattacagcggttcggtttgcgcttcaacaaccgccagcgccaccatattaacgatccgacgtacggaggcgatcggcgtcaggatatgcaccggcttcgccacccccatcagcaccggcccgacggtcaccccttccgaactggagacgcgcagcaggttatagctgatccgggcggcttccatattcggcatcaccagaatattggccgcccccttcagcgggctgtccggcatgcgatcgttgcggatgctttccaccagcgcggcgtcgccatgcatttcgccatcgatcatcagctccggggcgcgggccttcaccagctccagggttttacgcattttgctggctgacggacagtcggcagagccaaagttggagtgcgacagcaacgccacgcgcggttcaataccaaagcgtcgcacgctttccgccgccatcagggtgatctccgccagctcttccggcgacggatcgtgattgacataggtatcggcgataaaggtgttgccgctcggcagcagcagcgcattcatcgccccggcggtgctgacgccgtcgcgatagccaaacagcggctgcaccacgcggtagtgatcgtggtactcgccaatagtcccgcagatcatcgcatccgcttcaccgcgatgcaccatgatggcgccaatcaccgtggtgttgctaatcaccgcccgctgcgcctgctcctgggtaatgccgcggcgcttcatcagctggtagtactcgctccagtactctttaaaccgcgggtcggattcattattgacgatctcaaagtcaacgccggccttgatctgcaggcccagcttctggatgcgcatttcaatcacgctcgggcgccccaccagaatcggtttggccagtcccagagacaccagctcctgggtggcgtgcagcacccgagtctcctccccttccgccagcaccacgcgcttcggctctttgcgcgcctgagagaagataggcttcataaacaggttggttttatagacgaactcgctcagcttctcgatataggcgtcaaaatcggcgatcgggcgcgtcgccacaccggaatccatcgccgccttcgccaccgcgggggcgattttgacgatcagccgcgggtcgaatggtttcggaatgatgtagtccggaccaaagcttaaatcctgatcgccgtaggcggaggccaccacttcgctctgctcggcatgggccagctcggcaatcgcatgcaccgccgccagcttcatctcttcgttgatcgccgtcgcgccgacgtccagcgcgccgcggaagatgaacgggaagcaaagtacgttgttgacctggttagggtagtcggagcggccggtacagatgatggcgtcatcgcggacctgcttcgccagcggcggcagaatttccggctccgggttggccagggcgaggatcagcggcgcccgcgccatcttcttcaccatctcctgagtcagcactttcgggccagagcagccgaggaaaatgtcggcgccgtcgatcacgtcatcgagggtgcgtttgccatcgtcttccaccgcataggcggctttggtttccgccatgttcggctcacggtctttatagataacgcctttcgaatcgcagaccacgatgttgtgcttttgcatccccagcgccaccagcagattcatacaggcgatcgccgccgcgcccgcgccggagaccaccatccgcacgtcggacagattcttctcgacgacgcgcagaccgttgaggatcgccgcggtgctgatgatcgccgtgccgtgctgatcgtcatggaagaccgggatattcatccgctcgcgcagctgctgctcgatgtagaaacactccggcgctttaatatcttccaggttgataccgccgaaggttggttcgagggcggcgacgacgttaatgaatttgtccggatccagctcatcgacttcgatatcaaacacatcgataccggcaaatttcttaaacaggacgcctttgccctccattaccggcttaccggccagcgcgccgatgttgccgagccccagcaccgcggtgccgttggagacgaccgccaccaggttgccacgggcagtgtatttgtaggcggccagcggatctttttcgatttccaggcagggggctgcgacgcccggcgagtaggccagcgccagatcgcgctgggtggcgagaggtttggtcggcgagacctggatttttccgggaaccggaaattcgtggaagtcgagggcgctctgttttaactgctcatccattttctattcctttctttcacgtatcgttcgtaggggaaaagcgtgatgaccatcctgtcgttcacctttcagtggcagacagtatccctcctggcggggcgataaactttgaacaccgccaaactctggccatcgttatgattttgttgttatcaatttatagcggttatgttacccggattcgccgccaataatagccctgtctgctatgctttttggttatgtacctcatcaatgtttataccgtataccggcaagcactcatgtaacaccttgttccaggaggacttatccatgaatcagttagacagcatcaagcagttcaccacggtggtcgccgacagcggagacatcgaatccatccgccactaccatccggaagacgccaccaccaacccctctctgctgctgaaggccgccggcctggcgtcctatagcggcctcatcgacgacgctatcgcctgggccaaaaaacagggtggcggccgcgaagcgcaggtggctcacgcctgcgataagctggcggtcaattttggcgcggagatcctcaaaagcattcccgggcgggtctccaccgaggtggacgcccggctctccttcaaccgcgagaaaagtatcgagaaggctcgccacctggtggcgctgtatcaggagatgggcattgataaatcgcggatcctgatcaagctggcatccacctgggaggggatccgcgccgcggaggtgcttgagaaagaggggatccactgcaacctgacgctgctgttttccttcgcccaggcccgggcctgcgccgaggccggggtttatctcatctccccgttcgttgggcgtatttatgactggtatcaggcgcgcaaaccgctggagccttacgtggtggaggaagatccgggggtgaaatcggtgcgcaatatctatgactatttcaaacagcataaatacaacaccatcgtgatgggcgccagcttccgccgcaccgagcagatcctggcgctggtcggttgcgaccggttgaccatcgccccgcctttattaaaagagctgcaggccagcgataccccggtggtgcgcaaactgatccctgccagccagatcctgccgcgtccggtgccgctcagtgaagcggagttccgctgggaacataatcaggatccgatggcggtcgaaaagctagcggaggggatccgcctgttcgccgtcgatcagcgcaaactggaagatctgcttgccgccaaactgtcactttagtctcacggagaaaaatatgtcccgaagagagcttgccaacgccatccgcgccctgagtatggacgccgtgcagaaagccaactccggccatcccggtgcgccgatggggatggctgatattgccgaagtgctgtggaacgattttctcaagcacaatccgcagaaccctgactgggtggaccgcgaccgctttatcttgtccaacggccacgcgtcgatgctgctctacagtctgctgcacctgaccggctacgatctgccgctgtcagaactcaagcagttccgtcagctgcactctaaaacgcccggccacccggagcatggctatacccctggggtggaaaccaccaccggcccgctgggccaggggctggcgaacgccgttgggatggccatcgccgaacggacgctggcggcgcagtttaatcgccccggccatgagatcattgaccatcacacctgggtgttcatgggcgatggctgtttgatggaggggatctcccatgaggcctgttcgctggccggcacgctcggactgggcaagctgatcggtttttacgatcacaacggcatctccatcgacggcaaaaccgaaggctggttttccgatgatacggcggaacgcttccgcgcctatcactggcacgtcataggcgatatcgacggccacgatccgcaggctatcaaacaggcgataacggaagcgcaggcggtgaaagataaaccgtcactgattatctgccggaccatcatcggcttcggttcgcccaacaaagccggctcagaggagtctcacggggcggcgctgggcgaaaaagaggtagcgctggcccgccagcagcttggctggaaatatcctccgttcgagatcccgaaagagatctacgcgggctgggatgcgcgtccgcgcggggaaaaagcggagcacgcctggaacgagaaattcaccgcctaccagcagcagttcccggagctggccgctgagctgacccgacgtatgaatggcgccctgccggaagactttgccgcgatcgcccgcgactacgtggcgaaactgcaggccgagccggcgaaaatcgccagccgcaaggcttcgcaaaacgcgctgaacgcctacggcccgcacctcccggaactgctgggcggttctgcggatcttgcgccgagtaacctgaccatctggtctggatcgacatcgattaaagaagatcctgcgggcaattatatccactacggggtgcgcgagtttggcatgaccgcggtggccaacggcattgccctgcacgggggctttattccttatacctcgaccttcctgatgtttgtggagtacgcccgcaacgccgcgcgcatggcggccctgatgaaggcccggcagatcatggtctatacccatgactcgatcggtcttggggaagacgggccgacgcaccaggcggtggaacagctggccagtctgcggctgacgcccaacttcagcacctggcgcccctgcgaccaggtggagaccgccgtcgcctggcaggcggctatcgcgcgacagggcgggccgacggcgctgatcctgtcgcgacaaaacctggcgcagatgccgcgtaccccggaacaggtgcaggatatcgcccggggtggctacgtgcttaaggatgccggcggaaaacccgacctgatcctcatcgccaccggctcggaagtggagatcaccgtcctggccgcggaaaaactgttggccaaaggggtaaatgtgcgggtcgtctcgctcccttccactgatgtgtttgacgcccaggatgaggcctggcgcgaatcggtgctgccgtcggacgtcagcgcccgggtggcggtcgaagccgggatagcggactactggtataaatatgtcggcttaaaaggcaagatcgtcggcatgaccggctatggcgaatccgccccggcagagcagttgttcccgttctttggctttacggtcgaccatatcgtcgccaccgccgaacaggtgcttaacgggtgatccacagcgtgggccaggcatctggcccctgccagttgtcgcacgtcggctgctgcgcgtagcgggagaggctgaaccgctggccgtcaaaacgccagcgggtttggatcccgcaatcgccggccccgcggcctttatccagggtcaccagctcatggcggcggtcatcatagctggcgttgatcagctcaatctcacgcggcgcctcgcccggcggctggaatggcaacgttagccgcacctgacgggcgacataggggcgctggcgggagaccagccaggccagccagacggtgttgtaggcgccggattcgcagctggtcatcagcagcactttgtcatccgtcagcgcagtaacgcgaatttcacggcggaagggatcgagggagcagtggctgttggtcatccgctcattaccgtagtccatcagatcgttgagctcctcacgccccagcggcgactgcgccgtttccgcgctcgccaccgcgcgcagcgccggcgccggcggtacgctgagcggcggctcttcccctttgccgacccaggccgtttcgctacctacccgcttttgccgatcgtcgataaaaaacagagccgctttcaacccctgcagggagatggtctgcaggccattggccagcgagagcgctttaccctcctgaacctgctggagaaacgcatcgatcgtcacgctgtcggcggttttaatgagcttatcttcaatgggccagcgcttgtcggtcaggggcagcggtttaccatccagcagcaggcgcggcgctatcggcgcgagcgtcgccactggattgccggtgccgcccagctcgatacgcagactggcgtcagtgactgccccagcgctgcggctgagggtcatcaccaggccatgatgcagccccacgttacgggtgacgcagaaattttggttgttacaggtgaccagccagtcgttgaagcgctgctgcgtcggtgccgaccatgcctgcgagcaaggcagcctgtcccttatacacctctgcagctgccgagggaccccccagtaacgacgcgcgtcgtgcgactgcgcttctca

SEQ ID NO: 133 - DNA, 190328 bp, Unknown
  source: /note="Description of Unknown: MKP2_2161_1 Mutant Bacteria sequence"
ggggggggggggttgggagaaggaggcgggggccgggcctacggtctggactgggggacgctggcattgtaggccgggcaagcgcagcgccgcccggcaagatgttcaggctgcgtgcccggcctgatgcccggtggcggctgcgccttaccgggcctggggtacggcaggccggtgcaagctcagcaggccgggcaagcgccgcgccgcccggcaaggtgtgcaggccgggttcccggcctgatggcgcagcccgcgttagccgaacaggctggagagacgctggagcaccagaagagcgctgtagtagtcaaggcggaaggtctcggtgcccagcgggtagacgcgtttgcctgcgaccgccgggagatgcgccagcagcgggttggcgtagatggcatccgcatctttctggtcgccggcgaacaggaacaggctctggccgttcagaccggccgcgaggttctccccgcccagctgcacgatatcgtggcgtttaccctggctatggctggcgggcaggccgcccggcagcgtcgccaggctaaagcccagctgttcgagcatctgcccctgagccgattccggcgtccagatattggcgctgtgcgcggcggcggtatagaccagggcggtcaccggctgcggcggcagtttcattttttcttttaacgaaacgagctgtttattgaagtcggcaatgcgcgcgctggcctgttgttcatgaccggtgatctgccccagctgggtgagcagggtttgccagcttttatcgtcatagttgatgaccagcgtcggggcgatggttttaagctgatcgtacagcggcagtgcggagtcgccaccggtcgcgctcaccaggatcagatccggcatctgggcggccaccgcttcggcgcttggttcgccgatgtacagccgcgccagcttgcgggctttggcaacctcgctccactggcgcagaaagccctggctatcggcgacgcggttgttcggcgtggtcgcgccgctggcgaccaccggagcgtcaatcgccagcagcgaaccggtaagcgtcacgctggtggagacaatgcgcagcggctgactcggcagggtatgcgtcccgtagctgtcggtgacctggcgcggccagtccgccgcctgggctgaggtaattcctaaaagcaacagcatgccggtcagcgcaccgcggcggcagaaagaaaagaagttcacgtcatcgcatcctgatttgaaaggtgataaatgcgtctcattttcaactttgtgtcagcaggatgcaagccaaagtggcggcgccatgacgtaacgcggttgacatggcgggcaataccttttaggttagccaaccaaaatataaatgataattattcttaatatctttatcgtttttggaggatgatatggaaacgtcactggctgaggatgtaaagaaaccgacccggaccctgtcgccggacagcttcttctttatgtcgccgtaccgcagttttaccacttcaggctgcttccgtcgcttctcacagcccgccgttggcggagatgcgctgaacggcgagttccagcagcagatggcggccgcctttgccgaggcccgggcggcggggatccgcaagccggtgatggtcggggctatcccgttcgacacctgtcagccttccgagctctatatccccgagcgctgggaagcgttctctcgcccggaaaagcagcgttccgcccgctatgccgcgccgctggaggcgatggaggtggtggagcgtcgggagatcccggagcaggacgcgtttttagccatggtggaacgcgccgccgcgctgaccgccaccccggaagtcgacaaagtggtgctatcaaggcttatcgatattaccacccgcgaccgcgtcgacagcggcgcgctgatggagcgactgatcgcccagaaccccgccagctttaacttccacgtgccgctctccgacggcggcgtgctgctgggcgccagcccggagctgctgctgcgtaaagaaggacagcacttcagctctctgccgctggccggctccgcccgtcgccagccggacgatgtgctggaccgggaagcaggcaacaggctgttggcctccggcaaagatcgccacgagcacgagctggtgacccaggcgatgaagagcgtgctgggcccgcgcagcagtcagctgtcgctaccggagtcgccgcagctgattaccaccccgacgctctggcatctggcgacgccgagcgcaggcaccgcgctggcggaagaaaacgccatgtcgctggcctgtctgctgcacccgacgccggcgctgagcggtttcccgcatcaggcggcgaagcgcctgattgccgaactggaacccttcgatcgccagctgttcggcggcatcgtcggctggtgcgatgacgaaggcaacggcgagtgggtggtgactatccgctgcgcgcgtctacagcagcgtacgctgcgcctgtttgccggcgcgggcattgttccggcctcctcgccgctgggcgaatggcgcgaaaccggcgtcaaactgaccaccatgcttaacgtatttggcttgaactaagaggcaaggatgattgcatttacccgttggccggaagagtttgcggcccgctatcgtcaaaaaggctactggcaggatctgccgttaaccaatctgatcacccgtcacgcggacaatgacgccgtggcgattatcgatggcgagcggcagattagctaccgccagtttaaccagctggtggacaacctcgcctgctcgctgcagcgccagggactgaagcgcggggagaccgcgctggtgcagttgggcaatgtcgccgagttttacatgaccttctttgcgctgctgcgcatcggcgtcgcgccagtgaacgctttgttcagccaccagcgcagcgaacttaatgcctacgccgcgcagattaaaccggcgctgctgattgccgatcgcgagcacgctctgtttgctgacgatagctttctccacgcgtttatcgcggaacatccttccctgcgcgtcgcactgttgcgtaacgacggcggcgagcgcgatctggcgacggagattaaccgcccggcggataactttatcgccaatccaacccctgccgacgaagtggcctttttccagctctccggcggcagcaccgggacgccgaagcttatcccacgcacccataacgattacgactacagtatccgccgcagcaacgagatctgtgggattaacgctgaaacgcgctacctcaacgcgctgccggcggcgcataactatgcgatgagttccccgggttcgctcggcgtcttcctcgccggcgggcgggtgatcctcgccgccgacccgagcgccacgctctgtttcccgctgattgaacaacatcagatcaacgttgcctcgctggtgccgccggcggtcagcctgtggctgcaggcgattcacgaatggggcagcaacgcccagctgcaatcgctgcagctgttgcaggtcggcggcgcgcgcctgtcagcgaccctcgccgcgcgcattccggcggaaatcggctgccagctgcagcaggtgttcggcatggcggaggggctggtgaattacacccgccttaacgatagcccggagcggatcatcaatacccagggctgtccgatgtgcccggacgatgaagtgtgggtggcggatgccgacggcaacccgctgccgcgcggcgaagtgggccgtctgatgacccgcggcccttataccttccgcggctattacaacagtccgcaacataacgctgaagcctttgatgccgatggattttactgctccggtgatctgatttcgatcgatgaagatggctatatcaccgtccagggccgggaaaaagatcagatcaaccgcggcggcgagaagatcgccgctgaagagatcgaaaacctgctgctgcgccatgaggcggtgatccacgccgcgctggtcagcatcgaagacaatctgctgggcgagaaaagctgcgcttatctggtggtgacctcgccgctgcgcgccgtcgccgtgcgccgcttcctgcgcgagcagggggtggcggaatttaaactgccggaccgcgtggagtgcgttgccgcgctgccgctgacgccggtgggcaaagtcgataaaaaacaattacgtcagtggctggccgaaggcaagctgggctgaaggagaacagagaatggcaatccctaaattacaggcttatgcgctgccggaagccagcgatattccggcgaacaaagttaactgggcctttgagccgtcgcgcgccgcgctgctgatccacgacatgcaggagtatttcctcaacttctggggcgaaaacagcgcgatgatggagaaagtggtggctaatatcgccgccctgcgcgacttctgcaaacagaacggcattccggtgtactacaccgcccagccgaaagagcagagcgatgaagaccgcgccctgctgaatgatatgtgggggccgggtctgacccgctcgccggagcagcagcaggtgattgccgcgctggcgccggatgaagacgataccgtgctggtgaaatggcgctacagcgcgtttcatcgctcgccgctggaggagatgctgaaagagaccggtcgcgaccagctgatcatcaccggcgtttacgcccatatcggctgcatgaccaccgccaccgatgctttcatgcgcgatatcaaaccgttctttgtcgccgacgcgctggcagatttcagccgtgaagagcacctgatggcgctgaaatacgtcgctggccgctccggccgcgtggtgatgaccgaagagctgctaccgctcccagcctccaaagcggcgctgcgcgcgctaattctgccgctgctcgacgaatccgatgaaccgctggatgatgaaaacctgatcgactacggtctggattcggtgcggatgatggccctggccgcccgctggcgcaaagtgcacggcgatatcgacttcgtgatgctggcgaaaaacccgaccatcgacgcctggtgggcgctgctcacccgcgaggtgcaataatggcggcgctggattttcacggccagaccgtgtgggtgaccggcgcaggtaaagggattggctatgccaccgcgctggctttcgtcgaggccggggccaacgtcaccgggttcgacctcgcctttgacggcgaaagctacccgtttgccaccgaaacgctggacgtcgccgatgccgaccaggtacgcgaggcatgcagccggctgttggcgaacaccgagcgtttagatgtgctggtgaacgccgccgggatcctgcgcatgggcgctaccgaccagctgagcgcggaagactggcagcagaccttcgcggtcaacgtcggcggggcgttcaacctgtttcagcagacgatggcccagttccgccgtcagcggggcggggcgatcgtcaccgtcgcctccgatgctgcgcacacgccgcgcatcggcatgagcgcctatggcgcctcgaaggcggcgctgaaaagcctggcgctgaccgtcggccttgagctggcgggcagcggggtgcgctgtaatctggtgtcgccgggctccaccgataccgatatgcagcgcaccctgtgggtcagcgacgatgcagagcagcagcggatccgcggcttcggcgagcagtttaagctcggcatcccgctgggtaaaatcgcccgcccgcaggagatcgccaataccattctgttcctcgcctcttctcacgccagccatatcaccctgcaggatatcgtggttgatggcggctcgacgctgggggcgtaaatggcctggaagcgagagcttacgctggcggcgctgaacgccagcagcgaaaataccatggtggcgcatcttggcatcatctacacccgactggaagaggggctgctggaggcggagatgccggtggatgcgcgcacccatcagccgtttggcctgctgcacggcggcgcctcggcggcgcgggcggagacgctgggctcgatggccggttggctgatgaccgaagaggggcagtgcgtcgtcgggactgagcttaacgccagccatcaccgggccgtctccagcgggaaagtgcgcggcgagtgccgtccgctgcatcttggtcgccagagccagagctgggagattgtggtgtatgacgagaaggggcggcgctgttgcacctgtcgtctgggcaccgcggtgctgggctaagaagccgctgtttccccggcttgcgctacgcttagcctggctacggtttctgggccaggaagccgctatttccccggcttgcgctacgcttagccgggctacgtatcggcgcaatggggtagcccggataaggcgcagcgcgccgccatccgggagtgtccctgatcgcgctgcgcttagactggctacggatctgtaggtcgggtaaggcgttagccgccacccgacaaaaaaaacggcaccgttcacggtaaccctttcattcatttacctgccttaagtgatctcgctagcaatgtgagacaaatctctgtgggtgtacggcatctgcgatgtttcggtgttgttaaattctgcgttgtgatctagaaacaaaatgtaacatcctgattaccctaccggtggaccacaacaatgaataattcagggaaataccttatctgggcgctgctctccgtcatcggagccttcgccctcggctatatcgctttaaaccggggtgagcagataaacgcgctgtggattgtcgtcgccgcggtctgcgtttatttgatcgcgtatcgtttctacggcctgtatatcgctaaaaccgtgcttggcgttgacccgacgcggatgacgcccgcggtgcggcataacgatggcctcgactacgttccaaccgacaaaaaagtgctgttcggtcaccattttgccgccattgccggcgcggggccgctggtgggcccggtgctcgccgcgcagatgggctacctgccggggatgatctggatcctcgccggcgtggtgctggctggggcggtacaggactttatggtgctgtttgtttcgacccgccgcgatggccgttcgcttggcgaactggttaaagaggagatgggaccgaccgctggcgtcctggcgctggtggcctgctttatgatcatggtgatcatcctcgcggtcctggcgatgattgtggtgaaagcgctgacccacagtccgtgggggacatacaccgtcgcctttaccattccgctggcgatctttatgggcatctacatccgctatctgcgtccgggacgcatcggcgaggtgtcggtgataggcctggtgatgctggtgttcgccatcatctccggcggctgggtggcggaaagcccgacctgggcgccgtggtttgattacaccggcgtacagctgacctggatactggtgggctacggatttgtggctgcggtactgccggtctggctgctgctggccccgcgcgattatctctccaccttcctgaaaatcggcaccatcgtggggctggcgattggcatcctgattatgcgcccgaccatgacgatgccggcgctgaccaagttcgtcgatggtaccggcccggtatggaccggcaacctgttcccgttcctgtttatcaccatcgcctgcggcgcggtctccggcttccatgcgctgatctcctccggcaccacgccgaaaatgttggccaacgaaagccaggcctgctttatcggctacggcggcatgttgatggaatccttcgtcgctattatggcgctggtggcggcctgtattatcgatccgggcgtctacttcgcgatgaacagcccgatggcggtgctggcgccggcgggtaccaccgatgtggtcgcctcggcagcgcaggtggtgagcggctggggctttagcattacgcctgatacgctgcatcaaatcgccagcgaggtcggcgaacagtcgattatctcccgcgccggcggcgcgccaacgctggcggtggggatggcctacatcctgcacggctcgctgggcggactgatggatgtctcgttctggtaccacttcgccattctgtttgaggcgctgtttatcctgacggcggttgacgccggcacccgcgcggcgcgctttatgctgcaggatctgctgggcgtgattagcccggggctgaaaaaaaccagctcgctaccggccaacctgctggcgaccgcgctgtgcgtcctggcttggggctacttcctgcatcagggggtggtcgatccgctgggcgggattaacaccctatggccgctgttcggtattgccaaccagatgctggcggggatggcgctgatgctctgcgcggtggtcctgttcaagatgaaacgccagcgctatgcgtgggtggcgctgctgccgaccagctggctgctgatctgtacgttgaccgccggctggcagaagtcgtttagcccggacaccaaagtcggtttcctggccatcgccaataaattccaggcgatgatcgacagcggcaacattccgccgcaatataccgaatcacagctggcgcagctggtgtttaacaaccgtctcgatgccgggctgaccatcttctttatgattgtggtggtggtgctggcgctattctcgattaaaaccgcgctggcggcgctgaaagaggataaaccgacggcgaaagagacgccgtatgagccaatgcctgaaaacctggacgcgattgagacccaggcgaaaggggcgcattaaccggtgtgccgggtggcggcttcgccttacccggcctacatttccgatcctccctctccctttgggagaggctcggggtgagggatacaaaagagaaatgacttatgtttgacaccctctccaaagcaggaaaatatttaggccaggccgccaaaatgatgatcggcgtgccggattacgataactacgtcgagcacatgcgaataacccacccggatcagacgccgatgacttatgaagagttctttcgcgaacgccaggacgcgcgctacggcggcaagggcggggcgaagtgctgttaaccctctttcggcagatagaggctgatctgctcctgagtacagccgtaaatcgccgccagcttctcgcgggtgcgcttttgcggacgggagtccagcgcttccagctgtgacaccgcggactggctgatgccaagcttttcggctacctcctgctgggacatcccgcgcaggatgcgccacgcggcctgcaggctgacgttttctttatgcatcacgtcgcatacttcgcccggcagcatgacgtcatcatagatatctgattcataaggaatatcttcccagtcgctttcatcctcgtcgtcgtactccagcagagccaggcgcatacgaaagtaatcgctgtaaggaatgacgacatactggtcttttccttcttcatccttgatgtactgaatagtcatattcggtatgttcctcatgaaggtaggtggtggtggttcggcgtttaaccgccacgacgtagcaggtatcgcccggcggatccccaaaggtgtagatgactctgtaatcacctaatcgcagccggtagtggttttcgggagaggacaattttttgatatccgagataggtgaagctttatcatccatcttctccagcctggatttaatgcggctcttataccgagtatcgattttagaaaattgcttatctgccgtttttgaccagacaattttcatccgtacctccactgtacgcccacacaaaatataaggaaataataagactattagataaattccgaattccttatggggtactgtagagcggagaaaaaacgcaggtaagaggcaaaacgcaacccgtcgaggcggcgcggaaaggcctctgccgggcgacagaggcttgcagaaaatgtgcgatcaggcgttcaatccgccatccacgtccagccccgtaccggagatctgcccggcggccgggctggcgaggaaggtgaccgccgcggcgatgtcttccggctggccgtagtggccgaccgcaatcatctggcgctgggcttccgcctgttctccgtcttccgggttcatatcgctgttggtcggccctggatggacaaggttaacggtgatcccgcgagggcctaaatcacgcgccaggccacgggtcagggcgttgagggcggacttggtcatggcgtacaccgcgatgcccggcatggccacgcggttagccagacagctgccgatgttgatgattcgtccgccatcggccatatgcaccaacgcttcctgggtggcgatgaccaccccacggatattgacgttgataagcgcgtcaatgtccgccagcgtcatggattccagtggaccgccgcgggctattccggcgttgttgaccagaatgtccagcccgccgagggaccgggccgcatgggtgacggcatcctgaatcgcctgcgcgctggcgctgtcggcctgtaccgcttcgccgtaccgacccagggcctttatttcatcggcgaccgcatgggctttatcggccgatttttcatacgtaataaccacatcggcgccggcgcgcgccagcgacagcgcgatggcgcgacccaacccacggctggcgccggtaaccagcgccttcttacctgttaaatcgatctgcatgatgacctcgttgcgagagtggtgagcatcatcattaggtatagacggtcggggtgattaacggctgaagtattccaccttctcaaacgccgcgcgcagaacctcaggggttaacgtcaccggtaaatagtgaatcgactcgcccgggcgcagggtatgggcaatgacccggtccagctctgcgcggttattgatatcgacttccagcgccgccagggtggtcggcaggttaaagcgctgatacgcctgcactaactgcgccagcacatcgtcctgaccaagcagggcgctctgtaccagaatgccgtaggccactttggtaccgtggagaaatttatccgtctgcggcagcaccgtcagtccgttgtgcaccgcatgggcggcggcgacccgggtgtaacgttcccccagcccgccaaccatcccgccgccggcgataatcgcctccaccacatcgcgaaacgcctgggtcagatcgccgcggcgctggtccgccagcgccgtttcgctgctggccagcagcacgtcgcggatcgccagcgcgccgttaatccccagccgcacggtgagcggcagcgccttcggctgcggcgccagcaccacggcctcataccatttggctaaggtgtcgccaatgcccgccagcaggtactccgccggggcgttgagaatgatgcgcggttcgaccagcactaggaagttggcgtcatcgaagatctcaaaattcagggcctgtccggcgtcgctataccacaccgacagcggcgtccacgccgcgcaggtggcggcgatagtcgggatggccaccagcggtacccccaggcggcgggcgagcactttcgcgctgtcgagcagcgcgccgccgccgacgccaatcactaccgcccgatcgtcaccggaggcctgcaccagccccgccacgtcgcgttcgctgcagtggccggtaaagcggatctttttcgcctccggcaggtggaaggccgccggcagaaaaggttcggcgccggccagagcgcgctcgccatagacccacaccgctcgcgagagctggtcggcgttaaaaaaatcgctcagccgctcaaggctgccaggatgggagaaatagttggccgggccgggcacgacgcggatatcgctgttactcatggaagctgtccttatgggtgttgggctaacctgatgttatgtctggacatccagatggctaatattatttcgttgtatcttatgctttttacgcagttgtcagccagcggcggctatgaaaaattcgttaaatcagaagattaattgccgcacgggagcagtgatgagcgcgaatcgccttgagatgcataacattagcctggccttctccggctttcaggcgctgaacaaggtggactttaccctccatggcgggtcggtgcatgccctgaccggggccaacggcgcgggtaagtcgacgctgatggccgtgctgtgcggcacccacgcccactatgagggcgaagtgacgatcaacaaccagccggtcatcattcgttcgccgcgggatgctaaacagctggggatccacctggtgcagcaggaggtggacgtggcgctggtgccgggcctgagcattgcggaaaacattatgctggacaggctggcggagccgggcatgaccttccgctggtcgcgggttcggcagctggcgcgcgaggcgctggcgcagctggatgtggcgctggacgtcaggcgctccattgacagctgcacgctcgccgaaaaacagcaaatcctgttggcccgcgccctgtcgcaccattgccgctttttgatcctcgatgaacccaccgcgccgttggatcagcatgaaagtgagcgtctgtttgcggtagtacgccgtctgcagcatcaggggatcggggtggtgtttatttcgcatcgtatccatgagctgaaggcgatctgcgacaccctgacggtgctgcgcgacgggcggctgattgagagcggcccgatggggccgctgagcggcgaacagatcgtcgaaaagatgctgggccacgagctcagcgatatcttcccgccgccgcgcccgccgcacggcgaagaggtgctgttgcaggttgacggtctgcatgatgaggcgttgctgcaggatatttcgctgcgcctgcggaagggggaaattctgggtatcgccgggctggccggcgcgggcaaaaccgagctgtgcaaagcgctgttcggcgccagcaaaagcagggtgcagcgtggcgagctgaacggccagccgtggcgaccgcgcgatccggccgactcggtggggcgcggcctggcgctggtcccggaggagcgacgcaaagagggcattttcattgaagagccgatcgcgatgaacctggcggtcagcgccgataacagcttttcgcgctggagcctgtttggccatcggcaggcctggcgctgggcggaggaggtgattgcccgcctcggcgtgcgcgctaccggtcccggtcagacgctgcgccgtctttctggcggcaaccagcagaagggggccattggcaaatggctgcgcggtgatgccaacgttttgatttttgacgaaccgaccaaaggggtcgatgtgaaagcgaaaaccgatctgttcatgctgatcgatggtctggcacgggaaggcaaaggggtgatttatgcctcgggtgaattcgccgagctggtcggtttatgcgaccgcatctgcgtgctatgggacggacggatcgtagcggagatccccggcgcggatgcccgggaagagacactgctttattattcaaccggaggagcggcagcgtgagcaaggccctggcagtaaacgcgacggtatcgggccgtcagcgattttttgattttctctataagtggggcatgttgctgaccgtggtgctgctggtggcggtctttggcctcgcctcggacaacttccttgacccgttcaacatcatcaacattctgcgctcgattgccatcgtgacggtgattgccattggggtgtcgatttccctcaccatcggcggcttcgatctgtccgtcggatcgacggcatcgctggctaacgcgctggtgatttccctgtttgtctggcatggcctggggaccaccgaagcgattctgataaccctcgcgctctgcaccctggtggggctgtttaacgcctttctgatcgtggtgctgcgcattcctgacatgctcgccaccctggccagcctgtttgtgattcagggcgtggcaatgacctacagctacggtgggtcgattaccgaaaacatggtgctgccgagcggcgagatggcggagggtactatcccggcggcctttggcgcgctggggcaggtgccgaccatcgtcattatcatgctggtggtgacgctggtcgcccagctcgcgctgtcgttcaccacccacggacggcggatgtacgccatcggcggcaacccggaggcggcgcggctctccggcctgcggatcacgcgttacaaagtcgcagcatacgtgattgcctcgctgctggccgggctcggcggcattctgctggcctcgcgcatcggctcttcgcaggtcaacgccggcggcggctatctgatggacgcggtggccgcggcctggatcggcttttcgctggcgggctccggcaaaccaaacgccctggggacgctggtgggggcggtgatcctcggcgtgctctccaacgggctggtgatgctctcggtgccgtattacgcgatggacattattaaagggttggtgctggctggcgcgctggcactgacctattttcagcgccgtacttaacattttacagggtaaaccgcatgaaaaagatcgcactctctctgatgacgctgggtctgctgcagtcgacggcggcgctggccaccgccccgacgccggtgccggcggcgattgccgaacacaacggcccgatccgcattgccgtgatccgcaacctcgggtctgacgataacaccacccagtttgtcgccggggcgttgcaggaaggcaaaaagctcggtttcaaaatcagcaccttcctgagcaacggcgatgacgccaaattccaggacttcgtcaaccaggccatcagccagaaatacgatggcattattctctcccaggggcgtgacccgtattccaccgccctggtgaagaaggcggtggacgccgggatcaaagtggcggtgttcgataccgcggtaagcggtgagatccccggggtgacggtcagtcagcaggatgatgcctcactgaccgagctctcttttggccagctggtgaaagatttcaacggcaaggccaacatcgtcaagctgtgggtggcgggcttcccgccgatggagcgccgtcaggcggcttaccagacgctgctgaagcaaaacccggggattaaagagctggagtcgatcggcgccgtgtcatccgatgtgcagggcgacactgccaacaaggtgggggcgatcctcgccaagtatccgaaagggaaaattgacgcgatctggggcacctgggatgcctttagccagggagcctataaagcgctgaaagagaacggccgcaccgagatcaaactctacagcattgatatttccaaccaggatttgcagctgatgcgcgaagccggcagcccgtggaaggtgagcgtggcggtggatccgaagcttatcggcgcgaccaacgtgcggctgatcgccaacaagatcgccggcgagccgacgccagccacctacgacttcaaggcggcagcgattccccaggcgctgctggcggcccagccgggagcggtaaacgtggcgtcgctggggaaaattatccctggctggggccagaccgaagactttatcgcgccgtggttcgcgacgctggaagcgaagaacaaataaaatcaagccgggtggcggtgggcggcggcctggtgccctcgccccggccctctccgcagggagagggggaaaaccatgccaccgggcgaaagggatcccctatgtcagcattaccttcccccgaatacagccgcaatatgcggctgattggccatagcgatcagggcggtcgtccggacggcgtgcagctgatggtgcatcgcggattcgcctatatcggccatatggtgtcgcagggtttttccgtggtcgatgttcgcgatccgacccggcccaccaccgtcaactatattgccgcgccgccgggcacctggaacgtgcacctccaggcgcatgacgatctgctgctggtgatcaacgcccgggatctgtttgccgacgcccgttttgctgatgagaaggtgtactacacccgctcggtgggtgacacggtcagcgatgtgcaggacaggggctggagcgccgggctgcgcatctttgatatttccactcccgcgcagccgcgggaaatcagtttcctgtcgcttaacggcatcggtattcaccgcatctggtacgtcggcgggcgctgggcgtatgtgtccgcgctgatcgacggttttaccgactacatcttcctgaccatcgatctggccgatccgcgtaagcccgaagtagccgggcgctggtggctgccggggatgcaccaggcgggcggtgaaacaccggactggccgcagggcaaacgctatgcgctgcatcacgccattattgccggggataccgcctacggcagctggcgcgacggcggcctgacgctgctggatgtcaaagaccgtacccagccgaggctgattagccatcgcaactggagcccgccgttcggcggcggaacgcataccgcgctgccgctgccggatcgcgatctgctggtggtgctggatgaagcggtgctcgataaccaggaggacggcgagaagctgatctggctgtttgatatccgcgagccaaccaacccggtgagcatcgccaccttcccgccgccggacgaagcggattacgtggcgaaaggggcgcatttcggcccgcacaacctgcatgagaatcgtcccggcagctttgtcagctcaacgctgatttttgccacgtatcagaatgccggcgtgcgggcttacgatatttccaacccgtatcgcccgctggagaccggggcgctggtcccggctgcgcctgagagaatgatggatacccgtcccggccgcccgcgggtgatccagtcctgtgacgtgtttgtcgatgcgcaaggcattatctacagcaccgattacaacggcgggctatcggtgattgagtatctggggtgagggtaaggtaaacgcaaaattgtgctcgcatgtctgccgggtggcggttttcgccttacccggcctacgaaagagtgcaagatcaaaccgttatgcggctatctgtaggcccggcaagcgcagcgccgccgggcaatccccgaaaatagcacttttttagggggtgctccctctccctgttggagagggttggggtgagggaaacaggcgcactcagctgtactggcgtacccgcgccagcagctcgtcgacgctgtcgatacgctcggccagcacgatcagcgctctgcccagggtaatggcgtggcgcaggcactcatgacgcatggcgtcgtcctggatagtgtcgatatccgcgacgtgcgacagtccgacgctgcggcggatcagttcgctgccgcagaagccgaccgcgtccgcccagactttcttcagaaaggcggaggcatagccggggtaagccagcgccgcgtcgcgggttttctccgccgccagcgcctggaagcgctcggcgaaggtggtccacagctggtggatgtcgttcagccgctgctcgcgcgcggcggcggcatcgcgaatgccgagctggcccggcaggccgcagtagttaagcagcaggttgccgatggcggtgccgatatcgaagccaatggggccgaagtagccgaactcggcgtcgatggccttcaggctgccttcggcaacgaagatcgacccgctgtggatatcgccgtgcagcagcgcttccgcatgggcaaagaaacggtgcttcagcgccgccaccgccagcttaagctgggcgtcgtcgcgcagggcggcgacatcggcctccagctccgccgggtagttattgcgctcgtggatctgatacgggtcgttaaagaacagatcctcggtgatctcgcacatcgccgggttaataaactgcgccacctgcgcctttttctcgtggggatggaggtagaaatcgctggtgtgaaacagcacctgcgccagatagtcgccaagctggcgggccgcctggggatagtagacgttagcgataagctctccgcgccagatgcggtggtcggaaagatcttccatcaccatcaccgccagctcgggatcaaagtgatggatttttaccgtgtgctgcgggctgtgctgatagtgggcgaccagggtctgcgcttcgagacgggcgcggtcgagggtcagcggccaggattcgccgacgcagcgcacgtagggcagggcctgtttgacgatcgcccggctgacgccctgacgatcgaacactttaaacaccagattgaggttgccatcgcccacttcctgcgcgctgaccagctcagatgggttgtcgatgccggcgaactgttgcgcgtaagccacggcatcgtgggcggtgaaggtatggtattgcgacattgcctcgatcctcgaattctgattaagccgttcagacgtctatacttctggattccatcctgacacaatgtgatacaacaacgcaacagggatttaacgacatgcagacattacagaccaccagcctgcgggtgagtgaaaatcagctttttattctcgaccagcaggccttgccgcaggaacaacgctggctggcggcggataacgttgcgctgctggtggaccatattcataccctgcgggtgcgcggcgcgccgctgattggcctgtccgccagcctgctgctggccctgctggcccagcgcggcctgaaccgggatgcactccagcaggcgctggagacgctgcgcgcggcgcggccgacggcggtcaacctgatgaataatctggatcgcatgaagcaggcgctggcccgggaggattacccgcaggcgctggaagcggaagccttgcgtctggtcgaagaagataaacagctgtgcgaccgcatcgctgaggcgggcagtgcgctggtgaagcccggcagtcgactgctgacccactgcaacaccggtggcctggcgaccgccggggtagggaccgccctgggcgttatcgcgctggcgcaccggcagggaaaggtgaccaacgtatgggttgatgaaacccggccgctgctgcagggcggtcgtttaaccgcctgggagctgggcgagctgggcgtgccctatcagctgatcgccgattcaatggccgccagcctgatggcgcaggggcaggtggatgcggtgtgggtcggcgccgaccgtatcgccgccaacggcgacgtggcgaataaaatcggcacctattctctggcggttttggcccattatcaccagatcccgttttacgtcgctgccccgcagaccaccctcgatcgctattgcccgaacggggcggccattcccattgagcagcgcgccgcggccgaagtgaccggagtggcgggcagctttggcgcggtacagtgggcgccgacgggggctgccgtttacaatccggcgttcgacgtcacgcctgctgggctgataagcggctgggtgctggacagcggggtggtcaccccggcgcaggtcgccgccggggcgtttgcgccggacaatggataacggacgtcgtgccgggcctggaaaaaaaggttttcccgggcccggacaaacaccgcgccgctacggcaggaccatggctaccgccggggcggatgatcggtcgatacgctgaccgagggcggtaatagccgcctggaagggacacagcgtaccgacgtcggtctgacggcagcccggctgatgccactcctgacgcagcatcgggtgctgcgcgtccggcgtctgcagacgacgcaggtcgtcgaggccctgggcctggaaatagacccgcagatagcgttctccgctcttcgcgttgcgccagcgctccagcaccaggctactgcccggcgggatatttccccggctgtagcccggcagctgccagctaaagttcatcagcgtgcgcaccatggcgatattggtgtcatgggccaccagcagcagccagcgtacgttcggattcgcctccggtttgacgccatcgagcatagcgttgagcagcaccgacccgcgtttttgcgcggtatacaacacatcgttactcagatcgtagttttccgttaacagcggcagcagggcggtgatctgcctggcctgggtgatcttgccccacgccagctggctgagaggcaggttttcactccagccgagacgcagcgtctccaccatattggccatcacgctcagtccgctaatggtggtcttcccacttttgctctgctcgacctgccacggggtatcgaagatcgggcagggcttatcggcctgacaaaccgcctgtttcaatagctggatggtcggcgccagcgcctgccgacgctgcgccagatccccggccttctctttcaccgccgccagctggcgggcggggtcggtttgcgtggcggcgaacttgtcggtctgaaacaggggatcggcatccccgctgacataatggatagcgacgccgcagccggggaaggcgccatccaccagcgcctgggcggtcgctcgcgtccgctgcaacgggctggcgcgcacgtatatcgactccgccgtcgggcatccggcctgcagcaggccgagctggcggtaatgctggccttccgcacgccctttgttgaccacggcggcatagccatggccggtgagctccccgtcatgggtggtccactcggtccacggtcggccggtggcggcctcgatggcttcccggttgccggccgtcggcggacgaataccgtggcggctgagctcgaccactttctccagctgccagtccgcggcggcggcagattgcagcgccagcagcggcagcgcgcaggcgataaacaggcgtaacagcccctgatgtcttgcaggcatcatatcttcttccttattcgttaatcggttatgaggagaacgaggtctgccgttcgacggcatggcgccgggcgacgatggcggcagtggtaaaacagagtagcgcggaacccagaccggtacccacccagaacagcgccaacgtgctgaaatcatacagcgttttgccgttctcaaggatagccgttttatcaataatgatcccggtgagaaactcgcccaggccggcgccggcgtagctggcgatgccgatggtgccgagcgcggcccccgccgctttgcgcgaagagatatcgacggcgatcagcccgccaaggaagcaggtcagagcgccaatagtggccccgaagataatcatcgccagaatatcagtgtagtaattgtgcggcgaccagagcatcagggcgaagccggcggtgttcagcaggctgataaacccggccatcacgctgcggttgcgcgggaaaaagcggtcggagagcatgccggcgatgatggtcccggcgatgccggcgatagcgttaacgccgataatcccggacgcctccagggtggaataagctttatcctgctcgagaaagaagatcccccaggagttgacggcgtagcggtcgatgtacataaaggcggaggcgaaggcgagggtccacagcgccgggttgcgcagcgccagcagctggtttttaaacaccgagccgcgggcttcgacctcctcctgcggttcatcgcggatgacgttgatggaagggaagccgctgctctgcggcgaatcgtgcatgaacagcaccagcagcaccacgccggcggcgccgagcgcggcggtggacaggtagcccatctgccagccaaacccggcgatcaccgcggcgatcaccatataggtcaccgcctcgccgatattatgcgccgtcgaccagatgccatagaaggtgccgcgctccttaacgccgtaccagcgcgccagcgagaccgcgcaggggccgacgcccatcgactgcgcccaaccgttgatcccccagaagatggccagcagcagggcgttggtggtcatccccatcatcaggttcatcccggcgctgagcaataaaccgaggctcatatagcgcaccacgttggcgtgatcggcgataaaaccattgaccagtttgccgatggcgtagctgaagaacagggtagagccgatcatgccgagctccgtcggggtgatccccagctccaccagcgcgcttttagcgacggtgaaggataaccggcagacgtaaaaggtgacgtaggccagggtcatggcgataaaggtttgccagcgcacccggcgaaaacggtgttcatcaaacgcggcgcccgctttcggcggcgacgcccggaaaaaagcgataattccagacataggtggttctccgcaggtcggaggcctgactgattgatgtggttcgtccgtgaatgaagttatcgttactgtgtagagtacataatcagaaatagcctgacccgtaagggttaatgtaatggttgtgggatcatctttttcagctgcgggtagagcgtctggctggccagcagcagcggattgccgcgctggatcccctcctgcgccagaaaatcgttgctggcgccgcccgcttcgcgcatcagcaccagccccggcagggcgtcccacgggttcatgtgcggctcgtagtagccaatcaaccggcccgccgccgcccaggcgctcatcaacgccccggagccgttgcggataaacatgccgccgtcgctgagcagcgcctgcagaaacggcagaaagtccgccggggtgacgcgatgcgaggtgccgacgcccatcacgccctctttgaccgtcgtcgcggggtgcggacggatcggagcgtcgttgagccaggcgccatggccccgcagggcgtgaaacagctcgcgatggttggggtcgtagaccacgccgatgaccggttcgccgtcggcgacgatcgccagcgacaggcaccaggtgtgcaggccgttgaggaaacagctggtgccatcgatggggtcgaccacccacagcactcgcgcgtcgggcaggcgggcgccgctctcttcgccgagaaaaccatcctccggaaacgcgctctgaatgcgctgtttgacaaaggcctccacccgcttatcggccacgctgaccacatcctgcaggtcgtcgcccttatggtcgacggtcaacgcctcgcgctgttgatagtattcaaacgccagctcagcccccgctttcgccagctcgcaggccagacggtagcgggcctgtagcgcttctgattcctgagattgcatagtgactccccattttgcacacgtgtgcattttgcgtgaaaaaaacagccccgaagggccgaatgagtgtggccgggtttcgcagaagattctgtgatcgctccagcataaaatgattttttcatttggcgctatggcgaataattagtttcaccggcacttcgcgatggcgcgagggcaggctgaagcgggcgatccgcgtcattaacaaatccaccgcgtggtgggccagcagggcggtattctgctgaacggtggtgagctgatagggctgccagtccgcctgcgggatatcgtcaaagccgacgatggccggcagcggggcggcggcgtcccgcaggccgtcctgggcgcccagcgccagcatatcggtggcgcaaaacagcgcctgcatcccggggttttcagcaaccaattctctggcagcctggtagccggcctgatagccgccgccgtcgcagaagcggctgctcaccgccatatccgacgtccgggcgataaaagcctcatagcgctggcgggtgctgaagttctcgcgattttcgccaataaagccaacctgccgccagcctcggcggctgaacagatccgccaccagcttcgctccctgggcgttatcgctgcacacccggtcgcagccggcgaggtccgcatggcggttgatcagggtgacggggatcttgcgcgcgagatactcttccgccagcgacagcggcggcgcgccggaggtgatgatcaccccggcgacgtgatagctcagcagtagtttaagcgagggggcgagctgctgcggatcgtcagcgttcatcagcagcggcataaagccattgagcgccagctgatggaccagcggcgccagcagtttgctgcgaaacgggttgtcgaaaccggcggtgacgatgccgataaaattactgctgccggtgatcatcgtccgggcgatgatattcacctgatagcccagggcttccgcggcgctcagcaccttctgccgggtcttctccgacaccgaggcgccgggggtgaaggtgcgggagaccgccgagcgcgagaccccggccagtctggccacgtcctcggccttaatccattttttatcgctcatcgtcgtttcgcgccgtctgttttccaggaagccgacgcccgggcgggcgtcggtcacgcacactgcctgaaaaggtatcacagaaaggcgtcgtcgcgcagcgccttgcgccctatgccgggtagcggatgtgctccacctcacgctgcaaaatcaccctgccgtggcgaatggaggtcagcacccgtgcctgacggcggacggcctcgtagtcgttttcagcatcgaggatcagcaggttcgccgggcggccttcggcgaggccgtagttatcgcccagacacagcgcccgggcgctgttgtcggtgacgaagtcgaggcagcgctgcagatcgtcatagccgagcatatggcagatgtgcagtccggcatccagaatgcgcaggatattgccgttccccagcggataccacggatcctgaatcgagtcctgggcaaagcagacattgatgccggcgcgatccagctccgccacccgggtgacgccgcgccgtttcggccagctgtcaaaccggccctgcagatgaatgctttcggtcgggcaggagatgaagttgatgcccgaggctttcagcaggcgaaacagctttgagcagtaggcgttatcataagagcccatcgcgcaggtgtggctggcggtgacctgggcccccatgccgcgcacccgcgcctcctccgccagtacttcaaggaaacgcgattgcggatcgtcgatttcatcgcagtggacatccaccaggcggccgtagcgctgggcgaggtccatcaaaaacatcaccgagctgacccctttgtcgcgggtgttctcatagtgcggaatgccgcccaccacgtcggcgcccatctcgatggcgcgcgtcatcagctcccggccgttgggatacgattcgattccctcctgcggaaaggcgacaatctgcagatcgatgagatcggcggcctcttgtttcaccgccagcagcgcctgcagggccgccagcgacgggtcggtgacatccacatgggtgcggacgtgctggaccccgaaatcgcgcagcatgccgatggttttcagcgcccgctggcgggtgtcctccggggtaatactcgctttgcgctggctccagcgggtaatgccttcaaacagggtgccgctgcggttccactccggctcacccgcggtgagggtggcgtcaagatggatatgcggctcgacgaagggcgggatcgctagccggccctgggcgtcgatagccccggcgtcggcagtctgcatcgcggcctgggcggtgatgcggtgaatcatcccgtcctgcaggtcaagagtaaacagcgcctcctggcggcgcaggcgagcgttaataattttcatggtgggtcctgtaaatggttttgcgataaacgccagatcaccagcgcgaccgaggcgttgagatgaaactgagggtggctgaccgggtagccggtcagtttttcaatgcgctggatgcgctgatgcaacgtgttgcggtggagacccagccggtcggcggcccgcaccacgttgccgttctcctgcagcagcgtctcgagggtctccagcagcagccatggcgctttgcggcccggctcgatcaggcagcccagggtgtcgtgcataaaatcgttgagcagcgccgggtcgctgatcgcggacagcaatttgataaaccccagctgctgatagtcgctgatacgctgggtcggccgcagggtatcgcacagatccagcgcctggcgcgcctgcgacagcgcccgcgggtaaccctgcagctgcctgaccggcgcggagaggccgcagagcagcgataaactctcctctccgtccgccagggtttgcagccactgctgtagccattttttctgctgaaagccttccccctcctcatccggcagcaggaaaagaaacatattgctgcgctccagcagcgggaagggattgccctgctggttgagctgctgctgcagctgctgacgtacgctgcggtgggcctgcagcagccaggcttcggcctgctcgggcgggaactggcgaaacaggcgggacagcccctccagacgcagcgccgccagccgcagcggacgggtaaaatcgagctgctggtggagggcgcgctgatggagcatctgcaggtccggatagtcgccggtgaccagctgcatcagaatgtcgcgctgcgactgcaggacgttttcgctgcggaccagcgcggtgccgatgcgctcggtgacaatcaccatcttcagcaggtagggctgctcgatcagcggcatgcccagctcgtcggcaagggcgatcagcgtggcgggaatggcgtggatataggcctcgccggtgaggatcaccatcccggcgatgccgcgctgtttgccctccatcagcaactggatcaggttggcttcatcccggggatggttgatgccggtgataaacaccagctcgccgcccatgatccactcggcgatatgttcattttccgccacatagtaccagcgtacggcccgctgcagcccttgctttcccgcccgcagacgcagggcggagagtccctcaagggccagcagttcgctgaccgtcaggctcatggctcctgctccgcgacggcggcaggctggcgtttgcttagcagagtcagggcgatatagaccagcgcggagacggagatccccaccagcggcgcgatccacggcgaaagataggccaccaccgcgccggcggcgtaggcgccgagtcccagccagttaaaacgcggcaggcgggcgttctgcagcaggggatagcgcccgccgcgggcgaaccagtagtcggcgaggatcaccccgccgatgggtggaataatactgcccagcagcacgaggaaggggatcagcatttcgtacatcccgccaatggccagcacaatgcccaccccggcggcggcgagggtcagcgtccggcgacgttcgctgcgcagcagatggcaggcggcggcggagacgttatagatggtggggccctggatggtcagcaggttgagacagagcatgatcaccgcggccaccgacagcccctgcaggatcagcacttcaacgatatcggcctgttgatagacgatagcgcaccaggcgccggcgacgatcatcagcccgttgccgatgaggaagctgcccatgctggcgagaatggcggtccggctggagttggccagccgggtccagtttgtcgcctgggtggcgccgctggcgaacgtgccgaagaccatggtgatggccgccgaccagctcatggtgtcgctcggcgcaatacgggtcatcgcctgccagccgccggcgtggtgcagcgccagatacatggagaccatcagcagcacaaacatcaatggcaccgacaggcgcgacagcgcgtccagtcccttgtagcccaccagcgcggtgaggcagaacaaaatgccaaacagcaccatcaacggctgggtcagcgcctcgggcagggcgaggatcttcaccagcgagatagcgaccgtggcggtgccccaggcgtaccagcccagctcggcaaaaccaagaataaaatcggccagcttgctgccaatctccccgaagcagaaccggcccatcagcaccgtattcaggccgctgcgcgcggcgatccagcccagcgacgcggcatagagagccagcaaggcgttgccgatgacggctatccacagcagattgacgatggaaaaggagacgccgagtttaccgccggcgaacattgtgccggtgaaaaaggtaaagctgaacaacaccatggcgatggaaaatacgcctttgcgtccggcggcgggcgcttcgacgaggggaaaatcattgctgtttgacatcctggaacctctggctggtagatgggcggtgattgccggaagtagcaagagatgtgccaggaaaaaccgggcacggggaatagcgcgcggtgtgcaacatgcacagttattgaaggatcccggacgggtaatgccattctactgtgcatcctgccaggttttgcaccagtccagggcagaggagggcggtgagcgcatccctggcgccggaggagaattttagccaggacgatccgcctgtttttggccagagagtagtggagaatagcggtgtactgaaaacggttggttaaatcactgtgaataaaggttatttaatatgcttttatgatataaccatttgtcttgtatgtgtttcctgaaatattgtcccctccggttagcggtgttagtatcggataaatagccatttagacggctaaataaatcatcgctaacctaaggaactgctatgtggcaagaaagactcgcgcaactggtcaccacctgtcattggatcggcgcgaaaggctgggcgccggcgaccggcggcaatatgtcggtgcgtcaggatgatacctggtgctggctaagcgagtctggccgcgacaaaggcagcctgacaaccgaggattttctgcaggttgagatcgccaccaaccaggcgccttccggacggaagccgtcggccgagaccggtctgcacaccctggtgtatcgcctgttcccggaagccaacgtggtgctgcatgtgcataccgtcaacgccactgtgctgtcgcgcatcgaaaaaagcgacacgctggcgctgcaggggtatgaaatgcagaaaacccttagcgggcagcatagccatctcgataccgttccgatcgccatcttcgataatgaccaggatattgacgccctggcggcgcggattgccgattatgcgcaaacgcgcccgctgcgctacggctttctgctgcgcggccacggcctgacctgctgggggaaagatattcaggaggcccgccgtcaactggaggggctggagttcctgttcgagtgcgagctgatgcgccgccgctacgagccctgagccggagcaggtatggatttttatcttggtatcgatattggcacctcgcgggtgaaagcggtgctgtttgatcagcatttcaccgcctgcgccagcgccgcggaaaatacctcaccccgcctgtcggccaatggctacgcggaacaggatatgacccagctgtggcattcggtgctggctattctgcgccagattgcccgccatccggcgctacaggcggggcggctgcgggctatcggcctcgccgggcaaggggagggggtctggctcagcgatgagcagggcgaaccggtgggcccggggatcctgtggagcgatacccgcagccacgagctgatgagcgacctgctgcgccgacccggcttcgaccgccgctatttcgccgataccggcacccacctgcagccctgcaataccagcctgcagctgtactggctgaaacagtatcagccggcgcggctggcggccgcgcgctatctgtttttcgccaaggactggatccgctttcgcctgaccggcgtggcggcgctggagctgacggacgccagcagctcgttactcaatcagcagaccggcagctggtcctcggtggtgatgaacgagatggggctgaacgaactgctgccgctgtttcccccgctgctggccccggatgccccggccggcacgctgagcgacgcggtggcggcgctgaccgggctgcccgccgcgacgacggtggccgccggggcgctggatgtctgtagcgccgcgctgggctgcggcgcggtcaacgaaggggatatctacacgatcctcggcaccacctgctgcactgggatcgtctgccgcggcccgcagacggtgaacgaggcgacgcgctttgtcacccataccgaagccggacaggtgatctccctgtttccgatgcaggccggtacgccaaacattgactggctgcagcagcatatttcgctggacgccgatctggggcgcctggagcaggcgatcgcggcggtggagccaggcagcggcggcgtcttctggcagccgtacctcaatggcgaacgtgcgccgttttacagcccggacgcgcgggccggctttttcggcattagcccgcacaccacccgcgccgaactgcagcgcgcggtgtttgaaggcctggccttcgccattgtcgatgcgctgcagggttatccgcagggcggcgagctgtatctgaccggcggcggcgcagcctcggcgacctggctgcagattatcgccgactgtaccggacgcacggtggtctccagcgcctttaacgaactgagcgcgcgcggcgcggcgatcctggcggcccgtagcgtcgcggcgctggccgagacgcctccgctggcgcagacccgctatcagccgcgccctcaggcgcatgcccgctacgcggcgctgtatcccgtttaccgcctgctgcgcgagcagatgctgccggtatggcaggccagacaggccgcccttcaacctctttctcaggacctacaaccatgaaaatcgtttttaccgccgagcatgctggcgaccttagcgccttccaccagctgggcgagctgctggtggaggggtgggcgctgggcaaaccgaaactcagcgccggtcagctgattgagctggcccacgacgccgaggtgctggtgaccagctatgatgaggtgacggacgcggtgatggccgcctgtccgcgcctgcaggtgatcgcctgcacccgcgcgaatccggtgaatattgatacccaggccgcccaggcgcgcggcatccgggtgctctacaccccggggcgcaatgccgatgccgccgcggagctgacgcttggcctgatgctcagcctggcgcgccatattccgcaatcccatgcggcgctgaagcggggggaattcacgcaggctgacaatgccgccgccgccactcagcagggtctgcggcgggatgtggtctgggacgtgagcccggaaagcccctatgaagtgtttaaaggcactgaactgcgcaataaaacgctggggctggtggggtatggcaacattggccgccgggtggcgcgtatcgcccgggcgttcggcatggcggtgttggtggtggatccgttcgtcgccgcagaggatatcaatgagccagggctacagaaaacgaccctggaggcgctgttccgcgaggcggatatcgtcagcctgcacctgagcagcgggccgcacagcgacgggctggtgaatgccgcgctgttaaacagcatgaagcccggcgcgctgctgatcaatacctctcgcgcggcggtggtcgacgaggcagcgctgattgatgccctgcgccacggcccgctgggcggcgcggcgctggatgtctatcaccgcgaaccgctgtggcgcgatcatccttttgtcatcgagttcgataacgtgattatcacgccgcatatcgccggagccacccgggagagtatcgccaaacacacggcgatgattgccgccgatcttcagcgctatgtcgccggggagccgctgctgtaccagtggcgttaagccgcttgcgccgccgcgttctgcagcggcgcgggtccatcgtcaggggcgatgggccgccataaaagcctgggtctgttcccagtccactaccccggcatccgatcccatcccggtcgccaccagcgcggccaccgccgaggcgacgtcacatgctgctttcacgctgagtccgcgcgccagtgcggcaataaacccgccgcagtagctgtcgccgcagccggtggtatccaccgcctcgaccggccacggcgcaatatgctgcggcccgccatcgcggccgataagccaggagccgttctcgccgtctttcagaatgcaggtgcccacgccgagcgccaggaagaagcggccgatggcctccggctgcgtctctccggagagaaaggcggcttcctccagcgaaggcatgaaataatccaccgacggcaacaggggccgcagtagttcgagggtctcttcattcggggcgataaggtcaaagctggtggtgactccgcgcgctttggccgcctgcaacagccgcgcgctctgtccctggtccattgccgccagcagcccggtcccgccgtgatgcaggaaacgacagtcaaggacggcgtcaaattccgcttcactgacaaacagggcgtcagacgcgccccggcagtgcagggccggacgttcgccgttggggcgaatcggcaggatcgtcgccgaggtctccttcagcgcggtgcgctggataagcgagcagtcgatgcccagccgggcatagctggcgaggataaagtcggccttttcatcttcgcccaggcaggccaccgctgcggtgcggatcccgagcttcgcggcgttgatattagccccggcggcggtgccggcggggttgagacgaatttgctcaataaaggcgacgccgccgcgcggcgggatcgccaccaccgggcgcccggcgatatccagaatagtcaggccgacaaatacggcgtcaaaggttgccatcgttctcccgtttagcgatgcgtttggcgcaggcgcgcctgccagaaggatagggcgagggccaccaccagaatcacgccgaccagcgcgtccttcaccagataattgagccccatcaggttcaggccgttatcaataatggcaaggaacagcacgccgccgagggtgccgaggatgctgacccggcccagacgggtaaaggcagtgccgataaatactgccgcaatggcgtccatcaggtaagactgcccggccagcggggtaaactgccgcaggttggcggagaggatcaccccgccgacggcgcagagcgccgaggcggccaccagcacgccgagcatggtcaggcgatcgcggatcccggcgatacgcgccgcttcgctgttctgaccgatggcgcggacatatttgccccacagggtgcgctcggtaaccagccaggccgccagccacagcgccagcacgatcgctaccggcgtggggatcccgccaaggttgcccaccgccaggtcgtgatactccggagccatccgccgataggctatcgcgccgccgccgtcggtatagatgcgctcggcgctgctggcgataaaccaggtgccgagcgtggcgaggaaggaacggatccggcagatgaggatcagaaaggcattgagcaggccaatcagcaccccgccaagcagagcgcagcccaccgcggcctgccacggcagatgccaggttttcagggcgacgagggcgaaggcggcgccgaaatcgagcgcgacgcccaccgacagatcaatcgccccggcgctgacgatcagggtcatcgccatcgccacaatcagcaggatcgcgctgccctgcagcaggttggcccagttatccacggttaaaaataccggattcgcccagccaaacagggcgatggccagcaggatgatgacgccaaatccggcccgcgacagccaggccagcgggctgctggccgtctgttccgccgacgcagaggttttcagagtgatttgactcatgcctcgcctcctttgtgtctgaccgccgaggccgccagcaccaccaggatcaggccgcctttaatggcgcccatccagaagatattgacccccagcaggccgagcccgttagagagggcgttgaccaggattgcccccagcagcgcgccccagatggtgaccacccgacggcgcgagaaggcggcgccgataaaggtcgccagcacggtctccagcagcagcggcgtggccgtcccgctggagctgccggagccctggctgagcagcggcagaatagccagcccggcggcaatgcccgctaacagccagaccagcagggtcaagcggcgcacgttcaggccgctcatctgcgccatatcgcggttgccgcccaccgcctgcacatgctggccgaagcgggagtggtggagcaggaactggaacaggataaacacccccagcaggtagaccagcggccagggcaggcccagcacgctgttgtcgcgaaaggcgaccatcagcggatcgctgaccgcgatgcgccgctggccggtcaacagatctgtcagaccggtaaacgccaccgaggtcgagagggtggccagcagcggcggcaggccggccgccagcaccagcaagccgttgatcgccccgcacagcaggcaaaccgccgccagcagcgccagcagcaggagatatggcgtgtgccattcggccagcccgaggctgagcagcgcgacgccgagcaccgccgtcgccggcagggagaggtcgatgccgccggagaccacatcatccccgcccacggcgataacgcagaccaggccgaaacagaggattgccagcggaacgctctggactagcatcaggctgatattttgccagctgagaaagtagggcgactgtacgctcagccataccagcagcgacagaaacaggatcaggggaaatttttcaatcagcgtcgccaggcccggacggccgcgacgctggatagcagtactcatggtgaaggctcctgtccgccgttgatcgccaccagcagggcgtccagcgttagcccgcgggtgggcagattggccgccagcgcgccgcgccagaggaccaggatccggtcgcatagtccgagcagttcgggggcgtcgctggaggagaccagcaccgcccgtccttgatcggccagctggcgcgtacgttgataaatatcccggcgggcgccgatatcgacccccagggtgggttcatcgagaataaacagccgggcatcggtccccagccagcgggcgaggatcgctttttgctgattaccgccgctcatgtagcgtaccggcagccccggtcgtcccgggcggatcgccagctgttctatccagtcgcgcgctttctgctcggcgataccccgccgctcccagccaaaggtggcggtttccggcagcgaggcgagattaatattgtcggcggtggtgaagggcaggatcagcccctgatggcggcggtcgcgtggcaccagcgccatgccggcgcggatcgcctgctttggcgtacgaatgcgccgcggccggccttcgaggtggatggtgccgcgttccgccgggcgtaagccgtagagtaggtcgaccagcacatcgcgtccggcgcccagcaggccggcgacgccgacgatttcgcccggctgaatatcaaaagaaagatcctgcagctgccgcccgtcgctcagctggcgcaccgagagcagcggggttgccccattgtctgccgccgggcgctggcgcggagtatacagctggtcgatttcccggccgaccatcatggcgatcagcgcctcggtattctgcagcaggtcgcggtccgggtaaccgaccgcttccccgttgcgcagcacggtgccgcggtcgcagagggtggctatctcattgaggtagtgggaaatatacagaatggcaatgccctggtcgcgcaggcgcaggatggcggaggagaccagactggcctcctgcgcctccaggggggcggtgggttcgtcgaacaccaccagccgcgctgcgccgtcgatcagcgcgcgggcaatttgtaccagcttgcgctcggccaggctcaggtcgcgcaccagccgttcggggtcgatcgccagctgccagttttgctggaaaaattgcgccgtggcggccttcatccgtcggcgatccagcgccccccagcgggtgcgatactcctggcccagaaacaccgattccgcgacggtaaagtgcgggatcaggttcagctcctggtggataacgcggatgcccgcggcttcgatggctgccggattgccgaggggcagcgggtgaccgtcgagggtggcgctgccgctgtcggcctgatacacaccggcgaggatcttgatcagcgtcgatttaccggcgccgttctcgccaatcaggccatgaatctcccccggattgaggcgcagggtaaccgcattaagcgcggtgacgctggcaaaacgtttaccgatctgctccatgaccagaccagcggcggggcgttccccgccaggatgttgattaatcactgcagctcgccgtatcccaactgtttatacaccgctttcgcttcctgcggaccttgcaccggaaccaccggaataaaggtttgcaccggtagtttctggccggcaaagtagcgggccacgttgtcagccgaggtctggccgatcagatgcggctgctgcgcgacgttagccacgaacgggctgccgggctccgccatgatctccagggtctccggaccggcgtcgatggccgtcactttcacgtctttatcgcgaccggtctcttccagcgcctggacgatgccgatggccggttgatcccagcaggcgacatggatggcgtccagtttgcctttcggatactggctgagtaattcgagggttttcttgcgcgcgtcttccggcgagttggcgaactgttccgcgagctcgggctggataatatgaatatccggataatccttaaggacatatttccactgatcgtagcgaattccgcaaatacgcagcgcgctggagaaggcgttaaatacggcgacgttgcctttgccgcctaattcatccgccatgtagcggccgatggttgagcctaaggtgtagttatcggaagtagtattgttgaccgaatattgagaaacatgatctacggtaaataccgggataccggcatcacgcaatgctttaaattttggttcgacggcgctatcgccgagaatactaattaccgcgtccaccttgcgtgacagtaaaatatcgtggttattggcatgcacctgcttatcgcggccgccatcgacgccaatgactttgccccccagcttctccacctcctctgtcgcgcctttaaaggcctcgcgatcccagaaatgctgagtgccgaccacggcaacgccaatggtttttccctgtaaggagagggcgtctgcggcagcgacgctcagcgaggcaagggaaagcagtcccagcgcggcaggcaataattttcttttctgcgacattgttattatgatcctgtgatgaaggtggttgcggaccggtagcatgacaagaagcacctcgccacctcaaatacaaaataagtctaagttatgccaggaatgttatatcgcagaaacgtcagagaaaaagtttattttgtcatgagaaacctgaaaatatttcatgatggcggatagacctttttattttgtggttttatttttgacttattccgtgtttatttagcggataaagacaattttcttaatattgtgagtgcatgggaaatacggcgtctacaaagaaaaaaagaagattgcgcgggctaaagctttttttagcagagcaatgtctggccgggtaaggattattaccctatttccccgctttattgtaatgaaccttaagctgagaagaacgcgggcgctatgaagaaacagcataattatacggtgatgcactggggaacctggcaggtggagagcagtgagggcgagatcgtggcggttaagccggtgccctgggataaaaatccctcacgcatcggccagtcacttcccgacgcggtgaccagccaaacgcgcattcgccgtccggcggtgcgcgccggctatctccagcacgggccggcgtcacgagaagggcgaggtaaagagccctttgtcgaagtcagctgggaggtggccctggacctgctggcgcgcgagctgcgctcggtcaaggcgcgctgcggcaatgaggcgatctacggcggctcctacggctgggccagcgctggacgctttcaccatgcgcagagccagctgcaccggtttctcaagggctttggcgggtacaccgccagcaccaatacctatagcagcgccgcgggcgagcgtattctgccgcatattctcgggccgctgagcccgctgcaccggcagcatacccatttttccgggctggcccgggagtgtcagctgtttgtcgccattggtggtctgccgctgcgcaatgcccaggtcaacggcggcggcgccaatgaccatatgctccagtactggctggataagatgcaggccaacggcacgcggtttatcaatatcagtccggtgcgcaatgacctcagcgcggtgcccgacgccgagtggctggccattcggccgggcaccgataccgcactgctgctggccctgagctatgtgctgatcgctgagtccctttacgaccaggcgtttgttgccagccataccgtcgggtttgccccctatcgcgcttatctgttgggcgagcacgatggcgtggcgaaaaccccggcgtgggcggcggcgattaccggcctggacgcccagcgcatcgccgacctggcgcgggagatgacccgccaccggacgatggtgaatatctcatggtctatccagcgcgcccgtcaaggggagcaggcctactgggcgacggtggccctgactgcgctgctgggacagatcggcacgccgggcggcggtctcgggtttggctacgcctgcactaacctggcgggcgcggtacgaaaagcgttttccggcccgcgcttacccgccggggagaatgcggtggacagcgttatcccggtggcgcggctgtccgatatgctgctgcacccgggagaaacctatgagttcgacggtcagcagcggcgctatcccgatatccgtttagtctactgggcgggaggcaatgcgtttcatcatcatcaggatctcaaccgactgtgcgaggcctggcgccgcccggagacggtggtggtgcatgagcagtactggaccgcgcaggccaaattctccgatatcgttctgccggccaccacctcgctggagcgagaggatatcggcagcggcggtcacgacgggtttatgatcgccatgagcgcgcagatcccgccggtgggcgaggcgcgtgatgattacgctattttctgcgatctcgccgatcggctgggattcggggaagcgttcagcgaagggcgggacgccgggcagtggctgcgtcatctctatgaggagtcaagaccgcgggcgcaggaggagggtattgcgctgccctcgttcgatgacttctggcagcaaggggtgctggagtacagcgcgccggagcggccgcaaatttttctcgccgattttcgcgccgatcctgagcgctatccgctctccaccccctccggcaaaattgaactcttttccgccaccgtcgccgggtttggctatcgcgaatgccctggccatccgtggtgggatgaacaggaggccgcccggcagcgacaggaggcggcgcggtggccgcttcatctgctctccagccagccgcgcgcccgcctgcacagtcagtacgaccacggcagcgtcagccgggcgacgaaagttcagggacgcgagccgctgtggatgcatccgagcgatgcgcagggaagggatatccgcgaaggcagcgtggtgaaagtctataacgaccgcggggcgattctggcgggggtgcacctgagcgagcagattttgcccggcgtggtacagatgtccaccggcgcctggtatgacccgctggatccgaaggaagaacggtcgctcgataagcacggtaatcccaacgtattaaccgaggatcgcggcagttcgcgcctgggacagggctgtagcgcccagagctgctgggtggagatcgccccgtggcgagaggagctgccgccgatcaccgcctttgatccgccgaagtttattgaagtttaggcgttggcgctcgccggcggcggggcgggtagcccggagaaggcgcggtatgcgccgcctccggcaaagcccgcgcctggcggtttaagactgacgacagtttgacgttacgccagccgcgggtaggcgctggcgatatcgtcgccggtaaactgggcgatccagccttccgggttatcaaaaatgcgaatggcggtgaagttcggttctgatcccatatcaaaccagtgcggagtgtgggcgggaaccgaaatcagatcgttcttttcgcacagcacctggaacacctcgtcgccaatgtgcaggcaaaacaggccagcgccctcgacaaaaaaccgcacctcgtcttcgccatgggtgtgctcgttcaggaacttttcccgcagcgcctctttttgcgggttatcggcgcgcaggctgatgacgtcccagctctgatagcccttttcggcgaccagtttatcaatcgcatgctgataggcggcaatcaccgtttccgggctgggatttgcgccgaggtcgcggtcggcctgccagcgctcgaaacggacgcctttggcgttaagctgcgcctgaatcgcgctggcgtcggtgctgtgccagaccggcgtttgcggatcggtcacggaaaaaagagttaatgcgctcatgctgggatctgctccggatgaatgtcgtcaaaacgctgaacctgagggtgatggctcgccgggtcgcggtcgccgcgaaccagctgcacagtgcgcaaacccgcggcctcggcggcatcaagttcctgatggatatccgacaggaacaggatggtgccaggggcatggcccaggtgttcagcaatgttacggtaggactgcacctcgcgtttggcgcctaccagggtatcgaaatagcccgtgaacagatgagtaatatcaccttcatcgctgtagccaaataacaatttctgcgcagccacggaacctgaggaatatacatacagatcaataccctgcgctttccatttctccagcgccggcagtacgtccgggtagagatggccggtaaagtcgccgttgagatagccgtcgcgccagatgatcccctgcagcgccttcagcgccgtggatttacggtcttcatccataaaggtgaagagggtagtgataagggcggcggtgctggcggcgggggcgtctgtttcgctgcgcaggttgtcgagaatggttttgaccggttcagcgtgctgctgagcggtcacaaagccggccagtcgttcgcgggcgtaggggaacagcacgttatgcacgaagcggatatcgctggtggtgccttctatgtcggtcacgatggcgcggatcatggtttctccagagtgggcgtagcgtggaataacattagcatttagacgtctaagcgtcttgattgccaaatattaacatcgtgttatagtggcttcaacaacagcattacaatcggtataaaaagaatgaacaataaccccttgattccagagagtaaacttcctgcgctcggcaccacgatttttacccagatgagcgccctggcccagcagcatcaggccataaacctgtcccagggctttcccgattttgacggcccgcgctatctgcaggagcgtctgacgtaccacgtggcgcagggggcgaatcagtacgccccgatgaccggcgtgccggcgctgcgcgaggcgatcgccgggaagacggcggagctgtatggttaccagcccgacgttaacagcgagatcacggtcaccgccggcgcgacggaggccctgtatgcggcgatcaccgccctggtgcgccgcggcgacgaggtgatctgtttcgatcccagctatgacagctacgcccccgcggtggcgctggccggcggcgagttacgtcgtattgcgctgcagccgccgcattttcgcgtcgactggcggcaatttgccgccgccctgagcgagaaaacccggctggtgatcctcaacaccccgcacaacccttcggccaccgtctggcagcgcgaggattttgccgccctgtggcaggcgatcgccgaacgcgagatctatgtcctgagcgatgaagtctatgagcatatctgctttgctgagggcggccacgccagcgtgctggcgcatccccagcttcgcgagcgggcggtggcggtctcctcgtttggcaaaacgtttcatatgaccggctggaaggtcggctactgcgtggccccggcggccatcagcgccgaactgcgcaaggtgcaccagtatctgaccttctcggtgaataccccggcgcagctggcgatcgccgacatgctgcgcgaagcgccggagcattatcgtgagctgccggcgttttatcgggaacgtcgcgatctgtttattgaagcgctgcgcccaagccggctggaaatcctgccctgtgaagggacctatttcctgctggcggactacagcgccatctccgatctagacgatgtcagcttctgccgctggctgacgaccgaagtcggggtagcggcgatcccgctctccgtcttctgcgccgatccgttcccgcacaagctgatccgcttgtgcttcgccaaacagccggcgactctgctggctgcggcggcgcgtttgtgccagctgtagttacttaatcgtccacgcctgggagaactggcggccggcgaacatctctgtcaggccgctaatttgcttcagacgcagcacttcatcggcatccatccccagctctttgccgattttctgcggcgtccagccgagccgggtcagctcgcggacgatctctgacatggcgtggatttggtggcggccgcgcgcccggttatggcgtatggtcgctgccatcagcccgtcacgcgaggcagcttcactcgtcaggcaggtcaccggcaaatagccttttagcgtttttttcagcgcggctttgctgcaggccagctcatggcggtgaaaaccatcgacaatcgtatacgcctgtgggccttgctggatgacgacgaccggctgggtaaagccgtcggcctccagcgacgtttgcagcagacgcttctccggcggcgccacgttattcgggttgtagtcgttgggggcgatcagatcctgtttgacccacagcacgcagtcgacgggctgcgagcggaaggggctgtagtggtggagcacctggcgaaacgcgttgatagcctcaatgcgcgcctcgtcatccagcttttgcaggtaagcttccagcgcctgcgtcagttgttgttgcataaaatcccccattgttggcgatgtttttccatgcgtttacggtagcgctgatagtggctgcttttggttgggctaaacgaaagctgacggcaccagtaatcgttattgagcagtactttgcagactcgccgccaggatgggatatctttggtgccaatgtccgcaggttgggtatccggaatatcctccataccttttttctggtaccagcgcaggtagacggcgattttattgcggtagtgctcggcggtggtttccggcatgctgtcgagcaggaacagggcgtagcttttccacgtcaggtggtcgggcttgtcgattttccgatgaccgtagaactgattatcatgcccggcatagaccccgccgctgtgcgcgccgctcactcgctggcacatcgcggcccagcgctcaggttccagcacgtgatacagccacagcccctggcgctgctcgggaccaaacggttcgcaaatgcgcatatagcgcagcggcaccccggcctgatacatcagatcgtacaacgggttatagggctcgccgcttttggcaaaccaggtccagatatcggcggttttccagtcatagagcgggtagatgtaccaggcatggccgcccggcgctgaagtggtccatggtttatcgtcggcgaagcgctgtttacgctgtgaagaaatcgtcataaagcgatttagcgattcgtcggcgcgaatgcccaccagcacggcggcgggacgacgctgcgaaaaccactcggcgaagtggctgacgaaggcttcaaagctcattccgggttgataaaatgaaaaatagcccgggtgggtaatggcccagggcggcggctggcgtacccactcggttccgggctcccagcattgccattgcggcttatactgcgtcagggcattttgggtggtgagcggcagggcgacccagtaaaaggtttcgatgacatccgcatacagcgcacgcagtttttcacagtgggcgatggtgcaggagaactgcgcttcccagtcaataaacaacacgcagatttttttcccctgtaaccgcgccgcctgggcggttaaatgcagcataacggtggagtcttttcccccggaaaaagagacacagatgcgcgaaaaattatccatgacccactggatccgctgctcagttgcttgcagcaccgattccggtaagggatatttaataaacgacatgaccattaatcctttaatagtagaaaattcccgttagctcagtataaacgatgaggggtaggaaattaatggtcgattattgtttctggcagcgggggaacagaagggcgttattcgctgtgattaaatttgggccgtgatgcctctcgatcattcattaatatggtgattaattcagttaaaaaatgattttgcgaagatgcatggtggtaattaatgtagatcgtgatatccggaaaaagattatctatgttgatggcgtgaagctgcatagtgggtgagataaagtcatataaataggaaggcaaaaagccaattaagtcggttttattaatcatgttaagaatggtcataaaagagtcgctgcgaaaggcaatattgcgcggattcagccaggcgatgctgctttgctgcacgcgctgaataacgggatcgttggtaatatagtgagtgaaaaactcctgcgccagtgactctaccgaggtaagcgtttcgcgtcgcggatggcccgcccggcaaaccgccagcgtctgcaccgtctgatagggctgacagatcgtggcgcggttggtaatgggcatgcgggtgaacaccaggtccgcctggcgatacgccagcagctcctcagccgattcggtggtggtcaggttatggtgctcaatttgcaagttcgcctgatgacagagctggttaatcatagcgtggctattgactgaacagaacagcggggggccatatatcacaatacgtttacgcagttctgagcgattattaagattgatggttttttccagctgctccagattttgctgtagatgataatgaagattgacgcaggcggtggtgggcgtcattcctttgccaacacgaacaaatagcggatcgtttaactgctggcgcagacgctgcaacgactgactcaccgctgagggggtgataaataacatcgccgccgctttgctgatgctcaaatgttgatagatacattcgaaaataaccaataaattcaaatcgaactttttcagatcgtaaagatttgccattaatgcagtcctgtttattaccggtgcggattataatattcttaatgataatgttttgtggcttaatatttgcggtgtgaatttaattattggcaaatacagttaagttctgcttaatatatcttatcgtcgacggtggcgccagcggtcgcttccgccaggcgccattgcgggatggaattactctttttcacccatcataatatgcagtttctctttatccggtaggccgaccacctgctgcagcatattatctttattcatataataaatcgccggcgtcacgttggctcccagatcgtccatcagctgctggttgacgttgagcattttcattttctccggcggaattgctttcgggatcgtcagagccattttcccattcgattgctcgtaatcatgccaggttttcgccggatcgctgctggcgagaatcgccgcggcggtggccgggctctccggcttaatcacccccaccagcagagtgcggatctgcactttaccggcctctacccaggggcgggattgctgccagaactgcttgcagtagggacagaagggatcggcaaagacatacagcacgataggggcgtccttgcgaccatcctgcagccagtgggcgctggccatcttcttccacatctcttgtcccgccggggtatagagttctttctgaaacagctgctcgctgaggttgctgccgttctcatcatacatatagccggagatcgcgtgtttaccatccggcgttaggtagatggcgacccccatgtcctggtatttgcccagccagcctttcattccccccggcgcctcaaagggttttataatggtaatgccctgtttttcaatcgcttttaccggagcggggagttcctccgcatggctgcataacggcaaaaggctgagtaacagaagacgctttaacataagtattccttgtaaaatcagcaggaaagggcaaaacgattgtcgaacctatcacagtcataggcaagatcagcagaatgacggattgccctttgctggcgtgggtgatgtaatcctagatgctgttacattaaggtaatgtagagcgcaacacatagccagtctgactggcgctgaacctaccctcgggtatttcaggtaacggggccgcctgaaaaggtggcctttttacttttgtcgcggcaaatgatgcgaaaaacagcgattagcgctgaacgcgtcgacaggttcacagagttgtcttgttccggttgttagataacgcttattgattcgataatgtaaacgcattggtcgggtcaggaaaaattcgttaacttagacctcaacgaaaacacggaggaagtatagatgtccttaattaacaccaaaatcaaaccgttcaaaaaccaggcattcaaaaatggtgaattcatcgaagtcaccgagaaagacaccgaaggccgctggagcgtcttcttcttctatccggctgacttcaccttcgtctgcccgaccgaactgggcgacgtggctgaccattacgaagaactgcagaagctgggcgtagacgtttactctgtgtctaccgatacccacttcacccacaaagcgtggcacagcagctctgaaaccatcgccaaaatcaaatatgcgatgatcggcgacccgactggcgccctgacccgtaacttcgacaacatgcgtgaagatgaaggtctggctgaccgcgctaccttcgtcgttgacccgcagggtatcatccaggcgatcgaagttaccgctgaaggtatcggccgtgatgcgtctgacctgctgcgtaaaatcaaagcggcgcagtacgttgcttctcacccaggcgaagtctgcccggcgaaatggaaagaaggcgaagcgacgctggctccttctttagatctggttggtaagatctaagtctgtttgtgcccggcggcgctacgcttgcacgggcctacaacatcgtaggccgggtaaacggcgtgccacccggcaatcaatgggcgctttcgcgcccattttattccaacaccatgatgcaagcgcattcaggcagcctgacgaggccgcttgcatgatgatgttttaagcccaggagataacaatgctcgacaccaacatgaaaacccagctcaaggcctaccttgagaagctgaccaagcctgttgagctgattgccacgctggatgacagcgctaaatcggcagaaatcaaggaactgttggctgaaatcgctgaactgtcagacaaagtcacctttatagaagacaacacgctcgcggtacgtaagccctcgttcctgattactaacccaggttccgaccagggcccgcgttttgcaggctccccgctgggccacgagtttacctcgctggtgctggcgctgctgtggaccggcggtcatccgtcgaaagaggcccagtcgctgctggagcagatccgcgatattgatggcgatttcgaattcgaaacctactattcgctctcctgtcataactgcccggacgtggtccaggccctgaacctgatggcggtgctcaacccgcgcatcaaacacacggcgattgacggcgggaccttccagaatgagatcaccgagcgtaacgtcatgggcgtgccagcggtgttcatgaacggtcaggagtttggtcagggacggatgacgctgactgaaatcgtcgccaaagtggataccggtgcggaaaaacgcgcagcggaagagctgaatcagcgtgacgcttacgatgtactgatcgttggctccggcccgtccggcgcggcggcggcggtctactctgcacgtaaagggattcgtaccggcctgatgggcgaacgcttcggcggtcaggtgctggataccgtggatatcgaaaactatatttcggtgccgaaaactgaaggccagaagctggcaggcgcgctgaaagcgcacgtcaatgactataacgtcgacgtgatcgactcccagagtgcgaccaaactgacgccggcggcgacagagggcggcctgcatcagatcgaaaccgcctccggcgcggtgctcaaggcgcgtagcgtcatcatcgccaccggggcgaaatggcgcaatatgaacgtgccgggcgaagatcagtatcgcaccaagggcgtgacctactgccctcactgcgatggtccgctgtttaagggcaaacgcgtagcggtaatcggcggcgggaactccggcgtggaagccgccattgacctggcgggcgtcgtagagcatgtgaccctgctggagtttgccccagagatgaaagccgaccaggtgttgcaggataaagtccgcagcctgaagaatgtcgacatcattcttaatgcgcagaccacggaagtgaaaggcgatggcagcaaagtcaccggcctgcagtatcgtgaccgggtgagcggcgatgagcatcatatcgcgctggcggggatcttcgtccagattggcctgctgcctaacaccacctggctggaaggcgccgttgagcgcaaccgcatgggcgagatcatcatcgatgcgaagtgcgaaaccaacgtcaaaggcgtgttcgccgcgggcgattgcaccaccgtgccgtacaaacagattattatcgcggcaggggaaggggcaaaagcgtcgctgagcgctttcgactacctgatccgcacgaaaaccgcataacaagtcagacaatagacctgcataacaaagaggctacccaggggtagcctctttttttatactcttttcgtcattcttacctgacgaccattaccgggatatgggcatggcggatcacgctcgaggcattggagccgagcaggtgggtactgatggagggattgcgtgagccaataactaccacgtcggcgttaatttcgctggccagctcgttgaccatatcgcgaacgctgccaaaacggacatgtagcttgatacgagacgggtcaatgctgaagtggctgaccatcgtctgcaggcgagtctccgcctcatgctgcagatgttcctcaaaccgccgcaggtcggcggtaaaacggctcatggtaaagctcgcggaacccggtaagacgtggagcagatggatcaccccgtcctgctgggccagaaactccgcgtgccggacggctttatcgctcagcgccatctcaaagacatcaaccggcataatgatagtcttatacatatgcaatcctccttgttcgtttgcgtctatatcaacatattatatgcggatattgtgtcattcaggtcgcaaaactgtcagccaggcaggcgcaaagcgtaaaaaagggtaagcggcgggaaaacagcagaaagaggatgtgcggacatcctctgaataaagcgcgaaacgcctcaggcagcggaattagcggtggaattcgccagcggcttccggctggtacaatagctccagcacttccaggtgcgtcgatgcgccgcccggcagctcccagtgaatggtgctgccgactttcaggcccagcagcgcggcgcccaccggcgcgaggacggagagctggctggcgctgtcggtgacctgtgacggaaacaccagcgtccgcacgcgctcttcgccgctggttaaatcgcggaattttaccctgctattcatggtgacgacatcatgcggcatcgcttccggggccagcatttgcgcgcggtcgagttcctcattcagggcatcggcaaccggtgagttggcgaaagccggctgctccagcagcctgtcgatacgttcggcatccagttcattaatgatgattgcgggtctggtcattgcatactccatgttatccaggaacctgtccgtaaaagaaaaccctcgccgaaaggggcaagggttaaggtcctaccatcatactgagagttgccggcagtttgaagtgatgaaacgcacattcagcgtgcaacaccatccggcggacggtgttttccaatcagcatcccgctttgcgctagtggccaaccttatcgaggataaactgtgcgccgcagttacccgggtgaggctggggcagaaaagcggaagtggccagcggggcgttgatggtcgcggcgttgagcgagatttgcatctccgtcagataggccggattaccgttgcaggttagcttaaacgccttcacgctctgcggaccccaggcgcgggccacggcggcgtcgaagtcggcgcggctgaccgtttggccatagtgcttcgcgagaaaatcccccaccgggctgcgcttaatttcaccgtttagtcgcaccatggcgccaaagtagctgtcgggatcgaagccgaagcagacgccatgtttggcatattcgtagcgttccagacaggaggtgccgcccgatcccggcatcacattattaagtttattggccatctccagcgacagcccggtctccgccgcctggcatttgcggttcgcttttacctccggcatgttaggcaccggacgcgtggcgcaaccgtagcgcatccagcgacgttcatccactccgcgcgcggcaatggactttggcagcccgggccacaggccatgcacggtcagaaagtcggctttattcgcggtgtcctgctgcaggcgacactcttccggttcgttgcgattgcggtcatacatgctctgacagaatccggtttgccaggagagggcaaggacgtagcggtcaaaatcagcgtatcgcatcgcggtgagcggttcagcaccggcctgagtggcggtaagcacaagggcaatcgcggcgaaatccttcctgaacatttttattcctgattatggatggcaaaagataacggggagttattaaagcataaaaaaggcgcccgctggcgccttttcgcgtggttagaccattagtggagcgcgctgccgggcaccaggatttcagtagcaacgatcaccaccagcaggccaacgagcaccggcactgaggtgcgcttgaccacttcgaatggggaaatcttcgccatcccggcaacggcgaccaccaccccggagacgggcgatatcgtgcggccgaggttagaagcctgcagcatcggaatcgacaggtaggccggattaatgccggaggagtgcgccagcttggggatcatctcaacgaaggcgtagaacggggcattaccggaaccggtggtcatcgccgccagcatggtcaggatcaccagcaccagcatcagaataatactggccgagccgaaggaggtggcgattgagatcagaccgttgataaagccgatagtgcttaacccctgggcaaagacgccggcggcaaccaacagcatcactacgccggcgaaggcgtcggccattccacggtaggcgacttccagcccgctaaagacgtttttggtgttgaaaccgcgcaggaactcgagtatcgccgccagcagcatgcagccaacgaggatggtgataatgtgcagctccggcccccatttaccgtcaaagatcagcacgccgatgatcggggtaaacggcagaatggcatacagcgccggggcggtggtggtgatgtcgttgacatcgagcatctcgtgagaaatgtgttcttttttatcaagatagcgctgccagaaaaaatgggcgattgccatgcagataatggccgcgatggagatcggcagcgtggttttaaaagcaaagtcgatcagcggcatttcagcggctttggccgccaggacgacgtcacccgaggtcggcgagaggataatcgccgccggtgaggcgcagatggcggcggcggccccgcggctgataccgacattcaccattaccgggaacagcgtcgccatcagcagtacgccaaggccggtcgcggaggagacggccagcgacatcaggcaggcgacaaaataggcggcaatcatcagcagatagggcgaattaatatagcgcaacggcttcgacgctaatttgaccaccatatcattggcgccaatatgggtcatataggtggcgaagccgcacagcatcatgatcatcatgcccagatcgccgccgcggctcatgagtagaatcttaatgtattcaataatatcggtagcggaataaccggtgctcgcggtattacccggtaacactttatgtcccagcagggcgctgacgatcagtaagattaagcctccgacgaacagcaccccggtggccgagtagcctttaatgatatagcgggctacgcccacaatgaccacaatccctatcaggatctcaataaacgtcagcatttattacccctaaacccaaagaatatgtagataaaaagcaccacaccaaattttaatgtgcgaatgtgccgaaaaaacggacaaaactcgctgatgcaaatcaataaagcgataagaactacacgtcccccatcacgcctggatataatcaccagatggatagttaagccgttctgatggacagcgggcgaaaatcaggagtttgccttatttcgttcaacctgcattgagattatctttgctattttaggtggtttttaaatcaaagtggtaatagaaaagtgttgatgttacgtcgtttttcattgttttctcttggttttttaggatggttattggtgtccggaaacgccagcgcgtcgttttcatcgacccttagcgaaggttaccataccttaagtaataacgtagcgcagacctggaatgagccggagcactatgatttgtacgttccagccatcacctggcatgcgcgctttgcctatgacaaggaaaaaaccgataagtataacgaacgtccgtggggggcaggtttcggcgtctcgcgctgggatgagaaagggaactggcatggcctgtacctgatggcgtttaaagactcttttaataagtgggagcccatcggcggctacgggtgggagaaaacctggcgcccgctgacggaccagaatttccacctcggccttggctataccctcggcgtcacggcgcgcgataactggaactacatcccgattccggtgatcttgccattggcgtcaataggttacggtccggcaactttccagatgacctatattcccggcacctacaataacggtaacgtttacttcgcctgggcgcgcttccagttttaattcgctaaatcttagcaataaatgagataagcggaaggtcttgtgcaaaaacaaggactaaagcgttacccactaaaaaagatagcgacttttatcactttttagcaaagttgcactggacaaaaggtaccacaattggtgtactgatacccgacacagcattagtgtcgatttttcatataaaggtaattttgatgtctaagattaaaggtaacgttaagtggtttaatgagtccaaaggattcggtttcattactccggaagatggcagcaaagatgtattcgtacacttctctgcaatccagtccaacggtttcaaaactctggctgaaggtcagcgcgtagagttcgaaatcactaacggtgccaaaggcccttctgctgcaaacgtcatcgctctgtaagcaacgcgtcagtagaatataaaaacccgctaataagcgggtttttttttgcctgtctccttcgcttttagcggctggccgcctgcgagaaaagccagaaggcgagcgccgtcatcgcaaacgaacccagcaaattcaccgcgacgttgagcagcgcccagcttacccggccctgctgcaggagaaacaccacttccgcagaaaaggtggagaacgtggtcaggccgccgcagaaaccggtggtaatcagcagtttccacatcgggtcaataccggtcagacgattaaaccacgccagcccggcgccaatcacaaaggcgcctaacaggttggccgttagagtcccaatcgggatagcatgatgcacaggattgagcttcatgccgagccaccagcgcaatacgctgccggtgccgccgccaataaaaacggcgcaaagaagttgaaacacggtcgtttcctgctatttgatgtaagagagtgtcaagtgtagcgcgcatcgggcgcgattggctatccataacctgacgggagaagaacatgcgggtagcggcaggacaatttgccgtcacgccagtatggcggacgaatgcgcaaacctgtgtggcgatgatgcagcaggcggagcgagaaggggcggcgctgctggtgctgccggaggcgttgctggcgcgggatgacaacgacccggatctgtcagttaaatcggcccagccgctggatggcgcatttttgcagccgctgttggctgagagcaggcgtaacagcctgaccacggtcctgacgctccatgtgccgtcaggggaggggagagcgaccaacacgttggtggtattgcgggaaggcgcagtgattgcccattatcataaacttcatctatatgacgccttcgcgatgcaggagtcccggcgggtggatcccggtcagcagatcccgccggtgattgaggtggcgggattacgcgttggcctgatgacctgctacgatcttcgctttccggaactggcgctttcgttggccctgaatggggcacagctgctggtgctgcccgctgcatgggtgaaagggccgcagaaagagcatcactgggcgacgctgctggcggcacgcgctctcgatactacctgctatatcgtggcggcaggcgaatgcggaacgcgcaatatcgggctgagccgcatcgtcgatccgctggggaccactctggcgggggccgggagcgagccgcagctgatctttgccgatctctcagcggatgaccttgcgcgcgttcgcgagcgtttgccagtgctgcggaaccgacgatttgcgccaccgcaattattatgacgtttttttaaacaaggcttgattcaccttgttacagattgctattgtgtccgcgcgtcaaatacccgtattgtttatcccaataattcgctgtgcacgtcaggatggacatctcagcgctcactcccggaggggaggctatgggccgaaacacgcagcccacgcacaggtggattacaataggacggataaatgcgtgtatgatggcgtattcgcagcttgtatagagaagaaggttagctatgggtgagattagtattaccaaactgctggtagtcgcagcactgattatcttagtgtttggtaccaagaaattacgtacgctgggcggcgacctggggtcggctatcaagggctttaaaaaagccatgaacgaagatgacgatagcgcgaagaaaaccaccgcagaagaagaagcgccggcgcagaagctctctcataaagagtaattctccggctgcgtctcctgacgggatgctggcggtacggcgaagaggccgcgacgtttatcgttgcggcctttgtcgtttttgtcgacgccgcggagaaaagatgcaactaactgttacggacaggcgaaacggatgaagcggagagagccgctgcgccgaaaaggcgcgcagcggcggaagcggtgggttatttaacttccatccctttagcctgcaggtcggcatgataggaagagcggacgaagggaccgcaggcggcgtgggtgaagcccatcgccatcgcttccgctttcatctcttcaaactcttccgggctgacgtagcgctgcaccggcaggtggtgacggctcggctgcagatactggcctaacgtcagcatggtgacgccatggcgacgcaggtcgcgcatcacttcgatgatctcgtcgttggtttcgcccagacctaccatcaggccggatttcgtcgggatctccgggtgcgcttctttaaaacgctccagcagcttcagcgaccagttgtaatccgcgcccggacgtacctgacgataaagacggggcacgttttcgaggttatggttgaagacatccggcggggtcaccgtcagaatatcaagtgcgcgatccatgcggccgcggaaatccggaaccagcgtttcgatcttaatcgacgggtttttctcgcgaatggcgctgatgcagtcggcaaaatgctgtgcgccgccatcacgcaggtcgtcacggtctaccgaggtgactacgacatagcgcagacccatatcggcgatagtttgcgccagcttttgtggctcgtttgcatctggcgcgaccgggcgtccatgcgcgacgtcgcagaacgggcaacggcgggtacagatcgcgccgaggatcataaaggtcgcggtaccgtggttgaagcattctgcaaggttcgggcaggaggcctcttcgcacacagagtgcaggccgttcttacgcatcgctgctttgattccctggatacgggacgagtctgccggaagtttgattttcatccattccggttttctgagcagagcttcacgctcagttgccacgtttttcaccgggataagggccattttatcggcgtcgcggtacttaacaccgcgttccatcacaatgggtttactcatagcgtgcgtgttccagttgcgagtcacgaaggaaagcgaattaattcaatgaaatgttgcaattatcaactatttttgaatcaagagcaggcagtataccattgaaaaggggcagaaagcagcctgcctgcccggcaaattgtaaaatagttgttgttttatccttttcccttccgtgcgctacgccttaaacgagcggatcaccgtctcgatgatctctttcagcaatggctctttcccgctcagcttattaaagtgcagcgcaacgtcaatctgctctccacccagggaagggaaatccagggtctgcagcggccagagacgggacaccatggcgaacaggcgttcggtggtcagacccagcatatcgctcccggcgatcatcgccgcctgggtcatcaggttaaaggtgctaaagccgcagcggcgctcgcccatctcttcctgtagtcggcgatggagggtggggtagcgctggccttccggcagcagcagcgcaaattcgtactccgcgagggtcgtttcatcctgcggaccgtccagggcgggatgccctgcgcggcagtacatctgtacccgatcctgatacagcacatgatggcttatcgcctggccgctgtgcaggtgggtatcaatgagcagatccacctggcgctggtcaagctgccgcgcggcgtcgacgatggcgatattgtgcaacaggatctgcgggaaggtcggcttcagcgcgctggccaggccaggcatcagcagcgctcccatcgctggcgtagtggcgatagtgatcacgcgctgctggtgcgggctaccggtgatatccagcgcgctgaggaaagcttccatgccgcggctgatgtattgatgaagatgggtggcataggcggtgggggtgacgccctgtcctttgcggataaatagcggatcggggaacaacgcccgcagtttgttaattgactggctaatcgccgagggtgtgatattgagtatcttcgcggcgttgacgatacctttatgtacgtataccgcttcaaagatcgtcaacagattgaggtcaatattacgcaggatgcgaaacatttgacgatcgtaacgttcatcctgtctgtcaggagattctgacggaggcgtattctctggcacgcgatgagtccggttgggaatgataggccaagtatagcggcccaccgcgttgccgtgcgtgacaattgattgcaaaaataacgtgttactcgtttagcgccccgctgacagcgggacgttggcctgccgcttaatcccggggaagatattcgtgtggtggatgatttagcagcgccagcagattggcgaccagtcgcggagcgaccgtctccggggaggctgccggctgccactggcgcatttgcgtcatctccataccggcatagccgcaggggttgatacgcaaaaacggtgtgagatccatggcgatattaagcgccagaccgtggaaagaacaacctttacggatccgcaatcccagagagcagattttgcgttcgccgacatagacgccaggggcgtcggcgcgggggtgcgactcgatactatattcagccagggtattgacgaccgtttgctccagtagcgtcaccagctcccgcacgcccagcttacggcgcttgaggtccaacaggacgtacatcacctgctgtcccggaccgtgataggtgacctggccgccgcgatcgctctggatcaccggaatatcgccgggcaccagcacgtgttccgctttgccggcctgaccctgggtgaatacggggtgatgttccaccagccagatctcgtcgagggtatcttcatcacgggcgtcggtaaattcatgcatcgcctgcgagacgggttcgtaaggttgcaggccaagctgccggataagaattttattgtgctgcaaaacaacatctccgccgggaagagagaattcaggttggggagtatatcacagccgtgcagaagggaatgagaagacccggcacggcggccgggtcagggaaaaggttacagcaccatccgaacgatatcgatattgcctaactcttcgtacagcgtttccacttgttcaatgtgggtggcgttgatggtgatggagaccgagtggtagttacctttgctgctcggttttactgacggcgagtaatcaccaggcgcatggcgctgtaccacttccaccacctgatcaaccagctccggcaacgcctgccccattactttgtaagtaaatggcgtagggaattcaagcagttcgttaagtttggttttcatgtcagctccggtgttacgacaaaataataactcccaccaagggcgggagttatcaggttacttggatgaatagtatatggggatggaaatcacactttcaagtgttcgatttttaaccaaaccagtggtggaacattaatttaatgtaatcaataattttgccgaagaaattaccttccggaatttcctgcaggaccaccagcggacgctggtcgatggttttaccatccaactggaagttaatggtgccgacaacctggtttttctgcagcggggcgtgcagctcagtgttattcagcacgtagctggctttcagatctttcattcggccgcgcggaatggtcaggtagacgtctttatccacccccagcgaagcgcgatcgctgtcgccgaaccaagccggttcagaggcaaactctttgccagctttaatcgggttgacggtttcgaagaagcggaagccccaggtaagcagttttttgctttctgactcacggcctttgaacgtccggccgcccattaccgcggagatcaggcgcatctggccttcggtggcagaagcgacgaggttgtaacccgctttgtcggtatggccggttttgatgccgtcgacgttcaggctgttatcccacagcaggccgttacggttcagctggcggatgccgttgaaggtgaactctttctcacgatagatggagtactcgttcggtacgtcgcggatcagcgcctggccaatcagcgccatgtcgcgcgcggagctgtactgtccgtcagcatcaagaccgtgaacggtctggaaatgggtgtttttcaggcccagagcgtttacgtagttgttcatcaggctgacgaaggcgtcctggctgccggcgacgtagtcggccatcgccacgcaggcatcgttaccggactgtaggttaataccacggatcagctgagaaaccggcacctgcatgcccggcttgaggaacatcagagaagagcctttgaaaaccgggttgccggtggcccaggcatcgttgccgacggtgaccagatcggactctttgaatttgcccgctttcatcgcctgaccgataacatagctggtcatcattttggtcagactggccgggtcgcggcgggagtcggcattgttttcagccagtaccttgccagagttgtaatcgataaggatccaggattcggcgtcaatctgcggggcgcctgggatcatcgttttgatattcaggtcatcggcgcgggcagcggaggagagcgctgcaacggagagcgccgtaatgagtaaacgagcggtgaaagaggtcttcatggtcagaacaacggcatccgtgatggagttaaaaaagtgccttactatagcaaatgctctgcgggccagcatccgacattgcgcatgagtttgttaatgacttttacatgcgcgaggtgaacgggcggcccacggcgtttagttggcgcgagtaataaaggactgcagctgcgcttcgctttgcaggcgctgctgcacggcgctggcctgtgctttatcagcaaagggacccagctgaatacgccagaccgcgccgttttgcatgacccggcctggcacagaaaactgctggctcaggcgctgctgatactgctgcgcccgcgactggtcgcttactgcgcccacctggacaacaaaattaccgctggcgctggaggtcgcggaggacgaggccgccacggcgccagcggctgcggcgatggccgcagcgggcgccacattaccctgaatggagccaggcgcggtcactggcgctgttggcgtggcgccggcggcaggagccgtcgcggcggctgccgctggttcgctactctccagcacgccgttgttcaggggcgtcggcgcgccgaggaaaccgccgctgttcaccggcgcgcccacgctgtctgccggcgtcagcgtgctgttgctgatcgggcgaacgtcagtgggcgcgggctggctcatgccagcggcgtccccaccgtccagattcggacgggcgggcagggcgtaagtctgtttggcgacggtggtacaggccatccccgggccggaaagcgaaccgtcaggcgcgacgatgatggggtcgatgcgcactttggtgttgttggaggtgttcaggcggtcagcggatgcgcgggaaagcgagatgacccgatcgttgccatagggaccgcgatcgttaatccgcacgacgatcatccgtccgttggcaaggttagtgatccgcgcgtagctcgggatcggcagcgtcgggtgcgctgcggtcaactgagtcggatcgaaggcttcgccgctggcggtcaggttgctgttgggttcagcgtcatagatcgccgcgaaaccggtctgagtaaagttggccggatcctgaacgattttgtagcttttaccgtcgcgctcataatcctgattcgccgtggcgttcggcgtttcatactgcggatcggcgccgctgatctcaaccgtcgggccattacagacggccggctgtggagtactgacagttttttgttgcacgtcatcactcgaacatgccgccagcagccccgctgctatgcagatccccagccattgcttacgcattgctaacccctttaaacgcttttcgacaacatttttctgtgggtatggatcgacattacgataccaaacccggccatcagtacgatcagggcggagcccccgtagctcaccagcggcaacggtacgcccaccaccggtaaaataccactcaccataccaatatttacgaagacataaacgaataaaatcaacattaaaccaccggccatgacccggccaaaggtggtttgcgcctgggcggcgatccacagtccgcgcataatcagcagaatataaagcgctagcaggatcagtacgccaatcaggcccagctcttcggcgaggacggcgaagataaagtcggtgtggcgttccggcagaaactccagctgcgactgggtgccgtgcagccagcctttgccgcgcagaccgccggagccaatggcaattttagactgaataatgtgatagccggcgcccagcgggtcggtttccggatcgaggagcatcatcacgcgctgacgctgatagtcgtgcatcaggaagaaccacaggatcggaataaaggcggcgaccagcaccacggcgataccaatcaggcgccagctgaggccggagaggaacagcacaaacagcccggatagggcgatcaggatcgaggtcccgaggtcaggctgcgccgccaccagcagcgtcggcaggaagattagcaccagggcaatgccggtgttcttcagcgacggtggacagacatcgcggttaataaaccgcgccaccatcagcggcacggctattttggcgatctccgacggctgaaagcgcacaataccgagatccagccagcgctgcgcccctttggagatggcgccgaaggcgtcaacggctaccagcaggatgatacagaaaatatagaggtagggcgcccagccttcatagacccgcggcgggatctgcgccatgacgatcatgatcaccacgcccatggcgatctggccgattttccgctccatcatgccgacatcctgaccgctggcgctccagataaccagcgcgctgtaggtcagcagcgccagcaggataagcagcatggtggggtcaagatggattttatcccatagcgattttttgttcggattatccgtcattattgatcctcccctgcggtaaccgccgggttttcgcttggcagcgtagtgttgttatcgcccagcatgatgtgatcgaggatctggcgcataatcgtaccgaccgccgggccggcgccgccgttttccagaatcatcgccacggcaacctgcgggttgttataaggcgcaaacgctgtcatcagtttatggtcgcgcaagcgctcggagatccggtgcgcgttataggtttcgttggccttcaggccgaacacctgagcggtacctgacttggccgcgattttatacggcgcgctggcgaagtatttgtgcgcggtgccgttgccgcggttggccacgccgtacatgccgtctttggcgatttcccaatagccggaatggatatcgcctaccggcggctcatggggctggacccagggtacgggcttgccgtcttccacggtgctctgcagcagatgaggcaccttcaccacgccgtcgttaatcaggatcatcagcgctttgttcatctggatcggcgtggcggtccagtaaccctggccgatgcccaccggaatggtgtccccctggtaccagggtttcttaaagcgcttgagcttccattcgcgggtcggcatgttgccagagcgctcctcggagaggtcgataccggtgtagtggccgtagccaaacttgctcatccactctgagagacggtcgatgcccatgtcataggcgacctggtagaaataggtatctgcagactcctcgagcgctttggtgacgttcagatggccgtggccccactttttccagtcacgatagcgtttctctgagccaggcaactgccaccagccggggtcgaagaggctggtgttgcgggtgatcaccccggcgctcagcgccgagacggcgacgtacggtttgaccgtcgacgccggcggatagaccccctgcgttgctcggttgaccagcggtgtgttcgggtcgttgagcagcgcggagtaatctttgctggagatgccgtcgacgaacaggttcgggtcatagctcggggttgaaaccagcgccagaatagcgccggtacgcgggtcggtcaccaccacggcggcgcggctgccggccagcagcgtttcaatatactgctgcagcttgaggtcgagggtgaggtagatgtcgcgtccggcctgcggaggcacctctttcagctgacgaatgacgcggccgcggttgttcacttcaacctcttcgtagccggtctgaccgtgcagaacgtcctcgtaataacgctctatacccagcttaccaatgtcgtgcgtcgaggcgtagttggccagcttgccctctttatccaggcggtcgacgtctttatcgttaatttttgagacatagccaatgacgtgagtcagcgccgaattataggggtaataacgacgcttgtagcctttgacttccacgccgggaaagcggtactggttgacggcaaagcgggccacctgcacttcgctgaggttgacctttaccggaatcgaggtaaaacgatgggagcgggcgcgctcctttttgaaaccggcgatgtcatcgtcagttaaatcgacgacgtcgcgtagcgcatccagcgtctgctgtacgttatcgactttctccggcatcatctccagctggtaaatggtgcggttaagcgccagcggggtgccgttgcgatcgtaaataatgccgcggctcggcgggatcggcaccagcttgatgcggttttcgttcgagcgcgtctgatagtcgtcgaagcgaacgatttgcacattgtacaggttggcgatcagaacgccggtaagcagcaaaatccccaaaaaagcgaccagcgcccggcgcacgaacagcgaggattcagccgtatagtcgcggaaagaattctgtaatttcattcgctgcttagtctaccctgatcatcattactcacggtggtacgggtggttggtggtgatgctccacgcccggtacagactctcggccaccagtacgcgcaccagcgggtgaggtaaggtgagggtggagagcgaccaactctgttccgccgctgctttacaggcgggagagagaccttccggaccgcctaccagtaaactgacgtcgcgcccgtcctgtttccagcgttccagttcgcgcgccagctgcggtgtatcccatggtttacccggaatatccagggtcacgatgcggttcttaccggcagcggctaacatcatctcgccctctttttcgaggatgcgtttgatatcagcgttcttaccgcgcttaccggcagggatctccaccagctcgaacggcatatctttgggaaaacggcgcagatactcgctaaagccggtctgtacccagtccggcattttggtgccaacggccaccagctgcaacttcacgcattaactccagagtttttccagctcgtacagacgacggctctcttcctgcatgacgtggaccatcacgtcgccgaggtcgacgacgatccagtcggcggcggcttccccttcaacgcccagcggcagcatgccggcggcgcgggactcctgaaccacgtggtcggcgatagacatcacatgacgcgtggaggtgccggtgcagataatcatgcaatcggtgatgctggatttgccatgtacatcaatggcaacgatgtcctgacctttcaggtcatcaattttgtcgataacaaaatcctggagtgctttaccctgcaagtgttccccctgggtgcgtgaagattgataatcataaagagcctgacagtatacctgaactgatgaaaaagtcgggtgaaatgtctgtcggcaggcgttcgtggcgggctatcatcccatccctcgccgcggattgcatcgccatttttgtaaaacaatttctgcaaaccggctttggcggatgctgcctggcagcggagaataacagcctgctctggcctgtcaatggtctggcgggaattcttcttgcggccgccagacggcctggctatttaatacccgcagggtggtgaaatcgtcgcggatttcgaggaggctccaggcgccatgggcaatgggaaagtgccacatcgccgccgcaggcatctgcaacagcagggcggtcagcaggctcaggacgccctgatggccgacgatcagcagatggtcaagatggcggcagtcggtcagcgttgggataaactcgctgacgcggcgggcaaaattctgaaagctttcgccgttggtgggggccgcatgctgccagtcggcacaccaggcggcatagttttccgcatcttctcgctggaggtcgcgatgatgacgcatctcccagtcgccgaaaaacatctcattgagcgcgggatggcgctcacgcggaatagcgcggtcgccaagcagcagatcggccgttgtcccggtccgcgccagctcgctacagaatactttatcgaaaggcgccaggcgcagtcgttcgccgagcgcgcgcgcctgagcgacgccgcgcggcgtcaggggcgttggggcatggccgctgtataacccggcaacgttggcttcggtttcgccatggcgaactaaccacaatttcatgaacaggctctgacaggcgatgaagagatggcgttacgatagcgcttttttcgcgccaggcccagcctggggtcagcaatagagtccctgctcgcggatgtaatccagcacggcggcgggcagcatctcggcgcaggactcgccgcgctcaaggcgctggcggatgatcgtcgcggaaatatcgaaccacggcgtctcagccaggtagatcacgccggaagggcggttatgcagagactccacgtcgtgggttaaatggcgatccagccagcgctgatccgcttcctgcgccatggtcagcgggtaacccgggcggcggcaaacaatcaggtggacattgtcgagaatggtttcatagttgtgccaggtgggaaaggtcagtagcgaatcctggccaatgataaacgccagcggtttgcgcggtccctgctcctggcgccactcctgcagcgtttgcgccgtccaggagggggtatcgcgccgtagttcgcgttcatcgagcgtgaacagcggtttatcggcaatcgccagcttcagcatgtgcacgcgctgggcgctggtggcttccggctgcggccggtgcggcgggacgttgttaggcatgatgatgaccttgctcaggccaatctgattcgccaggatctcaaccggcttgaggtgaccgtaatgcaccggatcgaaggtgccgccatagattgcctgtaactgagtcatatcaaccatcaataaaaacgtccgccagggctttgtggcagagcaacaacgaaagactttccagttcgggccagacgtcgtgcccgtaatcctgtttaaaggtgagctccgcgcgggtcagaagggtcaccgcctggcgtagctgttccccgctcaggcgcgtgagagcgtcgctgagcagctgacggcggttttgccagacccgatgtttatcaaacagcgagcgcagcggcgtgtgcgtcgcctggcgcttgagggtaaccagcagcagcagctcccgctgcagagtacgcagcaggatcgccggctcgcagccttcaaggcgtaactgctgcaggacgtgcagcacgcgcttacttttgcctgccagtagggcatcgacccaatggtaaggcgtaaagtgcgcggcatcgtttaccgcttgctcaacgcggggcagggttagcttaccgtccggccagagcagcgccagacgctccagcgcctgcgccagcgccagcagattgccttcgtaacagtagcacagcagctgactggccgcgtcgtcgagctgcagctgatgctgtttggcacgggcggccagccagcgcggcagctgcgcgtattccggcgtctggcaactgacctggacggcgcgctgagccagggcggtgagccatgcggcattctcctgggctttggtcagcttatttccgcgaactatcagcagcaggtcgtcgtgcagcaggccaaccagcgtggcgagctgttcattgatcgccgcgttggggccgttttccggtaggatcaacagcagggtttgccggctggcaaacaggctcatcgcctggcttaaggcgaaaatcgcctgccagtcggtgctgttgtcgattgaaaaagtatggtgctcggtaaagccctgcgcggcagcagcttcgcgaatggcgtcctggctttcctgcaacagcaggggatcgttgccaagcagcagataggccgcgcgcagcccttcagtgagctgcgcgcggagctgttccgggtacaaccgaatcatcattgacccagcgtggtggagacgcggttacccgaggaagccggcgccgcgctgctggcgaccggtttctcttcctgctgggttgcttcaacatccgctacctgaacgcttggcagcttacgaatcagctgttccgccgctttgtcgtacatttcctggataatcatatcctgctcggcgtctttcgctaatgccgcctgcgggttatcaaagaacgaccgatagaccttggtggtaatcggatagatatcgtgacccgggatcaggacgctggcatgaacggtcatgaccatctgatactccgccgtacgaccatcctggaacaccgatgcggtatctttctgaatcgacgagccatcgaggcgcagagaagggacatctttacgcagcgtgctggcgtcgatcagttccacgccgttaagacgcagctgattacgtaccgcgcggcttaacgggccgttcggatcgctcgactggaaaatcatggttttcatggtggcgggcaccttggtagtgctacgcaaatgccagccacagccggcggtgacgagcaccgccagagataacaacattgttaccagatatcgcacgcttcctcccgcgcttagccaacgaccagattgagcagtttacccggaacgtaaatcactttacgcacggttttaccgtcgagatatttcgccaccagatgttcctggccggcgcgctcgcgaacctgctcttcagttgcatctaccgcaacggtaattttaccacgaactttgccattgacctggacgacgacgagggtgctgtcttccaccatcgcgctctcatccgctaccggccacggcgcgttgtcgatatcgccttcgccgttcagctcacgccacagggtgaagctggcgtgcggagtgaacgggttgagcatacgcaccaccgccagcagagcttcctgcatcagcgcacgatcctgctcatcttcctgcggcgctttcgccagcttgttcatcagctccatgattgccgcgatggcggtgttgaaggtctgacgacggccgatgtcatcggtcactttggcgatggttttgtggatatcgcgacgcagcgctttctgatcttcgctcagagccgccacgttcagtgccgcaacctctcctttggtggtgtgctcgtagaccagtttccagacgcgtttcaggaagcggttcgccccttcaacgccagattcctgccactcgagggtcatatccgccggggacgcaaacatcatgaacagacgcacggtatccgcgccgtagcgctcaaccatcacctgcgggtcgatgccgttgtttttcgacttggacatcttgctcatgccggtgtacaccagctcgtggcccgccgcgtctttggccttcacgatgcggcctttttcgtcgcgctcaacgatggcgtcaaccggggaaacccagttacgttcgccgttttcgcccacatagtagaacgcgtcagccagcaccatgccctggcacagcagctgtttcgccggctcatcggagttcaccatgcccgcgtcgcgcatcagcttatggaagaagcggaagtagagcaggtgcatgatggcgtgttcgataccgccgatgtagatatctaccggcagccagtagttggccgctttcgaatccagcatcccttcctgatactgcgggcaggtgtagcgcgcatagtaccaggaggattccataaaggtgtcaaaggtgtcggtttcgcgcagcgccggctggccgttgacggtggtcttggcccattcaggatcggctttgatcgggctggtgatgccgtccatgaccacgtcttccggcaggatcaccggcagctgatcttccggggtcggcagcacggtgccatcttccagggtcaccatcgggatcggcgcgccccagtagcgctgacgggatacgccccagtcgcgcagacggtagttaactttacgctcgcccacgcccatggcagccagtttgtcggcaatggcgttgaagcccgcttcataatcaagaccgctgaactcgccggagttaaacaggacgcctttctcggtcagcgcctgctcggagagatccggctcggagccgtcggcagcgaggataaccggcttaatgttcagaccgtacttgctggcgaactcgtagtcgcgctggtcgtgacccggaacggccattaccgcgccggtgccgtattccatcagcacaaagtttgccgcccagaccggaatttcttcaccggtcagcggatgaatggctttaaagccggtatcgacgccttttttctccatcgtcgccatgtcggcttcggccactttggtattgcggcactcgtcgataaaggtggccagcgccggattgttcgccgcagcctgctgcgccagcgggtgacccgccgcgacggccaggtaggtacaacccataaaggtgtccggacgggtggtgtagacagtcagtttgtcagcgtagtcgttgacgtcaaaggagatttctaccccttccgaacggccgatccagttgcgctgcatggtcttcacggtgtccggccagtggtccagcttatccagatcgttcagcagttcatcggcgtaggcggtgattttaataaaccactgcgggatctctttacgctcgaccttggtatcgcagcgccagcagcagccgtcgataacctgttcgttggccagcacggtctggtcattcgggcaccagttcactgcggaggtttttttgtacaccaggccttttttgtacagctcggtgaagaacttctgctcccagcggtagtattccggggtgcaggtcgccagctcgcggctccagtcatagccgaagcccagcattttgagctggtttttcatgtaggcgatgttgtcgtaggtccacggcgctggcgcggtgttgtttttcaccgccgccccttctgccggcagaccgaacgcatcccagccgatcggctgcaggacgtttttgcccagcatgcgctggtagcgggcaatcacgtcgccgatggtgtagttacgcacgtgacccatgtgtagtcgaccagaaggataaggaagcatcgacaggcagtaatacttctctttgctctcgtcttcagttacttcaaatgtacgattttcgtcccagtgaagctggactttcgattctatctcttccgggcggtattgctcttgcatggcagccagtggtcctgttttcaatacagctacaaagtgtagccaatggatgtgttatttcagatcggcatagcatagcccaaacgcccacgtcaaaacagcttttcgcacatcaacatcggcaaaagctgcgcagattatttcgcgactctgtggcttgtcagacacagcgggagaggaataaggtctattatcagaagacgttaaccccaccggaggcgaaatgatgaacaaggttgctcaatattaccgtgaactggtctcctcgctcagcgaacggctccgccatggagagcgcgatatcgacgcgctggtgacgcaggcgcgggaaaaaatcgtccgcgccggcgatctgacgcagagcgagatcgagtcggtgattgcggcggtcaagcgcgacctcgaggagtttgcccgcagctacgaagagagtcacgaagacgagagcgacagcgtgtttatgcgggtgatcaaagagagcctgtggcaggagctggctgatatcaccgacaaaacccagctcgagtggcgggaagtctttcaggatctgaatcaccacggcgtgtaccacagcggcgaagtggtcggtctgggcaacctggtctgcgagaagtgccactatcacctggcggtatacaccccggacgtgctgccgcgctgtccaaaatgtggccacgatcagttccagcgtcggcccttcgagccctaagcgtgcgaaaaacgatgcgcgaggcttcgcgcatcgtggtttgtcttatttcaccgtgttgacttcggtgctcttgaaatactgttttccacccatgtcgctaacatatttctgcgatgagttcagtaccagcttgtcagcagtgaacgtcccgactccgcatttcgccaggcccagtatgccgcaacttttaccaccattgaccactttggtggcggttaacgtcatgttgccgcccgcgctgagggttgaataattgtagatcgcgcctttatttttggtatttaaggtcaggtcgccggtgctgctgatctgcccttcgttggtgatatctgagtaggtcgtgattgaaatatttttggcagtaatattgccataattattcactacgccgtgatcggtggtgatatcggcggcattcatataaccattttggttcagccagtagctgtgggcggtaatggcgttggttgcctcaatacgaccactgctgctttgcgccagcgtgccattggtctgcagattgatattttcgccggtgatattgccgaggttatagatctcgcccgtattggcgctgccgtcctgtgtaagcgactgaatggtggtttggccagtagagttaatattgccggtgtttttaaagctgtcgccgacaaacgtcaggctggtgtgtttggcgctgattttgccttcattgaggaaatcaccgattgccgtggcggcaatctggttatttgacagcagggaggctttttcttcgttgcggattttcccgccgctggtcaggcttaatccactggtgccggtcatcgtgcctgagtcgccgttggtgatgttgccgttagcggtggcaatcagctggccgccggagagagaaccggtgttaacgatataatcgccactggagagcattaaataataggcgccggcgatgctaccgtcattggtgatgcccgtgacggtggaaacctggctcagcaaacctttgcccgttattgaccctttgttcagtaaattaccgttgctggtgagcatcagcgtgccgttggagataatagaacccttattacgtacgccaaagccgatgttattgccgaccatgctgatgctgttggcctcaatgccgccaaggctgctgacgtcgatgctgtactgcgggttaaccgtcatctggatcagggtggcctttttaccggcggaggtcaccgagccagagctgttatccatggtgaagttgcccgcgctgaccagggcgttgttggcctgcactttaccgttaatcttaatcgcgtcggcgagcagaaccgcgtagccgttggcggcgttcatgccattttcgccgatggtgagggtgccgcccgttacggtatagctgccgatggcgccatcgtcggtcatattaaccttgccggtggtcaggatagccttgttggtattaacaaagctacagccggaacaggtgatgccgttcgggttggcgattaccacatccgctttctgaccgttgacttcgataaagcccttcaggctactggcgtttttggaggtcacctcgttcaaaatcaccgaagcgctgccggcggtcagattattgttgcgggcgatattgccaaatgtgctgtggctgacatcatcgccgctgttattgaggatggtgccattggtgccgacgttgaagtcgcggtacaggttatgggagacaccggcggcgttcggcttttcaatatcgataaccgtggcgccggaagagtgcgtatagcttgtggggtcggcataaactaccgacgaggttaatactgccgccagtgcgacataagaagccttaaacttaaacattttctttattcctttaaataatgattaataaataatgtaaatatgacgagtcaataatgtgcgaattaatacctccactgtaatgaaaagcccatattcagggcgtcgctatgaaacttatccggtttactcagcggggtactaataaacagatcgtactgcgttgaccatagctgaccgcgcagcccgctgacggcgccggagagcactttgcctttttgatatagatcggcgccgataagacggcctatatccgcgcccaaatagaattgccgctcgtgggtggccagatcccagataaaatcgttgcgccagtaccatccctgattgccggacaggctgttttcaccgtcaaaaccgcgcacgctccagcgactgccaatattgaatttattatcggaagcgagtttgtccgggctgaactgggcgctgaggcggggagcccaggtaaatttgtcgccggtggcgtcaaatttcatcattgcctgcagattaccatgcacaatccgcgacagcgggctatacagcccggcctgctcttccggcgttgctgtcgagctgagccacggcaggctgcgctggatgccgatgctggcatcaacaatcttgttgttaaagtagtgctggtggttgagggtgaattcccatgaggggttctgcttgcgcatcaccagtagctcactgccgccgaagtaataatgcgaggtactcttggcgatccgcaggtcggcggtggttttttgctgccgggtgtgggagagcagacgactcagcgtggcgctgtagtagcgatttttactcttataatccatcgtcgaccagttgccgttaaactgctgacgatactggctgtatgccccgtaggcgcttagtgtccagtagccaaagggaatggagtaatacaggctgccgttgtggttgccgtcgttatgctgattgaattcaatatcgcctccgccggaaaggtacaggatatcgttgagggtggtcaggtcatagagatagagggccccgccggcctggtagcgtccgctggctttgctgccggcgtcgtcaagccaggcgccaagctgccattttttcgccaggctgcgggcgatctggatatcgctttctccctcgtgctggcccggcagcagtttcatgtgcgcggtggcgccgggcagacgctgcaggttggccatcccttgctcaaggtcgcttaagcgcaggatagtaccggaagaggtgggtagggaattccacaggcgggtggtgtccgagccgtcggcatagtcgatagcgcccactttgccatagtgcagcgtgagcctgagtatgccgtgctccagcgactgggagggcacatcaatcagcgaggtgatgtagccttgcgcgatcagctcattttgcaaggtataggccagcaggcgaatgccttcgctacccagacagcgtccctgcgcctgccgtgcggttttcgccagtaatttccgggtgagcgcctggttatcggagtcgatatcgacccggttgatcaatttgcaatgcgtttcctcaggaaaagggatcccctgcggcgccacgcgctgttgtgaagactgaaaatcctgttgctgcggcgccagcgcctcctggcgggctttatcctgctccgtctggtgagtagaagaggccaatggcgcggccccggcggctgaggtgcccgccagcgtgataaacagcagcccggtgagcgtgcgagatcgaattaacatgaagcaatatccatttgtttcattggtttggtggcgcatccattattctgcgagcggcagagaatattgatggcctttatttcggcgcaggcgaggtcaggcaagaatattatattcaattaataaaataatcgtgcgacgaacctgttacgaggcgttatatgctagcggcggtggcaaggccggtccacgaattcattattgaattctttatgaattgatcgatttaataaataagttcagcttttatcgcccaggtttattgggtacgtaaatgatagtagcgataatccgccgcataaataacattggcgaataatatggcggaaaagattaactgcgcataccgggcggtatgcgcagagaaaaaccattaatggagtattttggcgaggaaatctttggcacgctcggattgcggattggcaaagaaggcctctttatcggcatcctcgacaatcttcccttcatccataaagatcacccggttcgccaccttgcgggcaaagcccatctcatgggtcacgaccatcatggtcatcccctcgttggccagttcaaccataacgtccagcacctcgttaatcatctccgggtcaagcgctgaggtgggctcatcaaacagcatggcgattgggtccatacacagggcacgggcaatggccacgcgctgctgctggccgccggagagttgcgccgggtatttttccgcatgcgccgccaggccaacgcgctccagcaacttgaggcctttcttgcgcgctgaggctttatcgcggttaagcactttgacctgcgccagcgtcaggttgtcgataatcgacagatgcgggaacagttcaaaatgctgaaacaccatgccgacgtgcgagcgcagtttagccaggttggtctttttatcgttaaccacggtgccatcgacaataatctgcccctgctgtaccggctcaaggccgttcacagtcttaatcagcgtggatttaccggagcctgacggcccgcagaccaccacgacttcgccttttttcacttccgtggagcaatcggtcagcacctgaaagtgaccataccattttgaaacgtttttcagggtaatcattacacagtccttttcttcaaccagctgaccaacagcgaggcgctgaggctaatcacaaaatagacgccgcccgcgaacaggatcatttcgacctgggttccgtcacgctcgccaatggtggaggcggtacggaagaagtcggcgagactcaatacatacaccagcgaggtatcctggaacaggacgatcccctgggttagcagcagcggcaccatggcgcggaaggcctgcggcaggatcaccagccgcattgactgccagtgggtcatccccaacgccagcgcggcgctggactggccgcgggagatgctctgaatgccggcgcggataatctctgaatagtaggcggcttcgaacatcgaaaacgccaccatcgccgagatcaggcgaatatccgttttcggcgacagtcccagcacgttctgcaggaagcccgggacaatcaggtagaaccacagcaggaccatcaccagtgggattgaacggaatacgttgacgtaggatttagcaaaccaggccagcggcataaagctggacaggcgcataaccgccagcagggtgccccagacgatgccgaccacgatggcgatcaccgtaatcttaagggtgatcaccagccctgccagcagatagggcatggagggaacgatcgaactccagtcaaaatcgtacattatttgcctcccatattgccaggcaggcgaaccttacgctcgaccacatacataatcagcataatcaccgcgttgatgaaaacataggccagggtgatggcggtaaaagactcccaggcatgagcggagtagtccagcagtttgcccgcctgcgcggccatatcggccagaccgatggtggaggcgatggccgagtttttcaccaggttcatcatctccgaggtcatcggcggcacgataacgcggtaggcgttcggcagcagcacgtagcggtaggtttgcggcagggtcaggcccatcgccaggccggcgttcttctgcccgcgcggcagcgactggatggcggcgcgtacctgctcgcagacgcgagcggcggtaaacagccccaggcacagcctggaggagacaaagaattgaatgtttgggtccagctccgatttaaaccacatgccgatattttccggcaggaactccggcaccaccaggtaccaggtaaagaactgcacgatcagcggcacgttgcgaaacagttcgacatagcaggtgccaatgcccgagaggaagcgattgggtaccgtgcgtaaaatgccgaacagggagccgacgagaaaagcgatgatccaggccgagatggagagggcgacggtgatttgaaaaccgctccacagccagcccaggtaggtagtgttgccgaagggggcctgttgcaggaatatcccccagttccagtctattgacatacatgactcctggaaaaaaaagggtagccagtgctaccctcgaagacggttgtccagcttgtttcggtattcgcggcggctggggaacgaccagccgccgtatagtctgtccgtgctgtgacaatcatcgggagggcaggatatcccgcccctggttgttataattagttcagtgctttgtcgttaggtgatttgaacagcgctttcatgtcgtccgacagctcgaagttgaggttaagattttttggcggaatcgggtttttgaaccatttgtcaaaccacttctccgcttcgccagaggtctgagcctgggcgacggtttcatcaaccagcgccttgaacgtcggatcgtccttccgcagcatgcagccataggcttccttcgactgcggggtgccgacgatttcccagttatccggtttcttcgccttggcgcgttcgccagccagcagggcatcatccatcataaaggccacggcgcgtccgctctccagggtgcggaaagagtcgccatgatctttggcgctgataatgcgcatattcatttttttctcattgttcagcttatgcagcaggatctctgaggtggttccggaggtgacgacgaccgctttatccttcaggtccgggaaatctttgatcgggccgcctttcttcaccagcagacgggtaccgaccacgaagatggtatcggagaaggccgcctgtttctggcgctcaaggttgttggtggttgagccgcactcgaaatcaaaggtgccattctgcagcaacgggatacggttctgcgaggtgaccgggatcagtttgacctgcagatcgggtttgttcagttttttcttgatggcatcgacgatggcgttggaataatcctgagagtagcccacaaccttctgctggttatcgtagtaagagaacgggaccgaagattcacgatggccgacaacgataaccccgtttttggcgatcttatccagggtgttctggccagccgccggggcagcatcttccgcctgcgccagaccagcggtcattcccattaccagcattgccgtggccagtttacgtaattgcatatccaactccttatccgcagcgtcagcgacgctattgatacccattgtgattgtgtgtgttgttattgggggcacgcatccacgtgccgcatttgtatgtgtttgttagcatttagtttggcttaatgtaaagattttgctgctttattgtttatttttgcgaagcgctccgcaccaatcggaggcaaatatcttccattgcaccaaaatagcgcgaccaccgatcgtttctggtgcaacccggttgcactgggtcggacgatgccgctaccaggttaaataaagcaatgactgtgccagagtggcagatgatgggaagaaaaagccggcgacgggcgtcgccggcggagaaacttatcggcgacgctggcgcaggctcatcagcagcgcggcgaaaccaaacagcgccgtcagcgcccatagcggccagttgccggtgcgggcgtaaggggttaagccgctggtgggggtcacggtggtggtcaacacctcgcgggtaaactgcgggatcatcttctggatctcgccgcgcgggccgatcaccgcagtaatgccgttgttggtgctgcgcagcagcgggcgggccagctccagggcgcgcattcgcgccatctggaagtgttgccacgggccgatggacttgccgaaccaggcgtcgttggagatggtcagcaggaagtcggtgtccggccggaagttatcccgcacctgttccccgaggattatctcgtagcagatggccgcggtcagcttcaggttatgcgccatcagctgcggctgcacgtaggggccgcggctgaaggaggacatcggcaggtcaaagaacggcgccagcggacgcagaatcgactccagcggtacaaactcgccgaacggcaccagatggttcttgttgtagcggttggtcgagtcgtagcggtacgggttatctttgccgagagtaatgatggtgttgtaggtatcgtaacggttctgcttgttgagacgcgcatcgacaatgccggtgatcagcgagctgtcttttgcgcgcagcagatcgtccatcatgctgaggaactgctgctggttgatctccagatccgggatcgccgattcaggccagataatcagctgcgagtggccgatatgcggctgggtcagcgccaggtaggttttcagggtattgaccagctgcttttcgtcccatttcatggcctgtgggatatcgccttgcaccagcgagacctgggtcgcgcgcgccggcagcagctgataccactggatatagcgcagcgggaacggcagggcgaacagcagcgcggcaatcgccagcggcttccagttgcgctggacgagagccagggccagcaggccgctgactaccatcagcaggaagttaatcgcctcgacgcccatcaccggcgcgaggcctttcagcgggccgtcaatctggctgtagccgaactgtagccacggaaagccggtcagcacccagccgcgcaggaactcggtgatttgccagacgacaggggcagcgatagccatccgtatccagttagttttaggccacagacgggcgagcaggccggcaaacaggccggtgtagagcgagagataggccgccagcagaacgacgaggaagacgttaaccgggccgggcattccgccaaactgcgcgatgctgacatagacccagttgatacccgtgccgaacagcccgagtccccagaaatagccgatcccggcgctttgcagcgggcgtcggttgagggttaacgcctgcagaccgatcagcgaaacgatagccgctggccagaagtcataaggtgaaaaagccagcgttccgctggctccaaacaacagcgccagcaacagacgtatgcgctggcgttcaagaagagaggcaaataccatttaggttaatcgtcccgttaattaacgcctgctgctacaggctattctttttgccagccggacgcggggcacctacaaccgtgtatgactcgcggtctcccggctggccatttcagcgctaccgcttactcttccagcttcggctggggagcgtcatcgggcagctttacatgcacctgaatgatacgacgactatctgccattgctaccttgaattggtaaccatcaatgtcgatagattcgccgcgggccggcagatggccgaaggcctgcatcaccagcccgccaatggtatccacttcttcatcgctaaagtgcgtgtcgaaggcgtcgttgaagtcttcgatggaggccagggcgcgcaccgtccaggtgtggcggctcagctggcggaaatcgatatcttcttcttcgtcgtactcgtcttcaatttccccgacgatgagctcaaggatatcctcgatggtcaccaggccagagacgccgccgaattcgtcaataacgatcgccatatgatagcgctgtgagcgaaactctttcagcatgcggtcgacccgcttgctttccgggacgacaaccgccggccgtaacactttttccatgctgaaggcttcggcgtcgctgcgcataaacggcagcagatccttggccatcagaatcccttcgatgtgatctttatcttcactgatgaccgggaaacgcgagtgggcggattcgatgatgacatccaggcactcgtccagcgtctggttgcgtttcagggttatcatttgtgaacgggggatcataatgtcgcggacccgctggtcggcgatatccattaccccttcgagcatgtcacgcgtatcttcatcgataaggtcgttttgcccggaatcacggatcagcgccagcagttcatcgcggtttttcggttccccgtgaaaaagctggctgagtaacagggagaaaaatccctttttgctgtttactgtgtcactactgtgtgaattgtcgtcgctcatggcgtcgtttgggttctcatgttgatttaactgtcgctcgtcgcgcgtaaactcagcgccggacggcatgggttgcctgactttctggcaggtaaaacgcagaaacagcggccggatgaggcgcaagcaccgccatccggctgggcgctattccgcaatcttctcggaaatgtacgggtcctcatagcccagagcaagcattatctctgtttcaaggccttccatctcttccgcttcgtcgtcttcgatatgatcgtagcccagcagatgcaggctaccgtgcaccaccatatgcgcccagtgcgcctccagcggcttaccttgctcgctggcttcctgctctaccacctgacggcagatgatcagatcgccgagcagcggcatttcaattcccggcggcgcttcaaacgggaaggagaggacgttggtcggcttatccttgccgcgataggtcaggttcagctcatggctttctgcaacgtcgaccagacgaatcgttaactctgactcctcctgaaacggcggaatgacggcgtcgacccagcgttggaaaagggcttcgtccggcaggccgctggtctctccgcaggccagctgtaaatcgaggatcacctgactcatttttgctcctgttcctgggcttcgcgtttgcgctcggcggccagctctgctttacgtttctggtctgcggcttcccatgcctcataggcgttcacgatgcgggcgaccaccggatggcgcaccacgtcttcgctatggaagaagttaaagctgatctcatcgacttccgccagtacttcgatggcatggcgcagaccggatttggtgctgcgtggcaggtcaatctgcgtgatgtcgccggtgatcaccgccttggagttaaagccgatgcgggtcaggaacatcttcatctgttcgatggtggtgttctggctttcatcaagaatgataaaggcgtcattcagcgtccgtccgcgcatataggccagcggggccacttcgatgacgttacgctcaatcagcttctccactttctcaaagccgagcatctcaaacagcgcgtcatacagcgggcgcagatacgggtcgaccttctggctcagatcgccgggcaggaagccgagcttttcgcctgcctcgacggccggacgggtcagcagaatacggcggatctcctggcgctccagcgcatcgaccgccgccgccactgccagataggttttccccgtacccgccggacccacgccgaaagtgatgtcgtgatcgaggatattggcgatgtactgcgcctggttcggcgtacgcggtttgattaccccgcgcttggtcttgatattgacggctttaccgtactcaggcacgctttcggcgctctgctccagtacgcgcgcttccttgatcgccaggtggatctgctctggttcaatatcctgaatctgaccgcgcattggcgctgtgtcgacatacaggctgcgcagaatatcggcggcagcgtgcacgcacagggcgcgaccggtcagcttaaagtgattgtcacggcggttgatctcaatgcctaaccgacgctccagctgtttaatgttgtcgtcaaacgggccgcacagggctaacaggcgtgcgttatccgctggctccagggtaatctcacgagtgtctatgttcaaactattcctctttacgcaggtggccggacgcggcgcgtggccggctaatcaggaaattatttacgtcacaggaaaatggcgcaagcattgctgtagatatagggacggagagaggaattacaaggcctgccggaaccgacaggcctgaagggatcatggctggtaaattcccacgccaagatcgttctctttacgggtgcgggcaatcactgattcgggtgattcagcgatacgcagacccatctccgcttcggtgcgcacgattttaccgcgcagcgagttggtatatacatcgacgatttcgacatcgacaaacttaccgacgaggtccggggtaccttcgaagttgaccacccggttattctccgtacgtccggagagctccatgatgttcttacgcgaggtgccttccaccaggatgcgctgtaccgtgccgagcatgcgacggctccaggccatcgcctgctggttaatgcgttcctgcaggatatacagacgctgttttttgtccgcctccggcacgtcgtcgaccatatcggccgccggggtgcccgggcgagcggagaagataaagctgtagctcatatcgaaattgacgtcggcgataagcttcatggtcttttcgaaatcttccgtggtttcgcccgggaagccgacgataaagtcggagcttatctgaatatccgggcgcgcttcacgcagcttgcgaataatcgctttatactccagcgcggtatgggtgcgtcccatcaggttcagcacacggtcggagccactctgcaccggcaggtgcaggaagctcaccagctccggcgtatcgcgataaacgtcgatgatatcgtcggtaaattcgatcgggtggctggtggtgaagcgaatgcggtcgatgccgtcgatggcggcgaccaggcgcagcaggtcggcaaagctgccggtggtgccgtcgtaattctcaccgcgccaggcgttaacgttctgccccagcagattgacctcacgcacgccctgcgccgccagctgggcgatttcaaacaggatatcgtcgcacggacggctaacttcttctccgcgggtatacggcaccacgcagtaggtgcagtatttattgcaaccttccataatcgagacaaaggcggtcggcccttcggcgcgcggctctggcaggcgatcgaatttttcaatttccgggaagctgatatcaactaccggactgcggttgccgcgcacggagttaatcatctccggcaggcggtgcagggtttgcggcccgaaaataatatcgacatagtgcgcgcgctggcgaatatggtcgccttcctgggaagccacgcagccgccgacgccaataatcaggtccgggttcttctctttcagcagcttccagcggccaagctgatggaaaactttttcctgggccttctcacgaattgagcaggtattgagcaacagcacatctgcttcttccgccacttcggtcagttgatacccatgtgtcgcatccagcagatcggccatctttgatgaatcatactcgttcatctgacagccccaggttttaatatggagtttttttgtcattgacttgctcatgctcagtaatagatatccaaaacgcggggatatatacagggtgaatttcgcattccagggcgcgtattgtaatgctttggtcgccccctgaccagtgcgagcgttatcgccgcaagagggcgaaaaatccggtaaacttaacggattctgctttaaggataatagccatgacaattcacgtaacagatgtcgccatcgtgggcggcggcatggtcggcggcgccctggcgttagggctggcgcaacagggatttaccgtgacggtgcttgagaaagcggcgccaccggcgttcgatccggcatccgccccggatgtgcggatctcggcgatcagcgcggcttcggtcggcctgctgaagagtctcggcgtctgggatgccatacgggcgatgcgcgtccatgcttatcgccgtctggagacctgggagtgggagagcgcgcacgtcgccttcgacgccgcggagctcaagctgccggagctgggctatatggtcgagaacaaggttctgcaatggggcctgtggcaagcgctggcggcgcatgaggcggttaccctgcgcgtcggtagcgaactgaaaacgatgcagcgcggcgagatgcagacggcgttgcatttgcgcgagggggagacgatccacgcccggctggttatcggcgccgacggcgctaactcccaggtgcgggagatggccggcatcggcgtgcacgcctggcaatatcagcagtcctgtatgctgatcagcgtcgaatgcgccgacgatcccggcgacagcacctggcagcagtttactcccagcggcccacgcgccttcctgccgctgttcgaccactgggcttcgctggtctggtacgacgccccggcgcggatccgtcagctgcagagcatgaccatggcgcagctccagcaggagatcgccagtcactttccggcgcggctggggcaggtgacgccgcaggcggccggcgccttcccgcttacccggcgtcatgcgctgcagtatgttcagcccggcctggcgctggtgggcgatgcggcgcacaccattcatccactggcggggcagggggttaaccttggctatcgtgatgtcgatgccctgctggagatcctggcggaagcgcgcggccgcggcgaagactgggccagcctgccggtgctgaagcgctaccaggcgcggcggcgagcggataattttatcatgcagtcggggatggatctgttttatgccggtttcagcaatgacctggcgccggtgcggatgctgcgtaatattggcctgatggcggctgaacgcgccggggtgctgaagcgtcaggcgctgaagtatgccttaggcttgtaaaaccggcttcccgggcaggggcgtagcggagagcgcctgcccggcagtcaggacggagtaagcatgtcaggacgccaatagcaaaaaagcccaccgaagtgagcttttttgcattgaagtggctggggtacgaggattcgaacctcggaatgccggaatcagaatccggtgccttaccgcttggcgataccccaattgtctgttgcgcttgaccgtaactacaccggttgagggcaacagtgcgttcactgctgaacgacttttaaatttggctggggtacgaggattcgaacctcggaatgccggaatcagaatccggtgccttaccgcttggcgataccccaacaaattgtttgcggatttatcgatgcatatcgatacgtccagaatttggtggctacgacgggattcgaacctgtgaccccatcattatgagtgatgtgctctaaccagctgagctacgtagcctaattgtcttactgcttcttcgatggctggggtacctggattcgaaccagggaatgccggtatcaaaaaccggtgccttaccgcttggcgataccccaataccgtcgcggtgaaccgccaatatcgaagaaatatggctggggtacctggattcgaaccagggaatgccggtatcaaaaaccggtgccttaccgcttggcgataccccatccgtacaacgctaactggtgaatggtgcgggaggcgagacttgaactcgcacaccttgcggcgccagaacctaaatctggtgcgtctaccaatttcgccactcccgcaaaaaagatggtggctacgacgggattcgaacctgtgaccccatcattatgagtgatgtgctctaaccagctgagctacgtagccatctttttttcgcgtaaccttatcggcgttgcggggcgcattatgcgtattgggcctgcgagcgtcaacctctttttcaaggaaaatcgttgtaatgtgactgtttggttaggttgcgaacagctcgctggaatattcggcaattattggttatttatcgtttttcagcggtataaatccggcaaaaagaaaacggaccccggagggtccgttttgcgtttcaccgcccgtctgggcttatttgtaggccgactggtggacaccgaccgcgcggcctgatggatcgttcatggttttgaacgcttcatcccactcaatggctttcgctgaagagcaggccaccgacggaccgccagggacgcactccgccgcgctcggcagcgggaacagctcttcgaagatctcgcggtacaaatagccttctttggaggtcggcgtgttgtacgggaagcggaagcttgcggtttccagttgctggtcgctgatctgtttggcggccacttctttcagggtatcgatccagctgtagccgacgccgtcagagaactgctccttctggcgccaggcgacgctggccggcaggtaggattcaaagcattcgcgcagaatgtgtttttccattttgccgttgccgcacatcttatcctgcgggttaatgcgcatcgcgacgtcgaggaacttcttgtcgaggaacggcacgcgggcctccacgccccaggcggacatcgctttgttggcgcgggcgcagtcaaacatatgcagcgcctgcagcttacgcaccgtctcttcgtgcagttctttggcgttcggcgccttatggaagtagaggtagccgccgaacacttcgtccgaaccttcgccggaaagcaccattttgatgcccatggctttaattttccgcgacatcaggtacatcggcgtcgaggcgcgaatagtggtcacatcgtaggtttcgatgtgatagataacgtcgcggatggcatccagcccttcctggacggtaaagtgaatttcgtggtgcacggtgccgaggtggttggccacctcctgcgccgctttcaggtcaggagagccttccagaccgaccgcgaaagagtgcagctgcggccaccaggcttcgctacgctcctgatcttcgacgcgacgggcggcgaatttcttggtgatagccgagatgaccgatgaatcaagaccgccggagagcagcacgccgtaaggcacgtcggacatcaggtggcttttcaccgactcttccagcgcctggcgcagctcgttcttatcggtaacgttgtctttcaccgcgtcgtaatcaaaccagtcgcgctgataatactggcggatttcgccgtctttgctccacaggtagctgcccgccgggaactctttaatggtgcggcataccggcaccagcgctttcatttcggaggcgacatagaagttgccgtgttcgtcatggcccatatacagcgggataatgccgatatggtcgcggccaattaagtacgcgtctttttcgctgtcgtacagggcgaaggcgaacattccctgcagatcgtcgaggaactccgggcctttttcctgatacagcgcgaggatcacttcgcagtcggaaccggtctggaactggtagcgatcgccatactccgcgcgcagcgcctggtggttgtagatctcgccgttaacggccagcgcatgggttttttcggcgttgtacagcggctgggccccggcgttgacgtcgacaatcgacaggcgctcgtgcgccagaatcgctttgtcgctggcatatacgccagaccagtccggaccgcggtggcgcatcaggcgggaaagctccagcgcctttttacgcagctcgcctgcgtcagttttaatatccagtacgccaaaaatagaacacatagccttctccattaccctgtcgtgtttgatgttgtgctggcttcgtctcgtggcgaagcctgagtgcgtgcttaagaaaatgccgtaaagggggagcaggcgcaagggttttgcggccggaaaaagaaaaaacgcaaccgtgattgttgaacagtgaaaaaagagtatcttttgaacggctttattgaggaattcgtatttataggccgtttttattagatggggtaattctgatgggcgctagaaatgaaaaaccacgtcctgcgacgtggttggcatcagaaaatatcgatttccgcgacggaagggtaaatccacgacgggcggaacggcatgctgtcgatgtcgtcgagggtggagacgccggagagcaccagaatagtctccagccccgcctggaaaccggccagtatatcggtgcgcaggttatcgccgacgatcaccgtctgctcggagtgagcctgcattttattcagcgctgaacggatgatccacgggctgggtttgccgacgtaaaacggcttacggccggagatcttctcgatcccggcgcacaacgcgccgcaggcagggtagaagccgcgaccgtgcgtatccgggttagtggcaatgaagcgggcgccgttggcgacgaagaaggcggccttatgcatcatttcccagttaaaggagcgagtttccccgacgatgacaaaatccgggttcacatcggtaatggtaaagccggctttgtacagctcgtggatcagcgccccttctcccaccacgtaggcttttttgccttcctggcgacgcagaaaatcggcggtggccatcgctgaggtgtaaaaggcgctatccggaacatcaattccagcggtggcgaaacggttcgccagatcctggccggtttgcgacgggtagttggtcagcattaccagcggcatgcctttatcgaggatgcgcttgataaactcggctgcgccgggaacggcgacgttatcgtgcatcagtacgccgtcaatatcacaaattatgttttgaatggtcatggtgggtccagaatcattaacaaagacgaaactatacgcgtcatcgatgaggtttcacacctctgacgggcgaggcccgcccgtattaaggtgacgcgctatgagaaaaggggcgattagctctcaagcaaacgctgcagcagcgtgccattgagcatggcgcgtttgaccagcgcgaaggcgccgattgcagagcggtgatcgagggtggagcgcaccaccggcaggttcttacgaaacgccttaagcgcctgggcgttaatgcagccttcgatggccggaagaaggaccttttcagcttccactatttcgccggcgacgacgattttttgtgggttgaacaggttaatggcgatggcgatcgttttcccgaggtggcgccccacgtactcaatcacctcgcaggccagggcatcgcccttgttggccgctttgcagatagttttgatcgtgcagtcatccggcgtcagacggctctggtagccctgctccagcaggtggcgaacccgctgttcaatggcggcattggccgcgacggtctccagacagccgaagttgccgcagtggcagcgttcgcccagcgggtcgacctgaatatggccaatttcgccgacgttgccgttgcggccgataaaaatgcgcccgttggagataatccccgccccggtaccgcggtgcacgcgcaccagaatggagtcttcgcaatcctggcttgcgccaaaatagtgctcggccagcgccaggctgcggatatcgtggccaacaaagcaggtaacgttgaagcgtttctccagcgccccgaccaggccccagttttccaccgcaatgtgaggcatatagcggatcacgccgctttccgggtcgacgaggcccggcaggatcactgagatagcgatcagctcgcgaattttgcgctgacagttttcgataaaggtggcgatgatattcagcagggcgtgttccagcgtttcctgggtgcgctcgggcagcgggaagtgctcctcttccaggggcttgctgcttaaatcatacagggtcagagtggcgtcatagcggccaagccgcacgccgatggcgttgaagttgcgggtttctgcgatgatagagatagcgcggcggccaccggtggaggcctgctgatcgacttctttgatcaggccgcgctcaataagctgacgcgtgattttggtcacgctggcaggggcaagctggctttgttcggctatctgaatgcgcgagatgggcccatgctggtcaatcaggcggtacacggccgcgctgttcagttgttttacgaggtcaacgttaccaatttgagcttgtccgcctgctgtcatacttttacttactcagtgacgacctcgttaccattaacgatggtcttggtgattttataatcgcgtgtaaaggcggtcaggttagcgaccatgcccggcgcaatgctgccgagctgcttgtccacgccgatagcgcgcgcaggatagagcgtcgccatgcgcaatacttcgtccagtgccacgccgcaatgctcaaccagattacgcaccccttcaatcatggtcagggaagatccgctgagggtgccgttttcatctacgcacagcccattgcggtagtatattgttttcccggcaaaaatgaactggtcaatattcgcccccgccggcgcggtggcgtcggtgaccaggcacagcttgtcgcctttcaggcgcttggcgttgcgcacgttggcgtaatcgacgtgcatcccgtcgacgatgataccgcagtagacatccggctcgtcaaaaatcgccccggcaagacccggttcgcggccggtaatgtacggcatcgcattatacaggtgggtggcaaaggtaatgcccgcgcggaagccgactttcgcctctttcagcgtagcgttggagtggcccgcggagacaacgatcccggcggcgaccagtttgcggatcacttctggctcaacgcgctcaggggcgagggtcactttggtgatcacatcggcgttgtcgcacaggaaatcgaccagcgccgcgtccggtttacgcacgtagtccggattgtgggtgcctttcttaacgatattcagccacggcccttcgagatgcaggcccagcgcctggttcggatgtttttgcagatattcgcgcatcacgcgcacgccttgcttcatcagatcgtcgctggaggtaattagcgtcggcaggaagctggtgcagcctgagcgttcgttggccttctgcatgatctccagcgtttcgacagtgaccgcctctgggctgtcgttaaactgcacgccgccgcagccgttgagctggacgtcgataaaaccgggggcgattattgcgccgttgactgagcgctgctcgatgtcagacggcaaatctgccagcggacaaagacgttcgataaagccattagcgataacaaccgcatggtcatcgagaatttcatgaccggtataaacccggccctgggttaatgcatacattacgacccccggtatatacgcctcatcaggtcagcgttcgttcgtttgccgccggcatgatggtgcgtacaaagaaaaagatgatcccgcgccagggcgcgggaaggactacattacagacctttaatattttcagcttctaattcgttgaaatatttcagcgtcttcactttcagctccatggtggacggttcgtcgcagacgatcaccgccttcggatgcagttgcagacaggtaatggtccacatgtggttgacgttaccttctaccgccgcctgcagcgccagcgctttctgatgacccagcaccagaatcatcacttcttctgcgtccagcagggtgcccacgccgacggtcagcgcatatttcggcaccagatccacatcgccgtcgaagaagcgggagttcgctacgcgggtttcatgggtcagggtcttaatacgggtgcgggacgccagagaagaggccggttcgttaaacgcgatatgaccatcgttgcccacgccgcccatgaacaggtggattttaccgtaggaacgaattttttcttcatagcgacggcattccgcatcgatgtccggcgcgttaccattcagcaggttgatattttctgccggaatatcaacgtggtcaaagaaattacggtgcataaagctatgatagctttccggatgctctttcggcaggccaacgtattcatccatgttaaaggtgacgacgtgcttgaagctaacctggcctgctttatgcatttcaaccagcgccttgtaggcggtcagcggggtaccaccggttggcagacccaggacgaacggacggtccgcggttggtttaaatgcattaatgcggttaacgatatggcgggcagcccatttaccgacctgctcagcggttaccaggggaatcagtctcattcttcacctctatagtcaaagtagattctggcggattggcgccagcactctaaggagagtattgcagcaactgcgccgaccggggtcaatccgtgttgatttttttaatgataaaataagttttcgttgttagccagtgcaagggaggagggaatacgatatttggtgataattatcacaaaaaatacccgtttaatttgcgatacgaattaatttttcacacactttgccggtaagtgataaaaccgaccttgttacacaataaaaaagtggctttgaaatgagcctcatcggggtctcatagggggaataagatgaatattttaggtttctttcagcgactgggtagggcgttgcagctccctatcgcagtgctgccggtcgcggcattgctgctgcgtttcgggcaaccagacctgttgaatgtacccttcatcgcgcaagcgggtggggcgatcttcgataatctggcgctgatcttcgcaattggtgtggcatcaagctggtccaaggataacgccggttctgcggcgctggccggtgcggtagggtatttcgtgatgaccaaagcgatggtcaccatcaatccggaaatcaatatgggcgtgctggccggtatcattaccggtctggtggcaggggcggtatacaaccgctgggccggcatcaagctgccggacttcctgagcttcttcggcggcaaacgcttcgtgccgatcgccaccggcttcttctgtctgatcctcgcggcgatcttcggctacgtctggccgccggtgcagcacgctatccactctggcggcgaatggatcgtctccgcaggggcgctgggttccggtatctttggtttcatcaaccgtctgctgatcccaaccggtctgcatcaggtgctgaacaccatcgcctggttccagattggtgagttcactaacgccgctggcgctgtgttccacggcgacatcaaccgcttctacgccggcgacggcaccgcggggatgttcatgtccggcttcttcccaatcatgatgtttggtctgccgggtgcggcgctggcgatgtatctggcggcgccgaaagcgcgtcgtccgatggtaggcggtatgctgctgtccgtggccatcaccgcgttcctgactggggtaaccgagccgctggaattcctgttcatgttcctggctccgctgctgtacctcctgcatgcggtgctgaccggtatcagcctgttcatcgcaacggcgctcgggatccatgcgggcttctccttctccgcaggtgcaattgactacgtgctgatgtacagcctgccggccgccagcaaaaacgtctggatgctgctggtgatgggcgtggttttcttcttcgtctacttcctgctgttcagcgcggtgatccgcatgttcaacctgaaaacgccgggtcgtgaagacaaagccgctgacgtggtaacggaagaagccaacagcaacactgaagaggggctgacccagctggcgaccagctatatcgccgcggtgggcggaacggacaacctgaaagccattgacgcctgtatcacccgtctgcgtctgaccgtgggcgattcggcgaaggtgaacgacgccgcctgtaaacgtctcggcgcgtccggggtggtgaaactgaataagcaaaccattcaggttatcgtcggtgcgaaagcagagtctatcggcgatgagatgaaaaaagtggttacccgcggcccggtagcggcagcggcaccggctggcaacgtcgccaccgcagcgcccgcggctaaaccgcaggcggtagcgaacgcgaagaccgttgagtcgctggtttcgccgattaccggtgacgtggtggccctcgagcaggtgccggacgaagccttcgccagcaaagccgtcggcgacgggatcgcagtgaaaccgaccagcaacatcgtggtggccccggccgccggtaccgtggtgaaaattttcaacactaaccacgcgttctgcctcgaaaccaacaacggtgcggaaatcgtcgttcacatgggtatcgacaccgtggcgctggagggcaagggcttcaaacgtctggttgaagagggcacggacgtgaaggcgggtgagccgattctggaaatggatctggacttcctcaacgccaacgcgcgctcaatgatcagtccggtcgtctgcagcaacagcgatgactacagcgcgctggtgatactggcgagcggtaaggtcgttgctggccagacgccgctgtatgagattaaaggcaagtaaggctcctgagtcgagtttttgcctcagcggcgaagggaaaccttcgccgcttttttttccagcaatcggccccataatcctcttctgatacctattttacgtaactaatagttgtcactacgccctgcttgtaagatcatgtgccgttatacgttgtttacgctttgaggaacccgtgatgagtgaggcagaagcccgcccgactaactttatccgtcagattattgatgaagatctggctaccggtaaacataccaccgttcacactcgcttcccgccggagccgaacggttatctgcacattggccatgcaaaatccatctgcctgaacttcggcatcgcccaggattatcagggccaatgcaacctgcgtttcgatgacaccaacccggtgaaagaagatatcgaatacgttgagtcgattaaaaacgacgtgcagtggttaggtttccactggtccggggacgtatgctactcgtctgattatttcgatcagctgcatcagtatgcggttgagctgatcaacaaaggtctggcctatgttgatgaactctctcctgatgaaattcgcgaataccgcggcaccctgaaagcgccgggtaaaaacagcccgtatcgcgaccgcagcgtggaagagaacctggcgctgtttgaaaaaatgcgcagcggcggcttcgaagagggcaaagcctgcctgcgcgcgaagatcgatatggcgtcgccgtttatcgtgatgcgcgatccggtgctgtaccgcattaagttcgctgagcatcatcagactggcaacaagtggtgcatctacccgatgtacgacttcacccactgcatcagcgatgcgctggaaggcattacccactcgctgtgtaccctggagttccaggacaaccgccgcctgtacgattgggtgctggacaacatcagcatcccggtgcatccgcgtcagtacgaattctcgcgcctgaatctcgaatacaccgtgatgtccaagcgtaagctgaaccagctggtgactgagaagcacgtggaaggctgggacgacccgcgtatgccgaccatctccggtctgcgtcgtcgcggctacaccgccgaatccatccgcgagttctgcaagcgcatcggcgtgaccaagcaggacaataccatcgagatggcgtcgctggagtcctgcattcgtgaagatctgaacgaaaacgccccgcgcgcgatggcggtgatcgatccggtgaaactggttatcgagaactatccgcagggcgaaagcgaaatggtggtgatgccgaaccatccgaacaagccggaaatgggcagtcgtgaagtgccgttcagcgccgaaatctggatcgatcgcgcggacttccgcgaagaagccaacaaacagtacaagcgtctggtgctgggtaaagaagtgcgtctgcgcaacgcctacgtcatcaaagcggaacgcgtggagaaagatgccgaaggcaatattaccaccatcttctgcacctacgatgccgacaccctgagcaaagacccggccgacggccgcaaggtcaaaggcgtgatccattgggtaagcgcggcgcatgcgctgccggtagagatccgtctctacgatcgtctgttcagcgtgccaaacccgggcgcggcggaagatttcctcgcggtaatcaacccggaatcgctggtgatcaaacaggggtacgcggagccgagcctggcgcaggccgaagccggtaaagcttaccagtttgagcgtgaaggctatttctgcctcgacagccgctatgcaaccgcaaccaatctggtgttcaaccgcaccgtcgggctgcgtgatacctgggcgaaagcgggcgaataacatttcttttcttgtcaaagcgtcgctcccagcggcgctttttttgtttcagaatcagctaattaaacttttcattttcgcgatgcgaattaattctgtttctgcgcggtaataaatagcgcttctgatgtttcctgtcacatacaaaaaaccaatgtaatcgctttcaatgattgcgtttttccctgattttgcaatgacttccataacaaaatcatcagagataagactgtaacaaaacgacataaaatatgtgcgctttgtcataatcttaagctttgcctcacgaaaaacattgataattcgcgtcacgaaaaatagtctatctacagtggttttgcggtcttttttaccgccccacattttgcagttttatttattttttagcgattgaccgctggtcttcgccttttaaaacgtcaaagaggatatgcacatgcgtacgtttagtggcaaacgtagtacgctggcgctggctattgccgccgtcaccgcgatgtcgggctgggttgtggctccacaggccagcgcagcaggctttatcgatgattcaaccttaaccggcggtatctattactggcagcgtgagcgtgaccgtaaagatgtgaccgacggcgacaaatacaaaaccaacctttcccactctacctggaacgccaacctggacttccagtccggctatgccgccgatatgtttggccttgatattgccgcgtttaccgcgattgaaatggcggagaacggcgatagcggccacccgaacgaaattgccttctcgtcacgtaacaaagcctatgacgaagactattccggcgataagagcggcatcagcctgtataaagccgcagcgaaattcaaatatggtccggcgtgggcacgtgcgggctatatccagccaaccggccagactctgctggctccgcactggagttttatgccaggtacctatcagggggcggaggccggggctaacttcgactatggcacggcgggcgcgttaagtttctcctatatgtggacgaacgagtataaagcgccatggcatatcgagatggacgatttctatcagaacgataagaagaccaaagtcgattatctccactccgtcggcgctaaatatgatttcaaaaatgacctggtgctggaggcggcatttggtcaggctcagggctatatcgatcagtactttgctaaagccagctacaagtttgacgtcgccggcgcgccgctgagcaccagctaccagttctacggcacccgcgataaggtcagcaacggcggggtcaacgacatctatgatggcaccgcatggctgcaggcgttaacctttggttataaggtggcggatgtcctggatctgcgtctcgagggaacctgggtgaaggctgatggccagcagggctacttcctgcagcgtatgaccccgacctacgcctcttccaatggtcgtctcgatatctggtgggataaccgctccgactttaacgccaatggcgaaaaagcggtcttctttggcgcgatgtatgacatgaaaaactgggatatgccgggctgggcgttcggcgcgtcttatgtctacgcctgggatgcgaagccgggaagaatgtcctctccggatgcgtactatgaccctgactatcgcctgaaagagtcggcctatagcctggatgcaatgtataccgtacaggaagggcgggcgaagggcaccctgttcaaactgcactttacccaatacgacaaccattccgatattccgagctggagcggcggctacggcaacatcttccaggatgagcgcgacgtgaagttcatggttatcgccccgttcactattttctgatgcctgcgcggcgggcgtgagcctgccgcacctctgggagaacgacaatgaaaaaaatgctgcttattgccatgatggcagcgggcctggtggcctgcaccacgtcgccggcgccgaaagaagacaccaaactgaaagatgcctatagcgcctgtattaatacggcggaagggaatccggacaagattgaagcctgccagagcgtactgaatgtgctgaaaaaggataaacagcaccagcagttcgccaaccaggagagcgttcgcgtcctggattaccaacagtgtattcaggccacccgcaccggcaacgatcaggcggtgaaagcgcgctgcgatcagatctggaaggagatccgcagcaataatacgacccattaaatcagacgacagcggcaaacgggcggggcatatctccgcccgtttgtttttttagcgctgactctccgccggctgatagccgcggctcagccgcacgaacagtagcgcggtggcaatgaatccgcacagcgcggcgcacattagccaccagcccggcgcgcttttatcgccgctgagctcgaccagggcgatggaaatagctggcgtcagtcccccgaagatcgcggtggcaaggcggaaggccagcgaaaagcccacggtgcggacgtataccggcataacttcggtaagcgccgcgaccatcgcgccgttatacatgccaaagaagaacgagaaccatagcaggaccagcgtcatacgggtgaaatcgggcgcgacggtgagccagtgcatcaccggccaggtggtgagcagcgccagcacggtaatgcccatcagcaccggacgacgaccgattcggtcagagatcgccccgctggcgaagttccatatcaactctccggacaaagcggggatgaggaaagtcaccccaggggcgtgagcgggaagggtgccagaggcgcccataaaaaagccaaccggcaggttggcttttcagtctcagcgaagcggggaattatttttccaccgcgtcgtgggcgtgttcgtcctcgcggcaatccccttccgcacagtgaccgtacagatacagactgtggttggtcaggcggatgccgtggcgggaggcaatttcacgctggcgtaattcgatcgagtcgtcgctgaattcgatcacttttccgcagtcgaggcagatcaggtgatcgtggtgatgctgctgggtcagttcgaaaacggattttccgccttcgaaattatgacgagtcacgatgccggcgtcatcaaactggttgaggacgcggtaaacggtcgccagaccgatctcttcgcccatgtcgatcaggcgtttatataagtcttccgcactgacatgatggttatccggttcctgcagcacttcaaggatttttagtcgaggaagtgtgactttcaggccagccttctttaatgcggtattgttgtcagtcatgcggaatctgtcctgttgctaaacgatctacttccttcaacggaagtcatacagaaattaacccgacgtaatgcgtctcattatagaactgccactggtaaatgaaaactgcaagcatcaggcctggtttgctgtcaaaaacgaggcaccagctacaaactgcgtcacgtgcctcgtagaatcagaggacattgtacagatatgtgattaaaagttaaaaacttgtagctattagtttgattgcttttgtctattaatgcgacgcaactcaatgattgcgccgcttaatcatcaggcgtttttgatttcttcgaggtgcagctcttcggcaacctgcttcacccatttctcaacgcgctcgttggtcagctccggctggcggtcttcatcaatggcgaggccgacgaagtggtcgtcatccgccaggcctttggaagcctcaaaatgataccccgccgttggccagtgaccgacgatggtcgcgccgcgcggctcaatgatgtcgcggatggtgcccagcgcgtcgcagaagtattctgcgtaatcttcctggtcgccgcagccgaacagcgccaccagtttgccattgaagtcgatctcttccagcgtcgggaagaagtcatcccagtcacactgcgcttcaccgtagtaccaggtcgggataccgagcagcaggatgtcgtgggcttccaggtcttctttgctgcttttggcaatgtcgtgaacatcagcaacatctttaccaagctgcttttgaatcatttttgcaatattttcggtgttgccggtgtcgctgccaaaaaagatgccgatgattgccatgagtaaaataacctcttgaaacttaaatgatgtggtagggacgcaatgcccatagataacggcaatcatagcagaacaggcaagggcgcggaaacagcaatcacgcccgactgcacactctgctacatgaatgcgggtttttcgcggaaagttagacttttccctggctgcgcagggcggttaactgggtcatcagcatctcttcaatgagatcgctgcggctcatattacgcgcttccgccagctcgttgagcgcatcgaccgcatcggcgttgagttttaactccacgcgcttcagcccgcgaaccttatcgcgtttcagctggttacgtttgttgatgcgcagttgttcatcgcgcgacagcggattggttttcggtcttcccgggcgacgctcgtttgcgaacaaatctaatgtcgtacggtccgtttgttcttttgccatgattctgagtgacttcggggaaacaagctgccgggctctagccggcgcagatagcgcgccatcatacatcaggcgaacggctgcgccaacgaccgcgggcattctgcggcgcggtcgggcatattttagccaatcaggcggcgatgctcgtcagatagcggcggatggcgcgtaacaccgcctcgggtttctcggcatggacccagtgtccggcgccggcgatgacgtgggcccgggcctgcgggaactgggccagcagcgcgtcgcggtaggcgtcggtcacatagggcgagttgccgccgggaataaactgcgtcgggtgcggccaggccgggatggtttcccagccgacgatatgcggatactggtcccacagcaccggcacgttgaagcgccagtcgccgtcgacgaatgatttcagcaggaactgaatcacgccttcttcctgcaggtgctcgcgcatcacctgcgccgcctgctggcgggtgctggcggcggattcgctgacggcgcggatagcggcgaaaatctcatcatggcggcgaacgtgataatccaccggcgcgatatcgatcgccaccagaccgctgatgcgttcaggcgccagggcggtaagcgccattaccgctttcccgcccatcgaatggccgataaaggtggcgcgctcgatctggtgcgcgtcgagcgtatcaagcagatcctgcgccatggcggggtaggtcatctctggcgaccgcggcgacaaaccgtggttgcgcatatcgacctgcacaatatcgtggtcggcgatcaggtcgcgggcgaggatgcccaggttgtccaggctgccaaacagaccgtggaccagcacgatcggggagtggttgtgcggattctgtgcagattgcgctcggctatttaatttcatggcaaagttctttttttcgctccgtcgggttagggtattatgttggacattctgccatccggctgcaagacccagaagttttctgagttttaccgccatcctggtttgacgctatccgcggttgggatttgtacttataatcccaacgatttgtattcagaaaagatatcgcactggattaagatgaaaacaattgaagttgatgatgaactctatcgctatattgccagccacactctgcatatcggcgagagcgcatccgacattttacggcgtatgctaaaattttccgccgtttcccaaccggctacaccggtcagcaaagccgcgccgacgctggcgccagcgcctgtcgctgaggtgaaacccgctaacccggtgaaagataaagtccgcgccatgcgcgagatgctgttatctgatgaatacgccgagcagaagcgcgcggtgaaccgttttatgctggtgttgacgaccctctactccctggacagtaaagcatttgccgaggccaccgagtctctgcacggccgcacgcgcgtttacttcgcggaagatgcgcgtacgctgctgaaaagcggtaatcagaccaaaccgaaacaggttcctggtacaccgtggtgggtgatcaccaataccaataccggccgtaaatgcagcatgattgagcacatcatgcagtcgatgcagttccctgcggagctgattgaaaaggtttgcggcacgatctagctttttaacatttgcaccagaaggatcaggcaatggcaatcgataaacgtgcggggcagcctgcgcaacagagtgatttgattaacgtcgcccaactgactgctcagtactacgtgctgaagcctgaagtcggtaatgcggagcatgcggtaaaattcggcacctctggccatcgcggtagcgcggcgcgccacaacttcaacgaaccgcatatcctggccatcgcccaggccattgcggaagatcgtgcgaaaaacgggatcaccggtccgtgctatgtcggcaaagatacccacgccctctccgagccggcgtttatttcggtgctggaagtgttaaccgccaacggcgtcgacgtgatcgtgcaggaaaacaacggcttcaccccgacgccggcggtctccaacgcgattctggtgcataacaaaaaaggcggtccgctggcggacggcattgtgatcaccccgtcacacaacccgccggaagatggtggtatcaagtacaatccgccaaacggcggcccggctgataccaacgtcaccaaagtggtggaaaaccgcgccaacgaactgctggccgcgggcctgcagggcgtgaaacgcatttctctggacgcggcgctggcttctggccacgttaaagaacaggatctggtgcagccgttcatcgaagggctggcggatatcgtcgatatggccgcaatccagaaagccggcctgacgctgggcgtcgatccgctgggcgggtccggtatcgaatactggaaacgcattggcgagcactacaagctcaatctgaccattgttaacgatcaggtggatcagaccttccgctttatgcacctcgataaagacggcgccatccgcatggattgctcctcagagtgtgcgatggccggcctgctggcgctgcgcgataagttcgatctggcgtttgctaacgacccggattacgaccgccacgggattgtgaccccggcggggttgatgaacccgaaccactacctggcggtagcgatcaactacctgttccagcatcgtccgcagtggggcaaagaggtggcggtgggtaaaacgctggtctcctccgcgatgattgaccgcgtggtgaacgatctgggccgcaagctggtggaagtgccggtgggctttaagtggtttgtcgacggcctgttcgacggcagcttcggcttcggcggcgaagagagcgccggggcctccttcctgcgcttcgacggcacgccgtggtccaccgataaagacggcatcatcatgtgcctgctggcggcggaaatcaccgcggtgaccgggaaaaacccgcaggagcattacaacgaactggcggaacgcttcggcgcgccgagctacaaccgtctgcaggcttccgcgaccgccgcgcagaaagcggcgctgtccaagctctctccggaaatggtcagcgctgacaccctggcgggggatccgatcactgcccgtctgaccgcggcgccgggcaacggggcggcgattggcggcctcaaggtgatgaccgacaacggctggttcgcggcgcgtccgtcaggcaccgaagacgcctacaagatctactgcgaaagtttcctcggcgaagagcatcgcaagctgattgaaaaagaagcggtagagattgtcagcgaagtgctgaagaacgcttaacgacgcactaccatcaggccccttgcgggcctgattttttttgcaaggatagcgatgaaaatacaacggaagtccctgtttttgttctgggcgtggatggatctctttttcgtcctgcaattcttatggtggaatattgcccaccgccgcctccctttttacgacgatctactcgcttatctccagctattgcacacctggggctccgcggcgatctggctgtacccgctgaatgttctgctgattatcagcatcccgctatcgatgatcttttttttccgccagagccgctatgcgctgtggctggcctgggggcaggcgccgctcaggctgctgtttatgcagccttcgctatcgctgggcctgtggctgattcaggctgccggggtccggcatgtagcgatcctggcaggctttctgctgctctctgaagggctgaaaatcgccagcctctggtactgcagaggcgggattcagggcataaagcgatagccaatcccggtttcggtcagcaaatgctgcggccgtgccggatcggcctccagcttttgtcgcagatgacccatatagatccgcagatagtggctgtgctccacggcgttaggcccccacacctgattcagcagctgacgctgggtaagcactttgccgggattattcaacagcgccgccagcaggcgaaactcgataggcgtcaggtggatctcttcgctgccgcgcaggatgcggcgggcggggatattgacctccaggtcagcgaagcgcaccaccggctcatcggcctgcgccgcgccgtggcgacgcagcgcgacgcgcaggcgggcctgcagctcgccgatgccaaagggtttacttaagtagtcatcggcgccggcatccagggcggcaattttgtcatgctcttcgctacgcgctgacaggacgataatcggcatctggctccactgacgcaggtcgcgaataaaatcaatgccgtcaccatccggcaggccgagatcgaggatcgcgaggtcgggcttacgggtggcggcttcaatcagcccacgctgcagggtttccgcttcaaatacgcgcatgccgtcggcttccagcgcggtgcgcagaaagcgtcggatagcgtgttcgtcttcgataatcagaacgttaatcacaattcctcaggtagctcttccagttcagggggcgtttctccaggcagtgtaacacggaatgaggcgccgccctcgggccggttgctggcggagatggtcccgccgtggacgtcgacgatggcctgacagatggcaaggcccagcccgacgccagggatcgccgactctttgttgccgcgggcgaatttatcaaagatagtctgttcctggcctgccgggatccctggaccgttatcccatacctccagcgacagctgccgggcgtccgcctcggcgcggatgccgatgctcgcccgggcgccggcatacttatgggcattttccagcaggttgatcagcacccgctcgaacagcggcccgtcgacatgcaccagctggaggggatcgggtaaatccagctgaatatgctggccgccgaggcttggctcgagcatgcgcagcgcgctgccgaccacttcctccagcgtcagccactccttatgcagattaaagccgccggactggatccgcgccatatccaacagattgttcaccagccgggtggtgttgagcacatgctggcggatttcgttggcctgcggggcatgttttgaaccttcgctggccagatcgagggtcagaatttccgcctggccaaacagcacggttagcggagtacgcagatcgtgcgacagggcggcgagcagcgagttacgcaggctttcccgctcgctggtcagccgggcctgctcttcgctggcggtcagggtgaggcgctccagggcgctggccaccagcagggtaaaggtctccagcagccgctgctgctccgggatcatcaattggcgcagattctccggttccaccaccagtagtccccaggtgcgggcggcgctcttcaggggcaagatctgatacggcacgccgggcagggtatcggtgccggcgccggcaggctgccccttatcaaagctccagcgggcgatggcatcatcccacggggtcagccctggctggtgggttaagggcagcagttttccctgggcgtccgggagcagcagctggctgcgggcctgaaaggtggaggcgataaaccgctcgctggtggtggcgatatcctgctggctgcgacccaccgccagcgctttagacatctcatacagatggcgggtacggcgttcacggtagcgcgccacccgcgcctggtagcgcacgccggcggtgaggttgccgataagcaggcccacggtgagcatcacgccgaaggtgagcagatactggacatccgacaccgccagcgttccgcgcggggcgacaaaaaagagatcgaagctgatgacgttgatcaccgtcgccagcaccgatggccagcggccatagaccagggcgatgagcaccacccccagcagatagagcatcaccagattggcggcttcgaaggccatcaaccactgcatggccaccagggtaatgatggcgcatagcgccaccgccaccgcgcagccctgcagctgcaggcgccatttctccagcgccggacggctgtcgctggcgcgtgcggcaagggggaagggtttctcatcgagggcgatcaccaccagatcgaggtccggcgcatggcgagccagacgatcggcgaagccgctgcgatcccaccagcggcgcttgctttggcggccaatgacgattttgccgaggttatgttcgcgggcgtaatggaggaccgctttctcttccgacgggtcggagagggtagcggtttcggcccccagctcctgggccagacgcagcgcggcgagaatagcccgccgccggccttccggcagccggtgcagggaaggggtctcgacatacaccgcatgccagacgctgcccaggcgggcggcgagccgggcggcggcgcgcaccagcttttcgctgccggtgttgtgcccgatacagagcaggatcgcatcgcgggtgtgccagactttctcctggccctggcggtcgcgccaggcgcgcatctgctcatcgacgcggtcggcggtgcggcgcagggccagctcgcgcagcgcaatcagattgcccttgcggaaaaagttttcgatagcgcgctcggcctggccgccgatgtagactttgccctcattgagccgctggcgcagatcgtcaggggggaggtccaccagcaccacgtcgtccgcggcgtcaaagaagggatcgggaaccgtctcccgcacctgcacgccggtgatcccgctgacgacgtcattcaggctttccagatgctggacgttaacggtagtgaaaacatctatcccggcctccagcagttcatccacatcctgccagcgctttggatggcgggagcctggcgcattgctgtgcgccagctcatccaccagaatcagcgccggacggcgggcgagggcggcgtcgagatcgaactcatagacgtaccgcccgcgatgggcaagccgccgcggcggcagagtgctcaggccctgcagcatcgcggcggtctctttacggccgtgggtctccgccacgccaatcagaatatccagcccctgggcgcgcagccgctgcgcttccgccagcatcgcccaggttttccccaccccggcgcaggcgccaaagaacactttaagtttgccgcgatgcggggcggcggtgtgctgcagcaggcggtcagggtccgggcgcagcggctcgtcactcatttacttatccttcagggcatccagcgccatattgagttgcagtatattgaccaccggctggccaaggaagctcagcagcggggtttgtgtggcctgattcaccaactgggttacctgctcaacgctcagctggcgcgcttgagccacccggggcacctgccacagcgcggcggccggagtcaggttgttatcgagaccgctcgccgaggtggtgaccagttcgaccggcacccgcgggtcggcgtccgggttggcggcgcgcagagcctgcacgcgctcgctcaccgctttatccagcgccgggttgctggcggcgaggttgctgccgccagaggccatgggattatccgccgtctccgcggtggccgacgggcggccctggaaatagcctgcggcggtgaagttctggccaatcagcgccgagccgcgcacttcaccgttcaggcggatcagcgagccgttggcctgtgagttaaaccaccattgtcccaggctggtggttagcagaggatagacgccgccggtgagcagcgttaacagaataaatagcacaagtgccggacgaatcaatgacatagtttgttcctcacaccagaccgctcagggtcagcagcaggtcgatggctttaataccgataaagggcaccagcagaccgccgaggccgtagatccacaggttgcggcgcagcatcgccgaggcggagagcgggcgatagctgacgcctttcagggccagcgggatcaggaagacgatgatcagcgcgttgaagataacggcgctgaggatcgccgatgagggcgaatgcaggcccatcacgttcagcatggccagctgaggatagaccgcggcaaacgccgccggaataatggcgaaatatttcgccacgtcgttggcaatactgaaggtggtcagcgagccgcgcgtcattaacatctgtttgccgatatggaccacctcaatcagcttggtggggttggaatccaggtcgaccatgttgcccgcttccttcgccgcctgggtgccggagttcatagctaccgccacgtcggcctgagccagcgcgggcgcatcgttggtgccgtcgccggtcatcgccaccagccgaccttccgactggtactgacggatcagcgccagcttggcttccggcgtcgcttcggcgaggaaatcatcgacgccggcctcggcggcgatcgccgcggcggtcaggcggttatcgccggtgatcatcaccgttttaatgcccattttgcgcagctgggcgaaacgttctttgatgccgcctttgacgatatctttgagcgcaataatccccagcaccttttccccttcggcgaccaccagcggcgtggccccctggcgggcgacctcttccacctgcttatcgacatcggcagggaagtggccgccgttggcctccacgtggcggcgaatggcgtccaccgaccctttgcggatcatgcgctgatcgatattgatgccgctcatccgcgtttgcgcggtaaaggggacaaaggtggcgtgcagcgactgcagatcgcgttcgcgcagattaaagcgctgtttcgccagcaccacgatgctgcgcccctcaggggtttcatccgccagcgaggagagctgggcggcgtcggcgagggttcgctcttccacgccgcgagccggcaggaaggcggaagcctggcggttgccgagggtaatggtcccggttttatccagcagcaggacatcgacgtcgccagcggcttccaccgcgcggccgctggtggcgatcacgttggcgccgagcatacggctcatcccggcgacgccgatggccgacagcagcccgccgatggtggtcgggatcaggcacaccagcagggcgaccagtacggtaacgctgaccgcattgccgctccacgccgagaagggccagatggtggcggtggccagcaggaacaccagcgtcagggcgatcagcaggatcgtcagggcgatctcgttcggcgttttacggcgctgggcgccttccaccatggcgatcatccggtcgaggaaggtttctcccgggttcacgctgcagcggatcaccagccagtcggagagaatgcgtgtcccgccggtcaccgaggcaaaatcgccaccggattcacggatcaccggggcagactcgccggtaatggcgctttcgtccaccgaggcgccgccttcgatgacttcgccatcgcaggggataatatccccggcttccaccagcaccacgtcgcctttgcgcaggtcttccgccggcacgtggtcgaccggcgcgttatgctgcggggcgcgcagtttgcgggcgaaggccgtttttttcacccctttcaggctgttggcctgggctttgctgcggccttccgccatcgcttcggcaaagttggcgaacagcacggtaaaccacagccagatactgacggcggcggtaaaggtggcgctaccggtcagggcgccgccagccatggcgatcgccagcagggtggttaacagactgcccacccagacgataaacatcaccggattgcgccattgcaccatcgggctgagttttttcacggcatccagcagcgcctggcgcaccagcgtcggctccagcagggctaattgtttgcgactcataacagggtgctccgcatcgctcaaagtaaggaaaagtgttcagccagcgggccaagcgccagcgcaggaataaaggtcagggcgcccaccagcagcacggtgccgatcagtaaaccgataaacagggcgtcgtgggtggccagggtgccggggctggccggttgaattttcttcgccaccagcgagccggcgatggccatcaccggaacgatgacggcgaagcggccgaccagcatgcagaacgccagcagcaggttccagaacggcgtcgccgcgcccaggccagcgaaggcgcttccgttgttattggccgccgaggtgacggcatacagcacttcgctaaagccgtgcggtccagggttgaacatcccggcgcggccggcgtcggtcatcatcgccagcgccgtgccaagcagcaccagcgtcggggtgaccagaatggcgagggcgatcattttcatttcccggacatcgattttcttcccgaggtactccggggtgcggccgaccatcagcccggcgataaataccgccagcataacgaacagcagcatgccgtacaggcccgagccgacgccgccgaataccacttcgccaatctgcatcagccacatcggcaccatgccgcccagcgcggtgaaggagtcatgcatggcattgaccgcaccgcaggaggcggcggtggtgatcaccgcgaacagactgctggcgagaataccgaagcgactctctttaccttccatattcaggctactgtcggcgcccagcgtcagcaggtgggggttgccgcgagtttccgcccacatcaccacggcgacgcagaggataaagatcagcgtcattgcccacaggatggcgcgtccctgacgccgatcgcttaccacctcgccgaaggcgaagcacagcgccgccgggatcaggaagatcgccaacatctgcacgagattggtcagcgcggtcgggttttcaaacggatgggcggagttggcattgaagaaaccgccgccgttagtgcccagcagcttaatcgcttcctgtgaggcgacaggccccatcggcagcagctggtgcaccccttcgagggtggtaaagggctggtaggcctgcagattctgcggcacgccctgctgaataaagagcagggccaccagcagagagagcggcagcagcagccacagggtaatgcgcgtcaggtcgacccaggcattgccgagggtcgacattttctgccgggcgaaggcgcgggtcaggacgaagaccacggcgatgccggtggcggcggagaggaaattctgcaccgtcagaccgaccatctggctgagataactcatggtgctttcgccggcgtaagcctgccagttggtattgctgacaaagctgatcgcggtattgagcgccagatcccatgacagccccggcaggtgctgcgggttaaacggcagcacgccctggagcatcagcagggcaaacagcgccaggccgccgagggcgttaaacagcaggagcgccagcaaatactgcagccagcccatctcttcggcgcggatcccggccacgcgccacaggacgcgctcgacgccggccaggccgggaagcgggatatcgttcaccattcttgccagacacatccccagcgggcgcgccagcaccagcaataccagcagatagctggctaataataaaaatccctgggcagccatcagaatgcctccgcatgtatcaaggcataaaccagataagccagtaacaggaacaccagcccaacgccagtgagtacgcctgcagtcacaatccacctccgggtgtgttttcgatttacctggaggatagaaattacggcgcaaagatttcgcaaaaatccgcgggtgcggtgtaaaaaaagtataaaaatgacaaaggcacaaattaactgatggttagtattaatttaactttttcgtaactaatttacgtggcgaatgtaaattaagtataaatacgtgctttttagtggtcggatgagtagtaaaattacaagcagagcggtattattttgctcacacaaacatgattaattttaccggcgctgcttgccggcctgacaaaggggagagaaatgatggcgttgtacaaagcttatcctgctcatattattttgctgcgtcgtgctttcgccgtcgtggctggcgtcgcagcgctgccggtgatgctgttctggaaagatcgcgcccgctactacagctggctgcaccgggtgtggtcgaaaaccagcgagcagccggtgtggatggcgcaggcggagaaagccgctcacgatttctattaatcctcctgctgcgaagaaaataacaagaccgccgggttgccccggcggttttttttcgccgcttgtctacactcgtttttatgcgccgccttggaattggcaggtgcgtattttgccggagcgcgctatttttgccggcttagatcataagatgagtattgctgacggataataaggagtgatatggccacccatctggtctggttacgcacggatttacgcattcacgataacctggcgctggctgccgcctgccgcgatccgcaggcgcaggtgctggcgctgtatatcgccaccccggggcagtggcgtgaacatcacctggcgccacggcaggccgcttttatcgccagccatttacagagtctgcatgccgcgctggcggaacggggcataccgctgtgggtagaagaggcggacgattttaccgccagcgtcgaacggctggccgatttttgccagcagcatcaggtcagtcacctgttctacaactatcagtacgaattcaatgaacgccagcgcgatgccgccgttgagaacaccttgcgcgacgtgatttgccagggctttgacgacagcgtcctgttgccgcccggcagcgtactgaccggtggcggcgaaatgtataaagtcttcaccccgtttaaaaatgcgtttattcgccgtctgcgggacgggctgccggcgtgcgtggcggccccgaagccgcgccaggcgcctgcccgccaggcgccgccgctgcctgagcttaactacccgcaaacgccgtttgacgggctgctgtttgccgcggatgaaaaaacggcgctggcgcgtctgcgcgcgttttgtcagcaagcggcggcggattacgaggggcagcgcgacttcccggccgtggaagggaccagtcgcctgtcgccctgcctggccatcggcgtgctgtccccccgccagtgcctgcatcgtctgctgacggaacatcccgccgcgctggacggcggagccggcgccacctggcttaacgagctgatctggcgcgagttttaccgccatctgatggtctactatccgaagctctgtaaagggcggccatttactgcctggacagataaggtcgcctggcgcgcagaggaggcctccctacaggcctggcagcgcggggagaccggttttccaattgttgatgccgccatgcgccagcttaacgccaccggctggatgcataaccggttgcgcatgattgtcgccagcttcctgaccaaagatttgcgcctcgactggcgggcgggcgagcgctatttcatgagccagctgattgatggcgacctggcggcgaataacggcggctggcagtgggcggcttcaacgggcaccgacgccgcgccctatttccgcatatttaatcccaccacccagggcgaaaagtttgataaacagggggtgtttatacgtcgctggctgccggagctggcaaaggtgccggagaaggccctgcatcagccgtgggcgtgggcggataaacaagggatcacgctggattattcgcgcccgatagttgatcacaagcaggcgcggcaggagacgctggcggcctgggaggccgccagaaaaggaattactccaccgccagacggcgggtcctgactttcagcgaatgatacagccagatgaccagcaccacgccgacgcaggccagcgcgccccaggtgatctggctgaagacggtaatgtaggcgtcaatggagtagttcaccgctccggcggcgtcgaatgacgcctgcgaggtctggtcggcgataacgccggccagatagttggcgatggcccctgagagcagcatataaataccggtcagcaccccagtgacacccgggatctcaatgcgggtgatctgcgacatcgcgaccgggtcgataaacagttcggcaaagcccatcaccgccagacccagcaccatcagcggcatggacgactgaccataggccgccgaccagcgggcgctgagggtcaaaatgcagaacccggcgctcatcaggcccagaccgagggcaaatttcccccagatgcgcacggtgcgattgccgttcacgctctctttcaccagccacgccagcaccatcccgcagagcatcaccgcgaaggcgttgattgactggaacatagcggtagggacttcgtagctcatgatatggcggttaacgaagcggtcaatatacaggctgatggagctcccgccctgctgggcgaaggcccagaacagcaggctgaaggcggtcaggacgacgattaggcgcagatccttgcgctgtttatcggtttcggcgcgcaggtagatccgcgccagtaccgcgaggccaatggccgtggccaccatcagggcatacaccgaccactcctgccagaacagtaccgcaatcagcagcggggcggtaaccagcaataccagcagccagccccagttcggcaacaggaagcggcgcgcgcacagcgcctggcggttgacgccggcggtatgctggaaatgacggttgccgcagaggaaaatcaccagccccgcgaccatgccgatggccgccagggcaaagcccatcgcccagctatactcctcctgtacgtagccgcaggcgatcggcgcgataatcgagccgatattgccggcggcatacatcagcgaaaagccgccatcgcgacgcggatcggcgggttcgtacagctcgcccagcagacagctgacgttggatttaaacaacccgtagccgcagacgatgatcgccagcgacaggtacaggaaaagcggagcggtttcgctggccccgagcaccagatggccaatggccatcagcagcgcgccgagcatgaccgccatccggttgcctaacagcttatcggccagatagccgccgaggatcggcgtcacatagaccagcgaacagtaggcgctgaacagggcgtaggcatggttatcgtcatatttgagctgattggtgagatagaggatcagcagggcgcgcatgccgtaaaagctaaaatactcccagatttgcagcgccacgacgtagtagatcgcccgcggttgcgatgatgttgtctgcatatgaagtgtgtttcctggcgtaaagcgaaagtcgatcgttctgcatgaatagcgatttatcagtcatattcatggcttgaggggctttctgattatttaatatgctttattagtgcataaatatacactaatgcgcggcgggatgaatagacaaattgcgggattcgttaaaaagtcatggtcagtgacggtagcggactatcgacgacccgaatggatatggttatgttatgcctttgtataacctgattatctgctggagtggcgatgaaaaatagcgaactggaacaactgattaacgacaagctcaatagtgcggccatcagtgacttcgcccctaacggtctgcaggtggaaggacgcgaaacggtgcacaagatcgtcaccggagtgacggcctgccaggcgctgctggatgaggccgtccgtctgcaggcagatgcggtgattgttcatcacggctatttctggaaaaacgaatcgccagtgatccgcggcatgaagcgccgtcgcctgaaaaccctgctggccaacgatatcaatctctacggttggcacctgccgctggatgcccatccggagctgggcaataacgcgcagctggcgcatctgctggggattaacgtgctcggcgaaatcgaaccgctggtgccttggggcgagctgtcgatgccggtttccggcctcgaactggcctcgtggatcgaagcgcgactggggcgcaagccgctgtggtgcggcgataccgggccggacaccgtcagccgcgtcgcctggtgtaccggcggcggccagagctttatcgacgccgcggcgcgctttggcgtggacgcctttatcaccggcgaggtgtcggaacaaactattcactctgcccgcgagcagggcctgcatttttatgccgccggccaccacgccaccgagcggggcggcattcgcgccctcagcgaatggctgacggaaacgaccgatctggacgttacctttattgatattcctaaccctgcctgacgggagagaagaaagtgcagcgagcgcgttgttatctgttaggtgaaacggcggtggtcctggagcttgagcctccggtgaccctggagagccaaaaacgtatctggggcctgacgcagcggttgaccgatcgcgaagaggtggttgaagtgatcccggggatgaacaacatcaccgttgtgctgcgtcgtccgcaggagatggcgtgggaggcgattgacaagctgcagcgctggtgggaagagagcgatgcgctggagccggaatcccgtgagataagtatcccggttatctacggcggcgaggcgggaccagatcttggcgacgtcgcgcgccatagcgggttgagcgaaaagcaggtggtcgaactgcactcttcggtggagtatatggtgtggtttctgggtttccagccggggtttccgtattttggcggcctgccggagcagctggcgatgccgcgtcgcgccgagccgcgcgtactggtaccggcgggatccgtcggtatcggcggatcgcaaaccggtatttatccgctggcgacgccgggcggctggcagctgctggggcgcacgccgctggcattattcgatccaaaacgtgaagagccggtgctgctgcgttccggcgatcgcgtgcgctttgtgccgcagaaggagggggtatgttgaaatttatccgcgccggcatgtatacctcggtacaggatggcggccgggaaggccagcgccagggggggattagccgctgcggcgcgctggataaaccggcgatgaccattgccaatctgctggtgggcaatgcgccggaggcggcggcgctggaaattacgctgggtcaggtcgatgtgcagtttacccgccactgctggttcgcgttgaccggcgccgcctgtgaagcgacgctcgacggcgcgccggtctggttgggctggcgaatggaggcgaaggccgggcagcggctggtgctgaaaaatcctcagcatgggatccgcagctatctggcggtcgcgggcggtattgatgtccctgaagttttaggttcccgctctaccgatctgaaagtcggtatcggcggaatcgaagggcgccggttgcaggatggcgatcaagtgaagattgggaaatcgtcccgccgctttagcgcctcgcgcggcgttaaacagctgccgataggcaatattattcgcgcgctgccggggccggagtatcacgaattcgacagcgtgtcgcaggagtctttctggcgctcgccgtggaagctgagtccgcaaagcaaccgtatgggctaccgcctgcaggggcagccgctcaggcgcacaaccgaccgggaaatgctctctcatggcctgctgcccggcgtggtacaggtaccgcataacggccagccgattgtgttgatgaacgatgcgcaaaccaccggcggctatccgcgtatagcctgcattattgaagccgatatgtaccaactggcgcaaattccgctaggtcagccgatccatttcgtcccctgttcgctggaggaagcgctaaaagcgcgcgccgaccagcagcgctaccttgaacaactggcctggagattaagcgatgaaaattgatttaaatgccgacctcggcgaaggctgcgccagcgatagcgcgctgctgcagctggtctcttccgccaatatcgcctgcggctttcacgccggcgatgcggttctcatgcagcaatgcgtgcgcgaggcgctgaaaaacggcgtcgctattggcgcacacccgagcttcccggaccgggaaaattttggtcgaaccgcgatgcagttaccgccagagacggtctacgcccaggtgctgtaccaaattggcgcgctggcggcaatcgtacacgcccaggggggcgagctgcggcacgtcaaaccgcatggcatgttgtacaaccaggcggcgaaagagccgcctttggccgacgctatcgctcgtgcggtgcgcgatgccgacgccgacctggtgctggttgggctggcgggcagcgagcttatccgcgccggacagcattatcagttgacgacgcgccaggaagtcttcgccgatcgcggctatctggccgacggcagcctggtgccgcgcagccaaccgggcgcgctgattgagagcgaagagcaggcgctggcgcaaacgctggaaatggtgcagcacaatcgggtgcgcagcctgagcggcgaatgggcgcatgttaaggcggaaacggtctgcctgcatggcgatggcgctcacgcgctcgatttcgcccgacgcttgcgcgccgcgtttgccgggcggaatatcgacgtcagcgcggacctcgagtaatagtccgcctaagttattaataataattaaatcaaataattaacaacactcacaatactcacaactgaacaggacgttattatgcaagaggcgatatccctctggccgctaatcggcattgccgtgattgtggtcggttttgtattacgctttaacccggtgctggtggtgattatctccgggatcgtcaccggcgtggcggcgcatatgccaatagccactattctggagaaactgggcgagggcttcctgaatacccgtaatctgccgtttattctgctgctgccgctggcggtgatcgggctgctggagcgccatggtctgaaagagcgggcgcaggcgtggatcgcgaagatccatagcgcgaccgccggacgtctgctgatcgtctatctgtttgtgcgcgaagccaccgccgctctggggttgaccagcctcggcggacatccgcaaatggtgcgcccgctgctggcgccgatggcggagggggcggcggaaaagcgctttggcccgctgccgggcaatgtacgctaccgcctgcgcgcgatgtcggcggcgaccgataacgtcgggctgttcttcggcgaagatatttttgtcgccttcggcgcgatcatcttcatgcacaactttatgctggagtcgggtgggatccagacagaaccgttgcatattgccctgtgggggatcccgacggcgatctgcgcctttctgatccacgccgcgcgcctgtggcgactcgatcgccatctccagcgcgagctggaccggataaacgccggacaggcgaaaggcggtgcggcatgaatttccagcaaacctatttatactggctggccggcgcggtactgctggtcgtggctatcatgtcctggcgcgacaaaagcaatccgcgacgtctgacaaccggtctgttctggggcctgtacgggctggtgttcttgctcggcgactggacatatcaactggtgggcgataagcgtacggtgaatatcgctgtcggcggggtggtggtcgtcctggcgctgatcgccggttttggcggcgtgcgcctcggcagctaccatcagcgtacccaggaagagaaaaccgccagcgcgaaacgcctcggcaacaaacttttctttccggcgctggcgattccggtcgtcaccgtcattggcgtactgctgtttaacaatctgccctcatggcaggtggcgctcttcgggccgggcaaccacgcgacgctgattactctgttctcgatgactgtcggtacgctgattggcctggcgatggcgattcgtatgacgcatgaaacggtggcgcagccaatgcaggaagcgcgccgtttgcttgattccgtcggctgggcctttatcctgccgcaaatcctcgcggtgctggggctgctgtttaccgcagcgggcgtcggaaccagcatttcatggctgaccgagcactatctggcggtcgataaccgctttatcgccgtggctgtgtatgccatcggcatggcggtgctgacaatggtgatgggcaacgcctttgccgctttcccgattgtgaccgccggagttggcattccgattttagtcctgcagcacggcggcaatccggcggtaatggcggcgattggtatgttttccggctactgcggcacgctgatgacgccgatggcggcgaacttcaatattgtcccggcggcgctgctggaactgccggataaaaatgcggtgattaaagcccagataccgaccggtatcctgctgcttatcgtcaatgtattcttactctatttcctgatgttcctgtaaggagggatgatggctggcgtattgattaccggttttgagccgttcggcggcgaaacggttaacccttcatgggaagtggttaagcagctggatggcatgattattcgcggacagcaggtggtggctaaacagttaccctgcgtattcggcgaagcgctgacggtgctgaaggcggcgctggaaacctatcaaccgcggctgacgattgccgtcggacaggccggcggccgtgtcgatattaccgtcgaacgtgtagcgatcaatgtcgatgatgcgcggatccccgacaataaaggccagcaaccgatcgatgaaccgatcgttgctaatggccctgcggcctgcttcagtacgctaccgatcaaagcgatcgtcagcgcgctgcgccagcaggggatcccggcctcggtgtcgcaaaccgcgggcaccttcgtctgcaatcacgtgatgtatggtttgctgcatcagctgcagggaaaaagcgggcagaagggcggttttatccatattccttatctgcctgaacaggcggcggcccacccggggcaggcgagtatgtcggtcgcgacggtacgcgcggcgctggaaacggcgattgccgtcgcccttgaacaggatgacgatgtcaaaattggcggcggcgccacccattaacagaaggatgacagtatgccggaaggtccggagatccgccgtgcggcggataaactggaggcggcaatcaaaggcgaacccttaaccaacgtctggttcgcctttcctcagttgcaaccctatcaaactcagctaattggtcagcgggtgacccatatcgccacccgcggcaaggccctgttaacccacttctccggcggattgaccctgtatagccataaccagctgtacggcgtctggcgtgtggtggatgccggcgttgagccgcaatcgaaccgcgtactgcgcgtcaggctgcagaccgccagcaaggcgattttgctctacagcgcgtcggacattgatatcctcacggcggagcaggttgccaaccatccgttcttgctgcgcgtcggaccggacgtgctggacatgacgttaaccgcggagcaggtgaaagcgcggctgctgtcggccaaattccgcaatcgtcagttttccggcctgctgctggatcaggcttttcttgccgggctcggaaactatctgcgggtggaaattctctggcaggtgggattaagcggtaagcgtaaagccgctgaactgagcgacagtcagctggatgcactggcgcacgcgctgctcgatatcccgcggctgtcctatcgtactcgcggtctggtggatgacaacaagcatcatggcgcgctgtttcgctttaaggtcttccatcgcgatggggaaaggtgcgaacgctgtgggggaatcattgagaagacgacgctctcctcgcggccattttactggtgtccaggatgccagcattaagccggctggcgggcgatttcagcatgaagcgcgttatcaggcataaaaaaacgcgccagcaggcgcgtttttatgatccggacagtgagattaacgcttaatgtcggactggaaatcgcgtttggcgtagccggtatacagctgacgcggacgggcgatcttcatgccatcgctgtgcatttcgttccagtgcgcaatccagcccacggtacgcgccatggcgaagataacggtaaacatggaggacggaatacccatcgctttcaggatgataccggagtagaagtcgacgttcggatacagtttcttctcgatgaagtacgggtcgttcagcgcgatatgctccagctccatggccacctgcagcaggtcgtctttggtgcccagctctttcagcacttcatggcaggtttcacgcattacggtggcgcgcggatcgtagtttttgtaaacacgatggccgaagcccatcaggcggaaagagtcattcttgtctttcgcacgacgaacaaattccggaatgtgctcaacggagctgatctcttccagcattttcagcgccgcttcgttggcgccaccgtgtgccggtccccacagggaggcgatgcccgcagcgatacaggcgaacgggttagcgccggaggagcccgcggtacgtaccgtggaggtcgacgcgttctgctcgtgatcggcgtgcaggatcagaatacgatccatcgcgcgctccagcaccggattgacttcatactcttcgcacggtgtcgcaaacatcatgcgcaggaagttgccggcataggagaggtcgttgcgcggataaacaaacggctggccgatagaatatttgtaacacatggctgccatggttggcattttggacagcagacggtaggcggcaatctcgcggtgacgcgggttattcacgtcgagggaatcatgatagaacgccgccagcgcgccggtgatcccgcacatcaccgccatcgggtgggaatcgcgacggaacgcgtggaacagacgggtgatctgctcatgaatcatggtgtggcgggtgacggtagttttgaattcgtcatattcggcctgagtcggcttttcgccgtacagcaggatataacagacttcaagataattagattcggtcgctaactggtcgatcgggaagccgcggtgcagcaggatcccctcgtcaccatcgataaacgtaattttagattcacaagaagccgttgatgtgaaacctgggtcaaaggtaaatacgccttttgaaccaagactacgaatatcaataacatcctgaccgagcgtgccttttagcacatccagttcaatagcagtgtcaccacccagggtgatttttgctttagcatcagacatttatggtctccttagcgcctttattgcttaagactgccgggtggtggatttgctttcggcccgcgcctgcatacgttaccagtttgttatgttgcacacagctctgcgtcagcgaaaagggcagggtacagagcaacggcgcttgatggcacgtccttcagggctgcggtgaaacaacagcaaatcagcgttttagcagtccgaatattaaaacctatataccactaataactgtcctgattacatcggtcaatactgacacactgttacataacttattctcaggtgaaagagtgaccccataacttttgagcattattgcatttaactggtaatggttgtaacaagaatgtttaatatttgtcaaatcaggtgattaaaaattaaaaaaatgttggtatcgtgaccttgatcactgttccggagaaaacccaacaaactatatgtaggttaattgtaatgattttgtgaacggcctatactgcggccaggtctccggaacaccctgcaatcccgagccacccagcgttgtttagtgatgttttaatgcctgaaaagacgttttaacatgacttctggttatagaaaggacgctgtctgacccgcaagcagaccggaggaaggaaacaataagaacagcatgtgggcgttattcatggtaagaaatgtgaaaaaacaaagacctgtcaatctggatctacaaacgatacggttcccaatcacggcgatagcgtccattctccatcgcgtttccggtgtcatcaccttcgtggcggtcggaattctgctttggctgctgggcaccagcctttcctccccagaaggttttctgacggcggcctccatcatggatagcttctttgtgaagttcatcatgtggggcattctcaccgcgctggcctatcacgtcgttgtcggtattcgccatctgatgatggactttggctaccttgacgaaaccctcgaagcagggaaacgttccgccaaaatttcttttgttattactgtcgtgctttcacttctcgcaggagtcctcgtatggtaagcaacgcctcagcactgggacgcaacggcgtacatgactttatcctggtccgtgctaccgccatcgttctgaccctctacatcatctacatggttggcttcttcgccaccaccggtgaaatctcatgggaagtgtggaccgggttctttgcctccggcttcactaaagtcttcactctgctggctctcgtttccattctcatccatgcctggatcgggatgtggcaggtgttaacagactacgttaaaccactggctctgcgcctggttctgcaactggctatcgttgtggcgctggtggcttacgttctttatggatttgttgtggtgtggggtgtgtaatgaaattgccagtcagagagtttgatgctgttgtcatcggtgccggcggcgcaggtatgcgcgcggcgctgcaaatttcccagagcggacagacctgtgcactgctctccaaagtgttccctacccgttcccataccgtatccgcgcagggtggcatcaccgtcgcgctcggtaactcccatgaagataactgggaatggcatatgtacgacactgtaaaagggtcggactatatcggcgaccaggacgccatcgaatacatgtgtaagaccggcccggaagcgattcttgagctggagcacatgggactgccgttctctcgtcttgacgatggccgtatttatcagcgcccgtttggcggccagtcgaagaacttcggcggcgaacaggcggcgcgtaccgcggcggcggctgaccgtaccggtcacgccctgctgcacactctgtatcagcagaacctgaaaaaccacaccactatcttctccgaatggtacgccctcgatctggtgaaaaaccaggacggcgcggtagtcggttgtaccgccctgtgcatcgagaccggcgaagtggtctactttaaagcccgcgccaccgtgctggcgaccggcggcgcaggccgtatctatcagtccaccaccaacgcccacatcaatacgggtgacggcgtcgggatggccatccgcgccggcgtgccggtgcaggatatggaaatgtggcagttccacccgaccggtatcgccggggctggggttctggttaccgaaggttgccgcggcgaaggcggttacctgctgaacaaacacggcgaacgctttatggagcgttatgccccgaacgctaaagaccttgcgggccgtgacgtggtggcgcgttccatcatgatcgaaatccgcgaaggccgcggctgcgacggtccgtggggcccgcacgcgaaactgaaactggatcacctcggtaaagaggttctggaatctcgtctgccgggtatccttgaactttcccgtacctttgcccacgtcgatccggtgaaagagccgatcccggttatcccaacctgtcactacatgatgggcggtatcccgaccaaagtcaccggccaggcgttgaccgtgaatgagaagggcgaagacgtggtgatcccgggcctgttcgcggtaggcgaaatcgcctgcgtatcggtccacggcgccaaccgtctgggcggcaactcgctgctcgacctggtggtcttcggccgcgcggcgggcctgcatctgcaggaatccattgccgagcagggcacgctgcgcgacgccagcgaatccgatatcgaaggctcgctggatcgcctcaaccgctggaacaacacccgctctggtgaagatccggtggcgattcgtaaagcgctgcaggaatgtatgcagcataacttctcggtgttccgcgaaggcgatgcgatgcacaaaggtctggagcaactgaaagtgatccgcgagcgcctgaaaaacgcccgtctcgacgatacctccagcgagttcaacacccagcgcgttgagtgcctggagctggataacctgatggaaaccgcctacgcgaccgccgtatccgctaacttccgtaccgagagccgtggtgcccacagccgcttcgacttcccggatcgtgatgatgaaaactggctgtgccattccctgtacctgccagagtcggaatccatgacgcgtcgtagcgtcaatatggaaccgaaactgcgtccggcattcccgccgaagattcgtacttactaatgcggagacaggaaaatgaaactcgagttttcaatttatcgctataacccggatgttgacgacgctccgcacatgcaggattacacccttgaagcggaagaaggtcgcgacatgatgctgctggatgcgctgatccagctgaaagaaaaagatccgtcgctgtcgttccgccgctcctgccgtgaaggggtctgcgggtccgatggtctgaacatgaacgggaaaaacggtttggcgtgcatcacgccaatctccgcgctgaatcagccgggcaagaagattgttatccgtccgctgccaggattaccggttatccgtgatttggtggtggacatggggcaattctatgcacaatatgagaagattaagccttacttgttgaataatgggcaaaatcctccggctcgcgagcatctgcagatgcctgagcagcgtgagaaactcgacgggctgtacgagtgtattctgtgcgcctgctgttcgacctcgtgcccgtcgttctggtggaacccggacaagttcatcggcccggctggcctgctggccgcgtatcgcttcctgatcgacagtcgcgataccgaaaccagcgagcgcctggacggcctgagcgatgctttcagcgtattccgctgtcacagcattatgaactgcgtcagtgtgtgtccgaaggggctgaacccgacgcgcgccatcggccatattaagtcgatgctgctgcagcgcagcgcgtaagcaacacggtctgtcccggatggcgctagcgcttatccgggctaccaaagcagtagccccggcaagcgttagcgccgccgggggatatagcaggaaatctttaaaaaccgccacaagatgtaccagtaatcgaggcgttcagtgcgaggtaaggcggcaactgagcgcatccccgggagcatagtgaactatgtgaccggggtaagcgaaggcagccaacgcaaccgcagcctgaacgctgaagattaatggcagtttttaaaggttccttagcggatagaaaccacaactcgtccgcaacaagtgaaccccggcacgtgcactcggtgtgcgtggtagtttctacggcgaaataagcatatgaatgcttaagggatcacgatgcagaacggcgcaatgaaagcctggctggactcttcttacctctctggttcgaaccagagctggatagaacagctctatgaagacttcttaaccgatcctgactctgttgacgccaactggcgttcaatgttccagcagttacctggcaccggagttaaaccggatcaatttcattccaaaacgcgtgattatttccgtcgactggcgaaggatgcctcacgttacacttcttcgatttccgacccagacaccaatgtgaagcaggttaaagtcctgcagctcatcaacgcataccgtttccgtggccaccagcatgcgaatctcgatccgctggggctgtggaagcaagagagagtggcggatctcgatccggcctaccacgatctgaccgaggccgatttccaggaaagctataacgtaggttcatttgccatcggtaaagacacgatgaagctgggcgagctgattgccgccctcaagcaaacctactgcggctccatcggcgcggaatacatgcatatcacctctaccgaagaaaaacgctggatccagcagcgcattgaatcggtagctggcaaagcgagctttaccgcggaagagaaaaaacgcttcctcagcgaactgaccgccgcggaaggtctggagcgctacctcggcgccaaattcccgggggcgaagcgcttctcgctggagggtggcgacgccctgatcccgatgctcaaagagatgatccgccatgcaggcaaaagcggcacccgcgaagtggtgctgggcatggcgcaccgcggccgtctgaacgtgctggtcaacgtgctgggtaaaaaaccgcaggacctgttcgacgagttcgcgggcaaacataaagaacacctcggcaccggcgacgtgaagtaccacatgggcttctcttccgatatggaaaccgaaggcggtctggtgcacctggcgctggcgtttaacccgtcgcacctcgagatcgtcagcccggtggttatcggttccgtacgcgcccgtctggatcgtctggacgagccaagcagcaacaaagttctgcctattaccatccacggcgacgccgccgtcaccggccagggcgtggttcaggaaactctgaacatgtccaaagcccgcggttacgaagtgggcggtaccgtgcgcatcgttatcaacaaccaggtgggcttcacgacctctaacccgctggatgcgcgctcaacgccgtactgcaccgacatcggtaaaatggtgcaggcgccgatcttccacgtgaacgcggacgatccggaagcggtcgccttcgtcacccgtctggcgcttgatttccgcaatacctttaaacgcgatgtcttcattgacctggtgtgctaccgccgtcacggccacaacgaagccgatgagccgagcgcaacccagccgctgatgtatcagaagatcaaaaagcatccgactccgcgcaaaatctatgctgacaagctggagcaggagaaggtggcgactctggaagatgcgaccgagcaggttaacctctaccgcgatgcgctggatgccggcgaatgcgtggtgcaggaatggcgtccgatgaatatgcattcctttacctggtcgccgtacctcaaccacgagtgggacgagagctatccggataaagttgagccgaaacgtctgcaggagttggccaaacgcatcagcacggtaccggaaggtatcgagatgcagtcccgcgtggcgaaaatttatgccgaccgccaggcgatggcggcaggcgagaagctgtttgactggggcggtgccgaaaacctggcctacgccacgctggttgacgaaggtattccggttcgtctgtccggcgaagactccggccgcggcaccttcttccaccgtcatgcggtgatccataaccagaccaatggttcaacctacacgccgctgcagcatgtccataacggccagggccagttccgcgtttgggactcggtgctgtccgaagaagcggtgctggcgttcgaatatggttacgccaccgccgagccgcgcactctgaccatctgggaagcgcagtttggcgacttcgccaacggcgcgcaggtggtgatcgaccagttcatctcctccggtgagcagaagtggggaaggatgtgcggcctggtgatgctcctgccgcacggttacgaaggccagggcccggagcactcctccgcgcgtctggagcgttatctgcagctgtgcgctgaacaaaacatgcaggtctgcgtgccgtccacgccggcacaggtttatcacatgctgcgtcgccaggcgctgcgcggtatgcgtcgtccgctggtggtgatgtcgccgaagtcgctgctgcgtcatccgctggcggtttccagcatggatgagctggcgaacggcactttcctgccggctattggtgaaatcgatcaacttgatccgcaggctgtgaagcgcgttgtgctgtgctctggtaaggtttactacgacctgctggaacagcgccgcaaaaacgagcaaaaagatgtcgctatcgttcgtatcgagcagctctatccgttcccgcatcaggcggtgcaggaagcgctgaaagcgtatgcgcacgtgcatgattttgtctggtgccaggaagagccgctcaaccagggcgcatggtactgcagccagcatcacttccgtgaagtgattccgtttggggcctctctgcgttatgcaggccgcccggcctccgcctctccggcggtagggtatatgtccgttcaccagaaacagcaacaagatctggtcaatgacgcgctgaacgtcgattaattaaaggatacacaatgagtagcgtagatattctggttcccgacctgcctgagtccgtagctgacgcaaccgtcgccacctggcacaaaaaaccgggcgacgcggtcgtccgtgacgaagttctggtcgaaatcgaaactgacaaagtggtactggaagtaccggcatcagcggacggcattctggatgcagtgctggaagacgagggcgccaccgtcctgtctcgccagatccttggccgcctgcgcgaaggcaacagcgcaggtaaagaaagcagcgagaaagccgatgcgaaagcgtccactccggcgcagcgtcagcaggcctctctggaagagcagaacaacgacgcgctgagcccggcgatccgtcgtctgctggctgaacacaaccttgacccagcggccatcaaaggcactggcgtcggcggccgtctgacccgcgaagacgttgagaaacatctggcgaaagccccggcgccggcagaagccaaagcgccagccgccgccccggcagccgcgccggcgccgcagctgggccaccgttcggaaaaacgcgtcccgatgacccgcctgcgtaaacgcgtagccgaacgtctgctggaagcgaaaaactctaccgccatgctgacgacctttaacgaagtcaacatgaagcccatcatggatctgcgtaagcagtacggtgaggcgttcgaaaaacgtcatggcatccgcctgggctttatgtccttctacgtgaaagcggtagtggaagcgctgaaacgctatccggaagtgaacgcttccatcgatggcgacgacgtggtgtaccacaactacttcgacgtcagcatggccgtttccactccgcgcggtctggtcaccccggttctgcgtgacgtcgacctgctgggcatggcggatatcgaaaagaatatcaaagagctggcagtgaaaggccgcgacggcaagctgaccgtagacgacctgaccggcggtaacttcactattaccaacggcggcgtcttcggctccctgatgtccacgccgatcatcaacccaccgcagagcgctattctgggtatgcatgccattaaagaccgtccgatggcggtcaatggcaaggtagagatcctgccgatgatgtacctggcgctctcctatgaccaccgtctgatcgacggacgtgaatcggtaggcttcctggtggcgattaaagagctgctggaagatccgacccgtctgctgctggacgtgtagtcagcaagcgtattacctaccgtaggccggataacacgcgttagcgccgttatcaggcctacaggtttaaagataattacaccctgaaggatggactgaacacatgaacttacatgaatatcaggcaaaacaactttttgcccgctatggcttaccggcgccggtgggttatgcctgtactactccgcgtgaagcagaagaagccgcttcaaaaatcggcgcgggtccgtgggtagtgaaatgtcaggttcacgctggtggccgcggcaaagcgggcggtgtgaaagtagttaagagcaaagaagagatccgcgcatttgccgagcactggctgggcaaacgtctggtgacctatcaaacagatgcgaacggccagccggttaaccagatcctggttgaagcggcgaccgatattgacaaagagctgtacctgggcgcggttgttgaccgcagctcccgtcgcgtggtgttcatggcgtctaccgaaggcggcgtggaaatcgagaaagtggcggaagagaccccgcacctgatccacaagatcgccatcgatccgctggcgggcccgatgccttaccagggtcgtgaactggcgttcaaactgggtctggaaggtaaacaggttcagcagttcaccaagattttcatgggtctggcgaccattttccttgagcgcgacctggcgctgatcgagatcaacccgctggtgatcaccaagcagggcgacctgatctgcctcgacggcaaactgggcgctgacggcaacgcgctgttccgccagccggatctgcgcgaaatgcgcgatcagtctcaggaagacccacgtgaagcgcaggcggcgcagtgggaactgaactacgtcgcgctggacggcaacatcggctgcatggttaacggcgcaggcctggcgatgggtaccatggacatcgttaagctgcacggcggcgaaccggctaacttcctcgacgtaggcggcggcgcgaccaaagagcgcgtgaccgaagcgttcaaaatcatcctctctgacgacaacgttaaagcggtgctggttaacatcttcggcggcatcgtgcgttgcgacctgatcgctgacggcatcatcggcgcggtagcggaagtaggggttaacgttccggttgtggttcgtctggaaggtaacaacgccgaactgggcgcgaaaaaactggctgacagcggcctgaatattattgcagcgaaaagtctgacggacgcagcacagcaggttgttgccgcagtggaggggaaataatgtcagttttaatcaataaagataccaaggttatctgccagggcttcaccggtagccaggggaccttccactctgaacaagcgatcgcttacggtacgcaaatggttggcggcgtgacgccaggcaaaggcggcaccactcacctgggcctgccggtgttcaacaccgtgcgcgaagccgttgaagcgaccggcgcgaccgcgaccgtgatctacgttccggcgccgttctgcaaagattccatcctggaagcgatcgacgcgggcattaagcttatcatcaccatcaccgaaggtatcccaacgctggatatgctgaccgtgaaggtgaagctggacgaagcgggcgtgcgtatgatcggcccgaactgcccgggcgttatcactccgggcgagtgcaaaatcggcatcatgccgggtcacattcacaagccgggtaaagtgggcatcgtttcccgttccggcaccctgacctatgaagcggttaagcagaccaccgactacggcttcggccagtctacctgcgtcggtatcggcggcgacccgatcccgggctccaacttcatcgatatcctgaagatgttcgaggaagatccgcagaccgaagcgatcgtcatgatcggtgagatcggcggcagcgcggaagaagaagcggctgcttatattaaagatcatgtcactaagccggttgtcggctacatcgcgggcgttaccgcgccgaaaggcaagcgtatgggccacgcgggcgctatcatcgccggcggtaaaggtacagcggatgagaaattcgcagcgctggaagcggcgggtgtgaaaactgttcgcagcctggccgacatcggcgaagcgctgaaagctattatcaagtaaaccctctctgcttgtccgcaagcagaaatctgtccgatttcgacatggttggccaccgtcaggtggccttttttgtgaccgttatcccgtctcgtcagaaccgcagcgccaacaacgaattgattttctgcgaaaagccctatctatcatattgatttaatttattatttaataagtattttcgatgcgctgtactggctaaaaaatatatcccggctgtaccgttgggaaacaaaagcggcagcgaaaaagcgtggggcaggggataaggaagaagataaaatactgtgagcggtctaacattattcggatcggttccttttttttgttttttttccacgacgttaaataatattacctatgattctcatatctctctttttagtaactggaaaagccatagtttaaacacttaattaacattaagttcaccaatattctttattgggctacataattaacacatagagtaaaaattgatttatatcaatacttaatccttggaaaaatccctcaaaaaacgttaaattgtctcaagtcaaattggctgaattcagccatcttcactatatattgatcaccgtcgaaaaatgtaaaactggaacaataaaaacatatttattgtaaggttattgcggcgtaatatattggggaatcaattgggtttttcgttaacgtatttgtaaccttaccctggcatggttttaccttcgattgaaacctgctgtggacgggcgacaaataaatttgtattggggcatgcgtatgagccagagcttctcggttcattttcggagtcttcatgcgatgagcaaggagtcatgatgttagatatagtcgaactgtcgcgcttacagtttgccttgaccgcgatgtaccacttcctgtttgtgccgctaacgctcggtatggcgttcctgctggccatcatggaaacggtctacgtcctttccggcaaacagatttataaagatatgaccaaattctggggcaagttgtttggtatcaacttcgcgctgggtgtggcgaccggtctgaccatggagttccagttcgggactaactggtcgtattactcacactacgtgggcgatatctttggtgcgccgctggccattgaaggtctgatggccttcttcctcgaatccacctttgtaggtctgttcttcttcggttgggatcgtctgggcaaagttcagcacatggccgtcacctggctggttgcgctgggttccaacctctccgcgctgtggatccttgtcgccaacggctggatgcagaaccctatcgcatcggacttcaacttcgaaaccatgcgtatggagatggtcagcttctctgaactggtgctcaacccggtcgcccaggtgaaattcgttcacactgtggcgtcgggctatgtcaccggcgcgatgttcatcctggcgattagctcctggtacatgctgaaaggtcgcgacttcgcctttgccaagcgctcctttgccatcgcagccagcttcggtatggcggcgatcctctccgttattgtgctgggtgacgaatccggttacgaaatgggtgacgtgcagaaaaccaaactggcggctatcgaagcagagtgggaaacccagcctgcgccggcggccttcaccctgtttggtattcccgatcagaatgcgcagaccaaccactttgcgatccagatcccctacgcgctgggcatcattgctacccgctcggtggacaagccggttatcggcctcaaggatctgatggttcagcacgaagagcgtatccgtaacggcatgaaagcctacgcgctgctggaacagctgcgcgccggttcaaccgatcaggccgtgcgtgaccagttcaataacgtgaagaaggacctcggttatggcctgctgttgaagcgctataccccgaacgtcgctgacgccacggaagagcagatcgccaaagcgaccaaagactccattccaagcgtcgcaccgctgtacttcgccttccgtatcatggtggcgtgcggcatcctgatgctgctgattataggcgcctccttctggagcgtgatccgtaaccgcatcggcgagaaaaaatggctgctgcgcgccgcattctacggcctgccgctgccgtggattgccgtggagtcgggctggtttgttgccgaatacggccgtcagccgtgggcgattggtgaggtcctgccgacggcggtggctaactcatcattgaccgcgggcgacctgatcttctcaatgttgctgatctgcggtctgtacacgctgttcctggtggctgaactgttcctgatgttcaagtttgcccgcaaaggacctagcagcctgaaaaccggccgctatcactttgaacagtcctctgcggctattcagtcgacacgctaagacaggagtcgtcaaatgatcgattatgaagtattgcgttttatctggtggctgctgattggcattctgctgattggttttgccgtcgccgacgggttcgacatgggggtgggcatgctcacccgcttcctcggccgcaacgacaccgagcgtcggattatgatcaacgccatcgccccgcactgggacggtaaccaggtgtggctgatcaccgccggtggcgcgctgttcgctgcctggccgatggtttacgccgcggcgttctctggcttctatgtggcgatgattctggtgctggcctcgctgttcttccgtccggtcggttttgactaccgttccaagatcgaggacacccgctggcgcaacatgtgggactggggcatcttcatcggtagcttcgtgccgccgctggtgattggcgtggcctttggcaacctgctgcagggcgtgccgttccacgtcgatgaatacctgcgtctgttctataccggtaacttcttccagttgctgaacccgtttggtctgctggccggtatcgtcagcgtggcgatgatcctgactcagggcgccacctacctgcagatgcgtaccgtaggcgaactgcacctgcgtactcgcaccgtttccatggtggcggcgctggtgacgctggtctgcttcgcgctggcgggcgtgtgggtctactacggcatcgacggctatgtggtgaaatcggtgattgaccataccggcccgtctaacccgctgaccaaggaagtggtgcgggaagctggcgcgtggatggtgaactttaacaatatgccagcgctgtgggcggtgcctgccctgggcgtggtgttgccgctgctgaccgtcgtttcgaccaaagcggataaaggtgcctgggcattcctgttctcctcgctgaccctggcctgcatcattctgactgccggtatcgcgatgttcccgttcatcatgccgtccagcaccatgctgaacgccagcctgacgatgtgggacgcgacctccagtcagcggacgctgaacctgatgacctacgtggcgattgttttcgtgccgatcattctggcctacaccagctggtgttactggaagatgtttggccgcatcacgcgcgaagacatcgaaaagaatacccactcgctgtactaaggtaaggagctatatatgtggtacttcgcatggattttgggaacgcttcttgcctgtgcttttggggtcattaccgcgctggcgcttgagcacgtggaagccaccaaagccgggaagaaagaagaaatctgatgaaatttatcgctactctgtacgcgataatggacaagcgcccgctccgggcgctttccttattgatggcgctgctgctggctggctgcattttctgggatccgtcgcgctttgcggcgaagaccagcgagctggaaatctggcatggtttcttgctgatgtgggcggtttgcagcggcgttattcacggcgtgggctttcgcccgcgtgccgttcactggcaggggattttttgtccgcttatcgctgatatcgtgctcgctttaggtctcttctttttcttcttttgaataagagatctctgttaatgctatgggcttgcataagcccataaaaatttacgccccgtttactttcccccattccaaaccacctttcccgcgcgtatagtagcgaagtttgaaagctctaacctttttttgcattaccgggatgtaaagtgaatacaacgctgtttcgatggccggttcgggtctactacgaagataccgatgccggtggtgtggtttaccacgccagttacgtcgctttttatgaaagagcacgcacagagatgctgcgccaccatcactttagtcaacaggtgctgttggctgaacgcgttgccttcgtggttcgcaaaatgacgctggagtattttgcccccgccagactcgacgacatgctcgaagtccagacggaaattacctcgatgcgcggcacctctttggttttcacgcagcgaatcgtcaacgccgagaatacagtgttaaacgaagctgaggttctcattgtgtgcgttgatccactcttaatgaagccacgtgcgcttcccaagtctattgtcgcggagtttaagcagtgactgacatgaatatccttgatttgttcctgaaggcgagccttctggtaaaacttatcatgttgattttgattggtttttctatcgcttcctgggctatcattattcagagaacgcgtatccttaactcggccgcgcgtgaagctgaagcgttcgaggacaaattctggtccgggatcgagctctctcgtctgtaccaggagagccaggggcgtcgcgataacctgaccggttcggaacaaatcttctacagcggtttcaaagagtttgcgcgcctgcatcgggccaacagccatgcgccggaagcgattgtcgaaggggcatcgcgcgcgatgcgtatttcgatgaaccgcgaactggaaacgctggagacccatattccgttcctcggcaccgtaggctcgatcagcccgtatatcggtctgttcggtaccgtctgggggattatgcacgcctttatcgcccttggcgcggtgaagcaggccaccctgcagatggtggcgccaggtatcgccgaagcgctgatcgccaccgcgattggtctgttcgccgcgatcccggcggtcatggcgtataaccgcctgaaccagcgcgtgaacaagcttgaactgaattacgacaactttatggaagagttcaccgctattctgcaccgtcaggcctttaccaccagcgaaagcaataaggggtaagccatggccagagcacgtggacgcggacgtcgcgaactgaagtccgagatcaacatcgttccgctgctggatgtcctgctggtgctgctgctgatctttatggcaacggcgccgatcattacgcagagcgtggaagtcgatctgccggacgccacggaatcgcaagcggtgaaaagcaatgacgatccgccggtgattgtggaagtctccggggtagggcagtacagcgtgaaggtggggcaggagacgctgtcccagctgccgccggagcaggtaattgccgaagcgaagcgtcgtcttgaagccaatgaaaaaacggtattcctgatcggcggtgcgaaagacgtcccttacgatgaaattattaaagcgctgaacctgttgcatagtgcaggggttaaatcggtcggcttgatgaccaaacctatttaatcgcttcaggtaggtgcgtccgtgcggcgtccggtggcgggtatcgctcgccgtcggtgcgcatcgcggatacaggcgaacagtttttgggaaccgatagtgtcaaaggcaaccgaacaaaacgacaagcttaaacgagcgatcatcatttcagtcgcgctgcacatcattctgatcgcgctgctgatctggagttcgtttgacgagcatctggatgcctctgccggcggcggcggcggatcgtcgattgatgccgtcatggtcgatccgggggcggtggtaaataactataaccgtcagcaacagcagcaggccagcgcacgtcgcgccgctgaacagcgtgaaaaacaggcgcagcagcaggcggaagagttacgtgagaaacaggcggcggaacaggaacggctgaaacagctcgaacaggagcggctgcaggcgcaggaagcggcgaaagaagcgaaggagcagcagaagcaggctgaagaagcggctgccaaggccgccgcggcggcaaaagccaaagcggacgcacaggcaaaagaagcgcaggaagccgctgccaaagcggccgccgaggcgaaagcgaaggcggatgcccaggcgaaagcggcagaacaggcggcggccaaggcggctgctgacgcgaagaagcaggccgaagccgctgcagcgaaagccgctgccgaggcgaagaaacaggcggaagctgaagcggcgaaagctgcggccgaggcgcagaagaaagcggaagcggcggctgcgaagaaagcgcaacaggaagcggagaaaaaagcccagcaggaagcggctaagcaggcggcagctgaaaaagcggctgctgagaaagccgccgcgcaaaaagcggccgctgagaaggccgccgccgagaaagccgcagccgctgaaaaagcggcggcagcgaaagcggctgcagcagagaaggctgcagctgataaagcggccaaggcggcagcagcaaaagccgcggcggcgaagaaagcggcggctgcgaaagaagcggacggcgttgacaacctgctcggcgatctgagttctggtaagaatgcgcctaaaacaggcggtggggccaaaggaaacaatgcctccgctgccgggagtggtaatactaaaaacagtgcctcaggggctgatatcaacaactatgccggacagataaaatcggcgattgaaagtaagttttatgacgcatcgtcctatgcgggcaaaacatgtaccttgcgtatcaaacttgctcctgacggtctgttgttaaatatacagtccgaaggtggtgatcctgctctgtgccaggccgctcttgccgcagcccgacaggctaagtttccgaaaccacctagccaggcagtatatgaagtcttcaaaaatgcgccactggacttcaaacctcagtgacatttttccccgtgcaaacggggaaaaacaatctatggtagtcacagggttttggtagttttgtatatttgagtttgttaacattctgctaaattatcgtgggctttctgcccggataagggagatatgatgaagcaggcattacgagtagcatttggttttttaatgctgtgggcggcggtgctgcacgcagaagtacgtatcgagatcacccagggggtggactcggcgcgccctatcggcgtggtaccgttccagtgggccggccagggcgctgcgccggaagatgtcggtggtatcgtggcagctgacctgcgcaacagcggtaaattcaatccgctggatcgctctcgtctgccgcagcagccgaccagtgcccaggaagtgcagcctgctgcctggtctgcgctgggtattgacgccgtagtcgtcggccaggtcacgcaaaatccggatggttcttatcaggttgcgtatcaactggtggacaccggcggagcgccgggcacaacgctggcgcaaggttcttttaaagtcactaagcagtacctgcgctatgcggcgcacgcggccagcgacgcggtatttgagaagctgaccggcatcaagggcgccttccgtacccgtatcgcctacgtggtgcagaaaaacggcggccagtacccttacgaactgcgcgtgtccgactacgatggttacaaccagttcctggttcaccgttcctcccagccgctgatgtccccggcctggtctccggacggttctaaactggcctacgttacctttgaaagcggtcgttctgcgctggtggttcagaccctggcgaacgcctctgtgcgtcagatcgcctccttcccgcagcacaacggcgccccggcgttctcaccggatggttctaaactggcgttcgcgctgtcgaaaaccggtagcctgaacctgtacgtaatggatctgggatcgggtcagattcgtcaggtgaccaacggtcgcagcaacaacaccgaaccaagctggttcccggacagccagaatctggccttcacctctgaccaggcaggtcgtccgcaggtatataaagtcaacattaatggcggcacgccgcagcgtatcacctgggaaggttctcagaaccaggacgccgacgtgagcgcggatggtaaaaccatggtaatggtcagctcggccggcggtcagcagcacattgccaaacaagatctggaaacgggtggtgtacaggttctgtcatcaacgtttttagacgaaacgccaagtctggcacctaacggcactatggtaatctacagctcttctcaggggatgggatccgtgctgaatctggtttctacagatgggcgtttcaaagcgcgtcttccggcaactgatggacaggtaaaatcgcctgcctggtcgccgtatctgtgataataaataattgattattaaaggaatcaaagaaatgcaactgaacaaagtgctgaaagggctgatgatcgctctgccggttatggcaatcgcggcatgttcttctaacaagaacgccagcaacgaccagagcggtgaaggcatgctgggtgccggcactggtatggacgctaacggtaacggcggcaacatgtcttctgaagagcaagctcgtctgcagatgcagcagctgcagcagaacaacatcgtttacttcgatctcgacaagtacgatatccgttctgacttcgctgctatgctggacgcgcacgctaacttcctgcgcagcaacccgtcctacaaagtgactgtagaaggtcacgcggatgagcgcggtacgccggaatacaacatcgctctgggtgagcgtcgtgctaacgccgttaagatgtatctgcagggcaaaggtgtttctgccgatcagatctccatcgtttcttacggtaaagaaaaaccagcagtactgggtcatgacgaagcggcatatgccaaaaaccgtcgcgccgtactggtttactaagagaattgcatgagcagtaacttcagacatcatttattgagtctgtcgttactggttggcatagcggccccctgggccgcttttgctcaggcgccaatcagtagtgtcggctcaggctcggtcgaagaccgcgtcactcaactcgagcgtatttccaatgctcacagccagcttttaacccaactccagcaacaactctctgataaccagactgacattgattctctccgcgggcagatccaggagaaccagtatcagctgaatcagatcgttgagcgccagaaacagattctgctgcagatagatagtctgagcagcggtggcggcgcagcatcaggtgcgcaggctccgtcgtcttctggcgatcagagcgcggctgccaccagcgcagcgccagcggccacctcaggcgccccggcgatgaccggcgatgcgaacaccgattataatgccgctattgccctggtgaaggatgcctcacgccaggatgacgcgatggtggcgtttcaaaacttcgtcaaaaagtacccggattcaacctaccagccaaacgctaactactggctcgggcagttgaactacaataaggggagaaaagacgacgcggcgttttacttcgcttcggtagtgaagaactacccgaaatcgccaaaagcgcctgacgcgatgtttaaagtcggcgtgatcatgcaggacaaaggtgataccgcgaaagcgaaagcggtttaccagcaggtgatcaataaattccccggcaccgacggtgcgaaacaagcgcaaaaacgacttaatgctcttggttgattacggcatgaccagaaatcgcgttatttctggtcttgtcgcctgaatcgccagcagttaagtgatctttatcgaaattttagttgcgctgaattctgaaatcagtaatatatgccgccgttgccaagggatatcaaacaagcccaaagcaatgccagagtgggtcgttagctcagttggtagagcagttgacttttaatcaattggtcgcaggttcgaatcctgcacgacccaccaatcgttctggtggaacgcgatagtaaaacgtgaaggataacgttgcgtcagcaacggcccgtagggcgaggcgaagccgagtcatcctgcacgacccaccgcttagtagtatccagcgtagtatcgggtgattagctcagctgggagagcacctcccttacaaggagggggtcggcggttcgatcccgtcatcacccaccaccgggtcgttagctcagttggtagagcagttgacttttaatcaattggtcgcaggttcgaatcctgcacgacccaccatctttaacatcgaacgtcggtgttaaacgtgaaggataacgttgcttcagctacggcccgaagggcgagcgaagcgagtcatcctgcactccaatcatttttatgatggggtaggtggacgcagtatcggtagtatccagcgcagtttcgggtgattagctcagctgggagagcacctcccttacaaggagggggtcggcggttcgatcccgtcatcacccaccactcgggtcgttagctcagttggtagagcagttgacttttaatcaattggtcgcaggttcgaatcctgcacgacccaccaatttcagcatttaactcagatgctgaacgtgaaggataacgttgcgtcagcaacggcccgaagggcgaggcaaagccgagtcatcctgcacgacctaccaatttctgaattggtgtcgagtgaaattattcaggtagtaccagagcgggtcgttagctcagttggtagagcagttgacttttaatcaattggtcgcaggttcgaatcctgcacgacccaccaatttcagcatttaactcagatgctgaacgtgaaggataacgttgcgacagcaacggcccgaagggcgaggcgaagtcgagtcatcctgcacgacccaccatcctgaatgatggcagcagtaaaatcccgcaaggggtcgttagctcagttggtagagcagttgacttttaatcaattggtcgcaggttcgaatcctgcacgacccaccaatgtaaaaaggcgccctaaaggcgcctttttgctatctgcattttccctgccactcatcaatgttaatactttcttaattcatcattttcccacggtcacgctgcgcttaccgtgcctgcacaggatacgaaccggtcgttcgggcagatgcgcagcaccgtccccgggaaaagggtctgatgtacaaaattcatcacgacttttagctcgtaatcggctatcttgtttagcatataaaacaccatgaccgtattaagccgccgacaggccatactgacggttatagagttaagccagtaaaacgagattgcatgatgagcgtaatgtttgatcctgaaacggcgatttatcctttccctgctaaaccgcagccgctgaccgtcgacgaaaagcagttttaccgcgaaaaaatcaagcgcctgctacgcgagcgcgatgccgtgatggtggcgcattactacaccgatcctgaaattcaacagctggcggaagagaccggcggctgtatcgccgactcgctggagatggcgcgctttggcgcccgccattcggcctccacgctgctggtcgccggggtgcgttttatgggggaaaccgccaaaattctcagcccggaaaagaccattttgatgccgaccctgaacgccgagtgttcattggatctgggctgtccgattgaggaattcaacgccttttgcgacgcccatcctgaccgcaccgtcgtggtctatgccaatacgtccgccgcggtgaaggcccgcgccgactgggtggtgacctccagcatcgccgtggaactcattgaccatctggatagtcttggtcaaaagatcctctgggcgccggaccgccaccttgggcgttacgttcagcgtcagaccggcgcagacgtgctgtgctggcagggggcgtgcatcgtgcacgacgagtttaaaacccaggcgttgatgcggatgaaggctctgcatcccgaagccgccgtgctggtccatcccgagtcgccgcaggcgatcgttgagatggccgatgccgtaggctccaccagccagctgattgcggcggcgaaaagcctgccccagcgccagctgatcgtggccaccgatcgcggtattttctataaaatgcagcaggcggtgccggagaaaacgctgctggaagcgcccaccgccggcgaaggagcgacctgtcgcagctgcgcgcattgtccgtggatggcgatgaatggcctgaaagccattgccgagggtctcgagcagggcggcgctgcacatgaaatccatgtcgacgaagcgctgcgaaccggcgcattaattccccttaaccggatgctggattttgcggctacactacggggataacctattgtcgcgtcgccagacgctgaggggaggaaatggatttttttagcacgcagaatattttagtacatatacccatcggcgctggggggtacgatctctcctggatagaggccgtggggacgattgccgggctgttgtgtatctggctggcgagcctggagaagatcagtaactatgctttcgggctggtcaacgtcacgctgttcgccatcatcttctttcagatccagctgtacgccagcctgctgctgcagctgttcttttttgccgctaacgtttacggctggtatgcatggtcgcgacaaagcagcaaccatgaggctgagctgcagatccgctggctgccgcgcagcaaagcgctgggctggctggcggcctgcgtggtagcgttcggcttgctgaccctgtttatcaacccgttctttgctttcctgacgcggatcgcggtcagcctgatgcaagcgctcggtttgcaggtcactatgccggaactgcagccggatgctttcccgttctgggactcctgcatgacggtgctgtcggtggtggcgatgatcttaatgacccgcaagtatgttgaaaactggctgctgtgggtgatcgtcaacgtgataagcgtggtgatttttgcccgtcagggcgtctatgccatgtcgctggaatacctcttgctgacgttcattgcgttgaacggcagccggatgtggataaacagcgcgcgtgagcgaggttctcacgcgttttctggctaatggtggtggtgatgatcgtgcccggcgtgcatcgtgttgagatggcactccgggccgctgcagggctggtactccatctgcaccgtggcatgcgcaatttcatatttatgttccaggaaatgcaggatgcggttgagtaacgcgtcatggtcgtgcggtggaacgacctgtacatggagcgtcatcaccggtttttcccccaccagccagacgtggacgtggtgaacatcgcgtacctccgggatagagcgacggatatcccgctgcagggccgccacatccagcgaacgcggcgcgccttccagcaattcattcagactctctttcagtaatcgccaggcactacgtaataccaggcaggaaaccagcacggaaagaatcgggtcgacaggcgtccagccggtggtgaggatcaccacggccgccacgatcgcgccgaccgagcccagcaggtcgccaagcacgtgtagcgctgcggcgcgtacgttaagattccgctcctcgctaccccgatgtaggatccaaaacgccagcacgttggccagcagaccggcgactgcaatgaccatcatcgtcacgccggctaccggctgcggatgctggaagcgctgaatcgcctcccagacaatcagcatggtgatcaccaccagagcaatagcattgagaaacgccgccagggtggttaaacgcaaccagccaaaggtatggcgggcatttggtgggcggctggcgaagcgaaccgccagcagcgcaaacagcagagcggcggagtcggtgagcatatggccggcatccgccagcagggccagcgagccggagatcgcgccgccgacggcttcaatcagcataaagccggcggtgacgataaacgcccatagcagccggcgggcgttgctgttatccggagcctggacagaggagtgcgaatgcgagtgcgccatagtgtcgtcccttaatagttatcattattacgctatgacatcataaacagagagcgataaaaaacgaagaaaaggcgagaccggctcgccttttcttcgatctgcccacctcatgtgttactgggtggtgccgtcggttttgctgttgtcttgggtcgtattgccgccgttgtccagttttttaccggtgtccggacagcggccgtctttacacatcgagtttttatgcacctcatcgctcgacatattatcctgggtcatcgtcgagcccgtggtgcccccagagccagagttgatctgactattgtccacgttgttcggcgccacgttctcacgggcatccggcgccacctgaccggcatccgcggaagagttggcctggccattattggactgggcaccggtgtctgccgccagggccgcgccgctggcaagacctaaggtggcggtgagcaaaagggtcgtcagttttttcatattcatcggatactcctgttaagccgggaaggggaaatgcgcttcccgcggtgagtgtgccagggatctgactcgctatggtttaagactccgcagacgatcgcagtgtcactatataatcctgaaacgtaagacttaattagctttaacagttaaatattgtagttcatgagcctggtttcgctactttatggcgtatttttgcctatttccaggattattccatcactactgtaaaatcacgtttacactatttcagcgaagagatagattggagggattgcatttcattgaataagtatggcaacgctggaaagaagatgaattatcagaacgacgatttacgcattaaagagatcaacgaattattacctcccgttgcgctcctggaaaaattccctgctaccgaaaatgctgcaaacaccgttgcacatgctcgcaaagcgatccatcagatcctcaaaggcgacgatgaccgtctgctggtggtgattgggccttgttctattcacgatccggcagcggcgaaagagtatgccgcccgcctgctgaccctgcgcgaggcgctgaagggcgagctcgagatcgtcatgcgggtctattttgaaaaaccgcgcaccaccgtcggctggaaagggctcatcaacgatccccatatggataacagcttccgcatcaacgacgggttgcgcatcgcgcgcaaactgctgctggacattaacgacagcggcctgccggcggcgggggaattcctcgatatgatcaccccgcagtatgtcgccgatctgatgagctggggcgccattggcgcgcgtaccaccgaatcccaggtgcaccgtgagctcgcctccggactctcctgcccggtgggctttaaaaacggtaccgatggcaccatcaaggtggctatcgatgcgattaacgccgccggcgcgccgcactgtttcctgtcggtcaccaagtggggccactccgccatcgtgaataccagcggtaacggcgactgccatattattttgcgcggcggcaaagagcctaactacagcgcgaagcacgtggcggaggtgaaaatcggtctggcgaaagcgggtcttccggcccaggtgatgatcgacttcagccatgccaactccagcaagcagttcaagaagcagatggaagtgggcgccgacgtatgccagcagatcgccggcggcgagcgcgccattatgggcgtgatgattgaaagccatctggtggaaggcaaccagagcctcgagagcggtgaaccgctgacctacggcaagagcgtcactgacgcctgcatcggctgggaggataccgaaacgatcctgcgtcagctggcggaagcggtgaaaacccgccgcggctaagctactccgcgctagcgcaggtcataaaaaaagcgtggagatttccacgcttttttgttctcaccaggagaaattacttcgctttaccctggttggcgacggcagcagctttcgccgcgatctcttccgcgttgcccagatagtaatgtttgatcggcttgaagttttcatcgaactcatataccagcggtacgccggtcgggatgttcagttcgaggatctcgtcttcgcccatgttgtcgaggtatttcaccagcgcgcgcagggagttaccgtgagcggcgatgatcacgcgctcaccgcttttcaggcgcggcagaatggtttcgttccagtaaggcacgacgcggtcgatggtcagcgccaggctttcagtggtcggcagttcggcgtcggtcagttttgcatagcgcggatcgtggcccgggtagcgctcgtcgtctttggtcagctccggcggagtgacagcgaagccgcgacgccactgtttaacctgctcgtcaccgtatttttcagcggtttccgctttgttcaggccctgcagcgcgccgtaatgacgctcgttcagcttccaggatttctcaaccggcagccaggcctgatccagttcgtccagcacgttccacagggtgtggatggcacgtttcagcacggaggtataagcaaaatcaaagctgaagccttcagccttcagcagtttacccgctgctttcgcttcgctaacgcctttctcggacagatccacgtcgtaccaaccggtgaagcggttttcgttgttccactggctttcgccatgacgaaccagtaccagcttagttacagccattctctcactcctctctacacgccatccctcgcgccgcgaacggtgcgctgaatgtgatggtgtatgtgttattgattgataactattctcattatattgccgtgatttggcgcacggcaatgcttatccctaaccatagcgaaaatagtggcgcagtgtaaggtgcttgtaatacacaggttatttttttgtcctttggtgacggaaaatagagcaggttgctgaaaaaagaggcggcagagaggagggcggggacgaaaagcagcgccccctgatggagggcgctggcgattatcgggcgataaactgatattccgtcaggctgacgtactcctggcccggacgtaatacacagtccggctgcggccattgcggatggttcggcgaatccggcaggaattagctctccagcgccagcccctgccagtcggcgtagggctccgtcgtctgcgacggggtgccgccgagatagttgccggagtaaaactgcagcgccggagcggaggtatagaccgtcatctgcagcttgccatcctgcgaccagacctgtgccgcaggctggctggcgtcgcctttggcatccagcaggaaggcatgctcgtatcccttcaccttttgctgatcggcatccgcgaggaagtcggcggcgatggttttcggctggcggaaatcaaagctggtgttagcaacatctttcagttcgccacccgggataccgtcgctttccaccggcagatacctctgggcgaggatctggagctgatgctggcgcacatcgccctgctcaccgtcgaggttgaaatagacgtgattggtcatattcaccgggcagggttggtccacggtggcgcgataggtaatcgcgatgcggttatcgtcggtcagacgatagtgcgcggtggcctgcagggtgcccggaaagccttgatcgccatcgggcgaggtcagggcgaacagcacttcctgctcgtcggcgcggacaatgcgccagcggcgcttatcaaacccttccgggccgccgtggagctggtggcccgcgtcgtttgacggcgtgacgttgacgacctggccgtcaagcgggaaacggctgtggccgatacggttggcgtagcggcctaccgaggcgccaagaaatgcggcctggcgagcatagtcttccagctttgcgcagcccagcagcggtcggcgcaggctgccatcggccagcggcacctcggcgctgagcagcgtcgcgccccagtccgccacggtgacggtcatccccgacttattgcgcagggtcacctgctgccatggctggccgtccggggccagcgcggtggtttgcgttagcattgcccggccccctgtgacggtttgcagacatagaatgtctctttaataccggttttcgcttcatactcgttggcaacggcctgctgaacggtatcgaccagttcttccgggattaacgctaccacgcagccgccaaagccgccgccggtcatgcgcacgccgcccttatcgccgatcgcggccttaacgatctccaccagggtgtcgatctgcgggacggtgatctcgaaatcatcacgcatcgaggcgtgggactctgccatcagctcacccatccgcttcaggtcgcctttttcgagggcgctggcggcttccacagtgcgggcattctccgtcagcacgtggcgtacgcgcttcgcgacgaccggatccagctcatgggcgacggcgttaaattgctcaagggtgacatcgcgcagggcgggctgctggaagaagcgcgcgccggtttcgcactgttcacgacgggtgttgtactcgctgccgacgagggtgcgcttaaagttgctgttgatgatcaccaccgccacgcctttcggcatcgagacggctttggtgcccagcgaacggcagtcgatcagcagcgcgtggtcttttttgcccagcgctgaaatcagctgatccatgatgccgcagttgcagccgacgaactggttttccgcctcctggccgttgagggcgatttgcgcgccatccagcggcagatgatacagctgttggaacacggtgccgacggcgacttccagcgaggctgaggagcttaaccccgcaccctgcggtacattgccgctgatcaccagatccgcgccgccaaagtggctgttccgctgctgcagatgctttaccacgccgcggacatagttcgaccactgctgggtgtcgtggctgataatcggcgcgtcgagagagaactcatcggtctgattgtcgtaatcggcggcaatcacccgcaccgtacgatcgtcgcgcggcgcacagctgatcaccgtctggtagtcgatagcgcaggggagcacaaaaccgtcgttgtaatcggtatgctcgccgatcaggttgacgcggcctggcgcttgaatgacatggctggccgggtagccgaaggcgtcagcgaacagggtttgggttttctctttcagactcatcattacactccggattcacgaaaatggacgtcgctgacggcgcgcagtcgttcggcagcttgctcggcggtcagatcgcgctgagtttcggccagcatctcataaccaaccataaacttgcggaccgtcgcggagcgcagcagcggcggataaaagtgggcatgaagctgccagtggttatggtcttcgtcgttaaacggcgcgccgtgccagcccatggagtaggggaatgagcactggaacaggttgtcgtaacggctggtcagctttttcaacgccagcgccagatcgctgcgctgggcgtcggtgagatcggtaatgcgctgcacgtgcgctttcggcaacagcagcgtttcgaacggccaggcggcccagtagggcaccaccgccagccagtgctcggtgtccaccaccgtgcggctgccgtcggccatttcgcgctgcacatagtccagcagcatcggctggccctgtgcggcgtaatactctttctgcagacggtcttcccgttccgcttcattgggcaggaaactgttggcccacacctgaccatgcgggtgagggttggagcagcccattgctgcccctttgttttcaaaaacctgcacccacgggtagcttttcccgaggtccgcggtctgttcctgccacgttttaaccacgtcttccaacgcttcaaggctcagttccggcagcgttttgctgtggtctggcgagaagcagatcacccgactggtgccgcgggcgctctggcagcgcatcagcggatcgtcactctccggtgcgtccggggtgtcggtcatcagggccgcaaagtcgttggtaaatacgtaggtaccggtgtaattcgggttggtgtcgccggtcacccgggtgttgcccgggcacaggaaacagtccggatcgtgggccggcaaggtctgttttgccggcgtttcctgcgccccctgccaggggcgcttggcgcgatgcggagaaaccagaatccactgtccggttaacgggctataacgacgatgtggatggtcaacggggttaaatacgctcatgaaggttccttagtctggataaccctgcggatgacgggactgccagtgccaggtgtcctgcgccatttcgtccaggttgcgcgttacgcgccagttcagctcgcggtcggccttggcagcatccgcccagtaggccgggaggtcgccatcgcggcgcggcgcgaaatggtagttaatgggtttgccgcaggccttgctgaaagcattgactacgtcgagcacgctgctgccgacgccggcgccaaggttgtagatatgcaccccggctttgtcagccagtttttccatggccgcgacgtggccatcggcgaggtccatcacatggatgtaatcgcgcacgccggtaccatcttcggtcggatagtcgttaccaaaaatggccagcgattcgcgacggccaacggcgacctgggcgatgtagggcatcaggttgttcgggatcccctgcgggtcttcccccatgtcgcccgacgggtgggcgccgaccgggttgaagtagcgcagcagggcaatgctccactccggctgggctttctgcaggtcggtcaggatctgctctaccatcagcttgcttttgccgtaagggctttgcggggtgccggtcgggaagctttcgacatacgggattttcggctgatcgccgtagacggtagcggaggagctaaagttaaagttcttcacgccagcggcgcgcatggcagagactaatttcagtgtgccggtgaggttattgtcgtaatattccagcggcttggcgacggactctccgacggctttcagcccggcgaagtggatcactgcctcaatggcgtgatcgtggaggatctccgtcatcagcgcttcgttacgaatatcgccttcaataaaggtggcttctttgccgccgagacgttcaatcaccggcagtacgctgcgcttgctgttgcagagattgtcgaggatcaccacctcgtgtccctgctgcagcagttgaacgcaggtatgacttccaatgtaaccgctaccacctgtaaccagaactttcatgattcgctccattcggcttatcgtttgtgaggaagatagcatatcaaagaagtgaaaagtgtgacatagcacaagttagtggaatcgtttacactcaagggcgaaatgatatcattgaatatattttgctttaaaaacatgtcattatattattttggcgctatttttctgaaaaataccagggatctttcgatccccggcagggggcgtcaggccacggggccgagctgataagtgtaaccgtctccactgggaacgaacgccaggcgatgggtaatacagtccggggcatcttccgcatggtgcgagacaaacagcagctgtgtggccccttcgccaatcaacacgtcgacaaagcggcgcaccagctggcggttgagggggtccagcccctgcagcggttcatcgaggatcagcagggttggatgcttcaccagcgcgcggacgataagcgccagccgctgctggccccacgacagactgtgaaacggcgcgtcggcggtacgcttatcgatgccgagaatatccagccattgctgcaccagcttatgctgcttgtcggagaccgcctgataaatgccgatcgagtcaaaatagcccgacaggatgacgttgcggacgtttgtgctgacccggtagtccagatgcaggctgctgctgacgtagccgatatgctttttaatatcccagatggtctcaccgctgccgcgccggcggccaaagagcgtgagatcgttgctgtagccctgcggatgatccccggtgaccaggctcagcagcgtagatttaccggcgccgttgggaccgacgatctgccagtgttcgcccggattcacggtccatgagaggtgattgatgaccgggcgatcgttataggagaccacgccgtcgttgagcacgatacgcggcgccgagtctgtcagcgcatgacgggccggtgggacatccggctccggcagggtgatgccgtccagtttttcactgtgcgccagctgggcgaccagcgcctgctgcagcagggaagacttctcgcccgtctcgctaagggtgcagtcagccagcacgccggcgaattgcacaaactccgggatctcatcgaaacggttgagcaccagcaccagggtgatgccggcgctgtgcaggtcggccagcagggcagccagctgctggcgggagttgacgtcgagaccgtcgaaaggttcatcgaggatcagcagttgcggatcggtcatcagggcctgacacagcagggtcttacgcgtttccccggtcgacaggtatttaaaccggcggtccagcagggcgctgatgccaaactgttcggccaggcgcgcgcagcgggcaggatctttcacctcatcctggataatctccgcggtggtgcggccggtgtcttcttcgcctgggctgagcaggtcggtgttattgcgctgccactcgtcgctgaccagcttctgcaattgttcgaaggagaggcgggttacgcgggagaagtggctttcgcgctggccgctgagcagggtcaggtcgccggccagggcccgcgcgagggcggatttgccgctgccgttgctgccgacgaacgcccagctttcacccgccgccacgctcaggtggtctatttttaaggtctttgtatcgctcaggcgaaacgtgccttgcgaaatttgcaatgatgacatgatgtatcccattttttgcagcgatgtgcatcagggatacgacttcaggcgcgtaatgtcaatggggtcagcataacgtcgcgagaatgatgcgatcggcattgaagtaagcgatcgcctccgttccttccgccaggccagcggcctgcgcctgtggcagggtggcgcacagggtttgaccgtccgccagggtcatcagtacttcgcactgtccggacccgcattcgatatgactgatacgtcccgacagctggttatcggcctggcgggctgctgcgggatcgagggtgatgccgacccatggcgctttgagcaggaccagcacctcctggccctcatcgagtcccagcttctcagcgctttgcgcggtgatggcgacgttcaggcgggtttttccgtcagccaacagtacttccacgtgctgctgcacctgctggcgatcgcggccggtaatggtgccgaaccactggttgcgggcgctggtctgcagggaaaagcgcgagatggccgccagcaggctatccagcggcagggcatcgtcatcgctgagtacatcaaacgctttctgctggatctgcgccagcagatcgtacagctggatcagacgctgcccgtagcgggtcagcaccgcgccgccgccgccctttccgccggtggcgcgatccaccagcggctgttcgctgagctggttcatctcattgatggcatcccaagcgctcttatagctgatacccgcatgcttcgccccctggcttatcgaaccggtctggtcaatctgtttgagcagggcgatccgccgcggatcggcaaacaggcgctgctgtagcttaagggtgagaagaatttcggcctgcataatcgtttcctgacaaaaaagggtattgtgaccgatagtcgcccacttgcaaaacctctctgcgcggttggtcattacccaccgcacaaatgggacgtgttttttcggctgaaatcgttacaatcaggaaatcatactatctggagtgaaccatgttagagcttttgaaaagtctggtttttgcggtcatcatggtaccggtggtgatggcggtcatcctgggactgatttacggtcttggcgaagtgttcaacctcttctccggcgtaggccacaaagatcgcagccagcaaaatcactgatttcccggcgcccggtttaaccgggcgctgtgctatttccctcctgtatcatttccttcgttttattgtcctgtgtcactataaaaacgcttcgcatatcgttatattatcgactacataacgcattgacaggagagtaagatggcaggttcttggttacgcggggttgtcggggtatcactcacgctgtgcgtcgcgggtcaggcgctggcggcagagggtaaagtgaccgttttcgccgccgcatcgttaaccaacgcgatgcaggatattgccctggcgtacaagaaagaaaaaaacgtcgaggtcgtgtcgtcgtttgcctcgtcgtcgacgctggcgcggcagatcgaagcgggtgcgccagcggacctgtttatctccgccgatcagaaatggatggattacgcggcagataaaaaggccatcgatccggcaacccgcgccactctgcttggcaacagcctggtggtggtcgcgccgaaagccagtgcgcagggggcgataaccattgatgagaaaaccgactggaccagcctgctgaaaggaggccgtctggcggtgggcgatccacagcatgtcccggccggtatctatgccaaagaagcactgcagaaactcggtgcctgggagacgttgtcgccgaagctcgccccggctgaagacgtgcgcggtgcgctggcgctggtggagcgcaacgaagcgccgctggggattgtctatggctccgatgccgtggccagcaagggggtgaaagtggtcggcaccttcccggaagcctcgcatcagaaagtcgagtacccgctggcgattgtcgatgggcaccgcaatgcggccgtgagcgccttctatgactacctgaaagggccggaagcgtccgctatctttgaacgttacggatttaccacccgctgatgtttctgagcgaacccgaatggcaggcggtgctgctgagcctgaaagtctcctccctggcggtggccttgagcctgccctttggcatctttttttcctggctgctggtccggcgcacctttcccggcaaggcactgctcgacagtattctccatctgccgctggtgctgcctccggtggtggtggcgtacctgctgctggtggccatggggcggcgcgggtttattggcagctggctgtatgactggttcggcatcagctttgcttttagctggcgcggggcggtgctggcggcggcggtgatgtctttcccgctgatggtgcgcgccattcgcctggcgctggaaggtgtggacgtcaaactggagcaagcggcgagaaccctcggggccagccgctggcgggtatttttgaccattacgttgccgttgactctgccggggatgattgtcggcacggtgctggccttcgcccgctcgttaggggagtttggcgcgaccatcacgttcgtctccaatattcccggtgaaacgcgcaccctcccttcggcgatgtacaccttgattcaaaccccgggcggggagggggcggcggcccgcctctgccttatcgccatcggactggcgctggtttcgctgctgatttcggaatggctggcccgcgtgagccgccagcgcatgggaggataatgatgctggagctggactttacccagaccctcggcagtcactgcctgcagatccgtgaaaccctgcccgccagcgggatcaccgccgtctttggcgtctccggcgcgggcaaaacctcgttgattaacgccatcagcggcctgacccgaccccaggcggggcggatcgtgctcaacggcagggtgctgaacgacaccgcgcagcgtatctgcctggcgccggagcagcgccgtatcggctatgtctttcaggatgcgcgcctgtttccccattataaagtgcgcggtaatctgcgctacgggatggcgaaatccatggtcagccagttcgataagctggtggaattgctggggattgcgcccttgctggatcgcctgccgggtcggttatccggcggcgaaaagcagcgagtggccatcggccgcgccctgctgaccgcgccagagctactgctgctggatgagccgctggcctcgctggacattccgcgcaaacgcgagctattgccctacctgcagcggctggcgcaggagattcatattccgatgctctacgtcagccactcgctggatgagatccagcatctggccgatcgtgtgctggtgctggaggccggtaaggtgaaagctttcggtccgctggaggaggtctggagcagcagcgtgatgcacccctggctgccggcggagcagcagagtacgatccttagcgccaccgtcgccgcgcagcacccgcagtatgcgatgacggccctggcgctgggggaccagttgctgtgggtcaaccggctcgaacgtcccgcaggcgacaccgcacggatccgcattcaggcgtcggacgtttcgctgacactggcccagccgtccgggaccagcatccgcaatatcttgcgcgccgaggtggctcagtgtctggaggtcaacggacagattgaagtgcagctcagagtgagtgaccgtctgctatgggccaggattagcccatgggcgcgggacgacctggcgatagcgccaggtcagcaggtgtttgcccagatcaaaagcgtgtcgatcgccgcctgattacagcagttggcggtagataaactcggcgatgctggtggactcattgtcgccgatgactatgttggcgcgggctttcacctcgtccaccgcgttgcccatcgccaccccggtgcccgccgcttccagcatgctaagatcgttgtagttatcgccgaaggccaccacatcctgcatcgacagcccctggtcggccacccattgcgccaggcgtttgcctttgctgttgccggcgcgcgcgatatctacctgatcgtgccacgaccattcgcactcgaggcccagcgtctcgccaacctgctgcgcaaaccgctgcaggcggggaatgtcgtcatcggtgagagcgaatttccataccgcgttaacttcgcgaaccgcctgcgccagcgaatcgacctgagcgaaaactggacgctgatcttccggtaacgcctgcgcccagttgcgggtgcggatcacatgcccggtggggtgttcataaagcatcgcgtcgtccacatatgccaggccgtggatctgctgtttggcgagcatggcagtgaggcttaccgcttgctctaccggcataggatcggcggccaaaaccttttttgcgtgataatcatacaaataggtgccattacaacaaattgcaggtgtatcgagagccagtgcctgataaaaaggatggatagcgacgtgatgacgtccggtgacgacgatgacctgatagcctgcctctctggcgcgggccagcgcctccagcgaagcgggcagaatggtttttttgctggtaagcagggtgccgtctaaatccagggcaatcacgcgtgttgtcatgtgttatttccggttgatgttgaaaagtgacctggccatgatggtacaccgccgtggcgtcaggaccaatttttccacatctgccgtgaatgtctgtatgccctttgtgccgccgtccggcggaaattcggcggacgatgcgagtatcatgggcggatgtcttataattttcagggtgctgttatcctgaaaatgaaaattccacgtgcagtgagggaaggagtagtcatgaaacaaaccgtttataccgccagcccggaaagccaacaaatccatgtctggagtcttgaagcggacggcaaactgacgctggtgcaggtggttgatgccccagggcaggtccagccgatggtggtcagccccaacaaggaatttctgtacgttggcgttcgtccggagtttcgcgtgccggcctatcgcatcacgccggataacggggcgttaacctttgcgggcgaagctgcgctgccgggcagcccgacccatatctctaccgatcaccatggccgctttgtcttcagcgcctcctacaatcagggctgtgtcagcgtgaccccgctgcacgacggcctgccgggcgaaaccatcaccgtggtggaagggctggaaggctgccactcggccaatatctccccggataatcgcaccctgtgggtgccggcgctgaagcaggatcgcatttgcctgtttaccctcagcgacgatggtttcctctcggcacaggagcccgcggaagtgacgaccgtcgagggcgccggtccgcgtcacatggtattccatcccaaccagcagtatggttactgcgtcaatgagctaaacagctcgattgacgtctgggagctgaaagatcctaagggcaacatcgaatgtgtacagaccctggatatgatgccgcctgattttagcggcgtgcgctgggcggcggatattcatatcaccccggatggccgtcatctttacgcctgcgatcgtaccgccagcatcatcacggtgttcagcgtttcggaagatggtagcgtgctggcggtggaaggctatcagcctaccgagacccagccgcgcggctttaacctcgatcacagcggtaaatatctcattgccgccgggcagaagtcgcaccatatcgcggtgtacgacatcgtcggtgagcagggactgctgcaggagaaaggccgctatgcggttgggcaggggccgatgtgggtagtggtcaacgcccactgaaccgccatcaggtaaaagaaaaaacctcgccttagcgaggttttttttgctcagagcggacaggctctgcggagaaggcgttgtcctggcgggccagaagcgtggcgacgttagatatcgtccatggtgtagccaacgacaatctccaacgtttttcggatcacgtccgcggtcaccacgtcatcggtggtttccagcgcctgaatcagccataaaataatggccttattgttcaggtgaccctcggactggagaatactgttgatggcgagcgacatgacggcggactcatcaaccagtttatcaccggcgttacggaaatagtcggagagcgcggtgtcctgcagtcttgcgtaaatatctggttgctgatgcatagtctgtctcatcacattctcactctgtttaattcaccatggttgggataatcagtggatctttttagcttccgacggcatgctgtctggcgccagcgaacctctggtttcccaacggccattgattttctttacctgtaaaggcgcgtacttccgctgacggataagcttcgcgcaaatttcttcgatcacggcagcgatgatctttctacgctggcgatctggttctgtcgcctgcattaaccgaagtcgaaccagcagggtcggggtggtaatcgggcgattcgttttcagaagcgctagaaccgcctcgccgatgatttcatcggttatttcctcagtttcactgttattcataaccgtctctatgcatgccacccttttcctgaataggcgaacggcattcaggtcagcagcaggtttgtggaagcgatcgcccctcatctgctactgcggcgctgcaacaggcgacgatcgatgacgttattcctggccagcaaacagcagaccaattaaggtctgatagtggctctcttcctccggcgcgcgagcgcggtccaggcggctcaacagtttggtgcatagcgctttgcggttgagatgacgcccttcgttaagaatatccatcacgatctgacccagggtttcctgctgggaaggcaaagatgctttgttgaaatactgggcaattgcgttcgctgtatctggaatgtaaccattctgctgcatatgtgctcctttcatttcattcatctgttaactgccattaaacttatacaataattattaacctgtacacacaaagttgcacaataatgattcatgttagtttaactatatgatttttaattgtttaattttttttgcctggcgcggttctggcttgtaaaggtggggtttagcgttgcatgttgtacaaggaaagaaaaaaagggaaaaccttgcacaaaaaagggatttttagtgtatcttttttgttaagacaaaacgtagttttacgagacccttagcctgataactgctactgtgaatgcttatccctcccatctggaatcactatgctaaccaccatcatttatcgcagccatatctgcgacaatgtctcattcaaatcgatcgaggccatggtcgccagggcaaacgaaagaaatgggcaggcggacgtcaccggtattttactttttaacgggacgcatttttttcaactcattgaggggcctgaagaaaaggttcaggatatttatcagcatatctgccaggatcctcgccactataatctggtggagttgctttgcgattatgcgccgtcccgtcgttttggtaaggtcgggatggaactgtttgatttacgcgaacacgatcgcgaggaagttctgcaggcggtgatggaccgggggacgtcaaaatatcagctcacctatgatgaccgggcgctgcaatttttccgtacttttgtcgaagccacagaaaaagcgaactattttgagattccttccgcagatagttgggtttttattcctgataaggagacgttctatcctgataccccgattatcgataatacggaaggttgttcctttgccttccagccgattgtcgaccctttcgcctgcgaaattatttcgtgggaagcgctgttgcgtacaccggacgggcaatcccccggcgcctattttgccgggctgaccggggacgatatttatctcgctgacctgcacagtaaacgggtggcgttgtcgctggcgggaaaattaggtttacgtaataaggcgttaagcattaatttactgccgatgaccatggtcaaagcgccgaatgcggtggctttcctgctcgacgaaattagtcgcaatgaccttattccggagcagattattgtcgagttcactgagcgggaagtgatttcgcggatggacgattttaccgatgcggtgcgcaaactgaagggcgcgggaattaatcttgccatcgatcacttcggcgccgggtttgccgggctatcgctgctggcgcaataccaacccgacagaattaaaatcgaccatgagctgatccgcaatatccaccaggacggaccgcgccagtcgattgtacaggcgattatcaaatgctgtacttctctggagattgcggtctcagccgtcggcgttgagcgtgctgaagagtggatgtggctggaatcagccggtatttcacagttccagggtaatttgttcgccagcgcgcgcctggggggcctacccgccgtcgcatggccggagaaaaaatgaaccaccgcgaaatcagctaaacattttttcatcttttttcccgggcgctgtgagccgcaacctgatatctttatctgtacaagaaaatagagttgtacaggatgcctgaattcgttagtttaggtattaaggtatcaggttgatgtgaggctgctatggcgttttacagtatcggtgaagtcgccgaacgttgcggaatcaatccggtcacactgcgcgcctggcagcgtcgttacggtctactgaaaccgcagcgtagcgaaggcgggcatcgacaatttgatgaagaagatatcctgcgtatcgaagagatcaagcgctggatagagcgcggtgtatcagtagggaaagtcaaagcgctgctggaggataacctgccggcggcgcgcgacgaatccgcgcatcttcaggaagagatgatgtccattctgcgttatatgcagcccgccagaatccgcgccaaattaatggcgctcagtcatcaacaccccgtcgacaccctcatcgatagcctgttagtgccggtacgacagcgtctcaagctggatcagaatacctcgctggtgattagcagcatgctggacggcctgttaattgactgcgtagcgttgtttctcgccgaagcgcgtaaaaaaaatggcaaagagacgctgctggtgggctggagcaatgaggacaggacgcgtctgtggctggaggcatggcgtctttcccaacgcggctggcatgtcaacgttctcgccgaaccgctggagtcgccgcggcctgagctatttcccgggcagcatattttcgtctggaccggacgtgccgccacgcctctgcaggaggagctgctcagccactggcaggagcagggcttcagcatccattttcacggccaaaattaagcgccccgatccgtggtgcggatcagggcttgagtgctgggttacaggtgaatctggctccaggatttgaacgtttcgctgcggctgatattaaaaaaatcggttctaccgctgcagccgagctttttaatcagattcagccggatctgataaatggtttttatatgcaggtttagcgaccggccaatgctggcgaccgcttcgccattgctgataagttgaataactttcttttcccgctcggtaaactgcaccgaggcgcctggcgccggatgggttttgtaatagcgggtgggttgatgcagaaatatctttaactcttccggcgtcgagttggccggtaagcgcagcataggcagttcactaagaaaattaagatcgttgccttcggttaacagaataaataatgtatcccgccgattatagttgtgctgcagtaccgcgaaataattgtcgctggtgaagaaaacatgttttttgcggaagtaagatgccggcaggctattcaggatcagcgacatcccatagagaagaaaaccattatcaaaccacagatcgtaatgctcagaacgatagcaagtattatggtgtgacatttttttgcctcagttagccgatagagacccaggcgcgccggtacagcaggtcgaagcctgctgccagcacagtgggtttatttaatgatgaggtttgctgtacagcatatccagcgcctgcagatagagatcggaaagtatttcgttactttccgtttgcagacgatgctggatttccgtaatcatccgctcattatttaccgttctgtgctgcttaatgagcgtattctcaatattcttcatcagggccgaattgaagacaaactctgctggaatggtatttttaatatgcatagctcgaactctcccacgtataaagcaaacagacaataaaagtcgcagcgtaccgttggtacgcgccaagtcacgaacaggaaatgtataaccaggaaccaccgtccgactcgctgcgcaatcgtcaagcttccccgctttgttgcgcaacaagcagttaacactccaaaactatagacgctgatttcactatgtacaacttttttcattactatatgtacaacgtaacggcttattttttgtgtgtgttttaatttgttgatttatagcaattttattaagtgataacttgtacagaaaagtcgggttgtgcaggatttcgctgtaaaaccagcgggaagaagctgatgatggtagaagaaagccaattgtgaaaattctgtcatggctggcgaaatgcatgaaattgcgccgatgcgcgaaggggtaaacagcaacgctgtcgtcgacaggtggctttcttccgcgtcggagtctgagcatagcggaaaatatgatgaggctttgtctgctttttgcacagtaaggtaaaggggtaacgtctgccatgtcgtaaacggcccattcgatttgttggcgaataagggctgtgctacgctttttggtaacgacgcggcggtttggcatcgttatttttcccccatttccctgtcgagtcttatacccctgtcacgaccggtaaatacggcaaaagctttctgtccctggacaggccttgaggactgaggagggaaaatgcgcggcaaaagcgtgatgctcctggccgggttagcctctctcgcgcaggcgaacgaacttaacctctattcggtgaataccggttcctatgtttaccatctgaccaataatcaaggacaatatacagagaatttcgaaaatcattttttctcagtggagcggaaattctctgcagactccaaatacagccttctgcttggcactatgaataacagcttcaacgatcgctgcctggcgctgggggtgagaagagactggtaccacagcggcagcgggtggaccttcaaaggcgtttacggctataccggcgaattcttcttcgacgcctttgagcattgcggcgatcatggctcctataaagactttaaggacgccacggggatcggcttttcaccctatatctaccacgctatccagtataacttcaccgattatttcgccgttgaaagcggcattattattcccagcgtgtttgtgatcagtatccagtggagcttccgctaaatcgtcccgttgtcggttacaaggtaatcaccttcctgagcagcgtactggagagcgcggcaagggaaatgagcaccgacaggacaaaggtcagcgctattacccccagcttggtggctagcgaatgcacagggatgagcatcaccagcaggtgaaacacggaatagtggaggatataaactccggtcatcgctttactgaccgtcgccagcacggcctctttccactcgcggttctttttaaactgcacggcgttagcggcgatcaccagcaggacgatcaggatataaatttgcgatcccgtgagaatgaacgcattacgatctgctttaaacagggcgaagaagaaatggcgttcataaaaccaggtaaataaatagacaaagggcagggcgataatcgaccctttaatcacctgtgggttgcgtatccactccgcgacctttggatcgttaaacaactgcccggttaaataaaacagtagccatgtccacaggcgatactgcggcggcaaactgaaaagatgtctgtccgggtagatcaccgagagcaggtcgtaaccgtaggagcagcacagcagcgtcaggagcacggcgaaaaagagcccgcgccgctggctgagccaggcgatcaaaggatgaaaggtatagatgacaatcagggcgaaaataaaccagggctggatcaggtagccgcgctggtaaggctcccagacataatagaccgtcacccaaaacagaaagacgatgaccacgcttttaattttaccaatttgccagttggcatcgtggcgcgtctgcgcatcaagatagccggccacgacaaaaaacagcggcgtcgcgatggtcgagataaaggtcagcagcccgaggatccagtgatagtcataatcaaagcgatcccaggtgttatagatggtgaaaaaggtcaccgctgtcatacagcctaatgtcttgataatgctcagaccggtactgttcatcgttgaggcgtcatatccttatggtgaaagcaggcgtaaataaccggcagaaccagcagcgtcagcacggtggcaaaggcgaggccgaacatgatcaccaccgccatactctggaaaaagacatcgcgcagcagcggggccaggccaagtacggtggtgaaggcggtcagcaggatcggccgcagacgagaggttgccgcatcaataatagcttgtcgttgatctttctcctgtttttcttgctctatctcttctaccagcacaatgccgttacggatcagcataccgctcaggctgagcaagccgattaaggccataaagccgaaggggatgccggtaagcagaaagccgggtgtgaccccgatcagcgccagcggaacggtcagccagatggcgacggcgtttttcagcgaactgaacatcagcaccgttatgataaacatcaccagatagccaagcggcagggttgtaaacagcccctgctgcgcctcactggagttctcggcatcgccgccccattcgatacggtagccgtggggcagcggcagtgcgtcaatgcgcggtttcacccgcgcgagaatatcacccgaggtttggccgcttagcgggctggggtcggtctggaccgtcagcacccgggtacgatcccggcggaggatcaacggatcttcccactccagggcgaaaccattgctgacgttactcagcgggatatattgctggcgactctggctccagaccagcacattattcagatggttggcatcctgacgttctgcttccggcggccggacgatcactggcagcagatcggccccttcacgatataacccggcgcgactcccggagaaattcatctccagcgcgttatcaatatcctgtttatccacccccagctcgcgtcccagcgccggggaatactgcgggcggatcactttgctgcggttctgccagtcattacgcacgctgtcggtcgccgggtccgcggcgaggatatcgcctacctgactcgccagcgcgcgcagcgtatccgggtctgggcccttaatgcgcacctcaatcgcgctatctccggaggggccgaacataatgcgtttggtgctggcgttaacctgcgggtagtatctggcaatccagtcctccacgtggcgggtgacaggggcgatgccgcgttgatcatccatccgcaccataatctgcgcgtagttgctgtactggcgctgcccgctgtaggtgagaatgaaacgcatactgccctggccgatggtggagacggtggtgaccacccccggctgaccggctatcgaccgctcgatatcccgggtcatcttctccgtggcgtttatatcggtaccgtagggtagccacaggtcgacaaagaatataggcgtattcgatgacggaaaaaaattctgccgaacaaaggtaaagccccagatcgctccggctaacagcgcgcccatcagcaccagggtcagggtcttttgctgcagcagtattcgcagcgcctgctgatagccacggtaaaagctgccgcggtaaggatcggccttttcctccgcggcggcggccgacggggcgtttttaaacagccaccacttaataagcaccggggtgatggtcagagcggaaaaccagctcagcatcagggagatcagcagcacctggaacagcgatttgcaatactccccggtagagtcctgggagaggccaatcggcgcgaaggcgaggatggcgatgatcgtcgcgccaagcagcggcagggcagagcgacggatcacatagttaatcgcgcccagcagcggagagccttgctgacgggcgatgagcaccccttcgacaatcacaatggcattgtccaccaacatactcagggcgatgataagcgctccgagggagatccgttgtagttcgatcccccagatatacatgataagcagggtgccgagaacgttgagcgccagcgacagagcaataataatcccgctgcgcacccccataaataccagcagcacgccgacgacaatcgccagggccatcagaaaattggtaataaagccattgaccgagtgggcgacctcagctgcctgatcgtaaaaaatagcgatgtcgatgcccgccggtttgtcggcggccatctgctggaggcgggcctcgagagcgtggccgacgtcaataacgttgacgcctgggataaaagaaactcccatggtcaccgcctggcgcccgttggcatgatagatactggccggcgagtcggttagcccgcgcgacagcgtagcaatatcccgcagtcgggtggtggcgctggcgccgtgagggctgaccagtagatctcccagctcatcgatgctctgaaactcaccggtggggtggaggcggatcgattcgctgccaacgcggatctccccggcgctggacaccacgttgagtcgggccaggattgcggcgagctggttgagggtgatcccgcgcgccgtcatcttcgccagcgagatatccacattgatctgctgcggaatgacgccgccgatagcgactttaccgacccccggcaccagcaccagctcccggcgcaactgttcggcatagcgcaccagctccgggttggtaaaactgtcgcccgagatagcgaagaaaaagccaaacacatcgccaaagtcatcgttgacgaaaggggggactacgccaggggggaaaaggcggctggcgtcaccgacccggcgacgtagctcatcccagatttgcggcagctcgctggaatggtactgcgaagcaatattcaccgtaatttgcgataagccattcgaggagatggagctgacgttatccagcgagggaagctgctgaatcgcgttttccagcggcagggtaacctcctcttccacctgctgagcggacgcgccagggtagtgggtgacgatcactgccgttttgatggtgaaggcgggatcttccaggcggccgatattgagcagggcgaacaggccacccacccctaacagcaaaatggctaaccagacgcgggtcgggttgttaataaactgacgggaaatatccatttataatcctcgttcacgcgtccagacccgcaccggctgcccggcatgcagctcgctcacgcccgccgcaaccacctgttcacccgcgcggagaccgtcggtgatcgccactccctgcgaagtcacctcgccgacggtgaccttacgctcctcaagatatcgatgcgcgttatcgcctttcaccacccagactaccggctcgttctttggccggttatcggggttaaacaccgcctccgctggcacaatgagggtttcccgtccggcgctggccggtaaattgccgagattgaccgtcacggtgccgctgaccccgccgacggcgggaaaatcatctggccgcggcatggttaacacgatctgccaggtgagggtgctattgtcgctgctgccggtatgctctttgtattccgcggtaaactcgcggcccggcagggtattgaacctgacgacgggacggtaggcggtattgcggatatccagggaggtgaacagattttcgggaatgctgaagaccacatccagcaggtcggtccgcgtcagggtgatcaccggttggccggcggcgaccacctgatggttgcggatatgcacgccggcggcaatcccgctaaagggcgcgatgaggctcatttgcgccagctcttcgcgagcgatttttaaggccgcattggcggcatcgcgattggcgcgctgcacgtccatctccgcctgggaaatcgcctggcgcccggccagagtctggaagcggtcgaactgacgctgggcgagagtggccgccgtttgccgctcattgacccgttgctgggcctcgcgggcattcaggcgcgccagcgtttgcccctgggcgacgcttgccccctgacgaatatctagcgactccacctggccaccccgcttaaacgacagttcggtggaatcgccagactcaatgcgtgccggaaacgttcgctgctgggtattgcccacggcggtcacctgcgccactttaaccatgcgcggggcggactcgacggtgggtgctttctgatcgcaagcggttgtaaatataataacaaccgggatgagagaaaaataacggttcacaatattcccctcagattcaggatttattttacatttttattacatggcgcctgcttattctgcgagagcggcgacgaccagataagtgaagagccccaccgctgtgcaggcgacaatggccagcgcgacaaacaaacccaggcgtaacaggctataacccaacataatttcctccctttactcccacccgaaccgtgaatgtcatttaattcggcccccactgtgaccaccggacattcggagcggcatgcctgcttgtaatcagcatagtcggagaaaatatgaagtgttaaaaaagagaatgccgcgagcgttggcggcattaaggggaaagcgcaggagatccgcagagaatatgcggtttttataatatttttcagtctattaatccgccattttctaatgttaattttcctgtgctacgtttaataacatctattccgctcgccgcttctgttgttgagatttcgttcctccccaagtaaggggctattcatcactacgcattgtattggtaataaaaggattatctcatgtataaaaatatcgttgttcccgttgacgtgtttgatgcgggcctggccgacaaagcgctctctcatgcgaaattcctcgcccaacattctgccgggcaaattcatcttatccatgttattccggccttttctcctgtattaacccgcggatttatctctgatgcccgaaagatggaagaccatttgcttaataccgctaaggaaaagctgagcgagctggtgaagaaaaatgggcttgcggaagacgccagccatctttatgtgcgcagtggcaatgttcgcgatcaagtgattgccctggccgatgagctgaaagcggatgtggtgattgtcggttcgcgcaatccggggatccagactcatttgctgggctcggaagcggccaatatcgtgcgctatgcccatgtaccagtgttcgttgtgcgctgatgatggcgggatgtcgccctgacttccgcttcagaaatcgagggaaagagtatgaatacagataaaccgggggcgccctattatcagcgctccgtcgaggagactctcgccagcgtgcagagttcgccggaagggattagcggaacagaggcggctacgcgcctgcagcagtatggcgaaaacgccctgccgcagaagccgggtaaacccgcctggctgcgttttattgcccattttaacgatgtgctgatctacgtcctgctggcggcagcgttgctcaaggcggtgatgggccattggatcgacatggcggtgatcctcgccgtggcggtggtcaatgcgctgatcggcttcattcaggagagtaatgcggaaaaatcgctgcagagtatccgcaatatgctgtccagcgaggcggtggcgatccgtcagggcaaccatgaaaccatccccaccacctcgctggtacctggcgatatcgtggtgatccgcgccggcgaccgtatccccgccgatctacgggtgattgaggcgcacaacctgcgggtggaagaggcgatcctcaccggcgagtcgacggtggtggaaaaaaccaccgagccgctaagcggcgatttaccgctcggcgatcgcagcaacctgttgttttccgggaccaccgttagctcaggggcgggaaaagggatcgtggtggccaccggcggcaataccgagctgggccatatcaaccaaatgatggcgggcattgagaaacaccgcacgccgctgctggtgcaaatggacaagctaggcaaagccatctttatccttattctggttatgatggcggcgctgttcgtctttagcctgctgttccgcgatatgccggtctccgaactgatgctgtcgttgattagcctcgcggtggcatcggtcccggaagggttgccggcgattatctcgattattctgtcgctcggcgtacaggcgatggcccgtcagaaagcgattatccgcaagctgccgacggtggaaaccctcggcgcgatgacggttatctgctcggataaaaccgggaccctgaccatgaacgaaatgacggtgaaggcggtgatcactgccgacagcgtctatcgggtggaaggggatagctatgagccggtcggtaagatccacgccattgacgatccgacgccggtcacgatcgcgcccggctcgctgttcgagcgctatctgcgcaccatcgatctgtgtaacgacagccagcttatcaaagaggagagcgggctgtggaaaatcaccggcggcccgaccgagggggcgctgaaggtgctggcggcgaaggtcactctgccgccgctgaccagcgaactgcgcagtaaaattccttttgattcgcaatataaatacatgtcgaccctctaccggctgggtgaagaggaggtaatgctggtcactggcgcgccggatgtcctgttccgcctgtgccagtatcagcagagcgacagcggattgcagccgctggatctcccgtactgggaaggcaaaattgaagagtacgcccgggaagggctacggatggtggccgcagcctggaagccggctgccgcaggccagaccgaactgacccatcaggatctgcagcaaggggtgattttgctaggggtcgccgggatgatggatccgccgcgtccggaggccatcacggcgattgccgactgcctgcaggccgggatccgcgtgaagatgatcaccggcgaccacccgcaaacggcgatgagcatcggcaagatgctggggattggcaatgcgggaaatgccattaccggacgtgagctggaggtgatggacgacgcgcagctgagcgtagccgcgcagcagtttgatatcttcgcccgcaccagcccggaagataagttccgcctggtgcaggctctgcagagtaagaaagaaattgtcggaatgaccggcgatggggtgaacgatgccccggcgttgaagcaggctgacgtcggcgtggcgatggggatcaaggggaccgaggtgaccaaggaggccgccgatatggtgctgaccgatgataacttcgccaccatcgccagcgcagtccgcgaggggcgccgggtgtatgacaacctgaagaaaaccattctcttcgtcatgccgaccaaccttgcccaggggttactgatcgtgatcgcgctgctggcgggcaacgtactgccgctcacgccggtgttgatcctgtggatgaacatggccacctccgccacgctgtcgtttggcctggcgtttgaagccggtgagaaaaatattatgcggcggccgccgcgcgatccgaaaattcacgtgatggacggctttgccatctggcgcgtagcgtttgtggggtcaatgattgcggtcagcgcctttattctcgaagcctggctgcagccgcgcggctattcgccggagtttattcgtaccgtgctgttgcagactctggtcaccgcccagtggttctatatgctgaactgccgcgtatcggatggattctcgttaaccaaaggtctgctggccaaccaagggatctggatcgtcagcggcgtactgctgctgctgcagctgctgattatctacgcgccttttatgcagatgctgttcggcaccaccgggctgccgttccgctactgggtgatcacctttatcatcggcttcgccatgttcctgatcgtggaactggaaaaaccgctgacccgcaaatggcgttccgcctgacggcgtgaagcgctgaacgaaaaagaaaagagggggcatcgccccctctctggctgacgacaaacctgtttcgtcattgtgctcgcatttctgccgggtggcggcattcgccttacccggcctacgaaagacttcaatatcaaaccgttatgcagttatctgtaggcccacgcaagcgcagcgccgccgggcaattcctgaagattgcacgttgtcagcagtttgagagagggcatcgccctctcttttattatggttcacgcttgttgcgctttactgtttcggctcggcgaccacggtgcttcccacgccgcggttattgtactcccacatgcggttgaagccgttgtcgttgaggttgcgctgcagattgcctttgtcatcggcgctgccggtgttgccgctgaacgggcggccggagcctaccgccgccgcccacggctgggcaatattaaagccttcattgatagcgctgtcgcggatcaccacctggccgttgctgttgccatcgacgtccagcgcgcggccgagctgcgcgacgttatccccggaggcggtgaagcggctgttggtcgccaggaagccgtaggtcacgctcttcagagtagccggcgcgaagacgtaggcctctttctgggtacgggaattcaccacgcggaaatcggtgttatcaaacaccaccgcgccgcggccggaaacgatatccacatcgccttcaatgtagctgttggtcaccagggtgcgggtctgacggttgtcctgcagacggttttgcacgccgctgttggtcacgaagaaggtgttttgacggccaagaatattgaccttattgatctgcacctggtcgccatcgctgcgcaatgccaccgcctggtgggtaccggcgtcaacgctgtcgccgaggttgttggcgatggtcaggttctgcagctgcagaccattattctgtgaccagaagactgcggaacacattacgccgacggtcgccgcggatttgctttggcaactgtcgaacatataccacgccggtttacccggcatatatttaccgcctggattgaccagacgacgccaggtgttgcgatccatctcggaatcaatggcttcgctgattttcacgtcgattggcttatcgccagtaccatacagggtcagggcgcccggcgccgccggaacgtagacggttcccgggtactcgcccggcataatcgcgatatacagacgacggttagagtgacgggcaattgccgcatccaccgccgcctgaatggtggtatgggttacgccctgggttcccgcagggccgacgataaagtcaggctgcgccggcaggctgatagcagacggcgtccaggcggcggcgttgggagccagcgactggaaataggccgccggcgtgaagtttttcgcttcttcggcgttgagtatgggacgcgcggtagtgcccggtgcagtctgcgttgagggctgttgatcggcaggcgtcgagctacaggcggacagcgtcacgccgaaggccagcgccagcgccagacgggaaacggaatatgtgttcatgttgctccgggcaaaattaagcgtaatgaaataccccggctgaaacgccagggtataagtcctttaaaacctgctgttttatactaacttgaacgaaacgggaagacgtggacggaaaaacttaccgtctttacgcaacgcgcagccctgccggatggtctttagtcacaaaaaaataacatttccctgcgctattgttgactttaccggcgttatgaaaataaatgtctatacaacccatgacaagttaagcgctatgactgaagccacttccgaactcgttatctggcgaaacgggcgtctcgccaccctgaaccccgatcacgctcaaccttacggcctgctggagcgccatgcgctgctggtgcgcgacggccgcatcgcggcgattgtcgccgaagatgacgtccccagcgggcgcagtatcgatcttgaaggccggttggtaacgccgggattaatcgactgccacacccatctcgtcttcggcggcagccgggcccaggagtgggagcagcggctgaacggcgtgtcgtatcaaaccatcagcgccagcggcggcggcattaactccaccgtgcgcgccacgcgcgacagcagcgaaactgaactactggcgctggcccagccgcgtctggaacgcctgctgcgtgaaggggtgaccaccctggagatcaaatccggctacggcctcgacctgccaaacgaacgcaaaatgctgcgggtcgcccgacaactggccgatcataatggcgtggaactgtcggcgacgctgctctccgcccacgccacgccgccggaatatcaaggcgatgctgacggctatattacgctggtctgcgagaccattttgccgacgctgtggcaggagggactgtttgaaagcgttgacgtcttctgcgaaaacgtcggcttcagcccgcagcaaactgagcgcgtctttcaggcggcgcaggcgctgggcattccggtaaaaggccacgttgagcagctctcgtcgctgggcggcgcgcagctggtgagccgttatcatgggctttccgccgaccatatcgagtatctgacggaagagggcgtggcggcgatgcgcgaaagcggcaccgtggcagccctgctccccggcgcattctacttccttaatgaaacccgtaaaccgccggtcgagctgctgcgcaagtaccaggtgccgatggcggtggcgaccgatttcaaccccggcaccagccccttcgccagcctgcatctggcgatgaacatggcctgcgtcaagtttggcctgacgccggaggaggcgtgggccggggtgacgcgccatgccgcgcgggcgctggggcgccaggccagccacggccagctggcgccgggctttgtcgctaacttcgccatctgggatgctgagcatcccgtcgagatggtgtatgagccggggcgcagtccgctctggcatcgcgttgttcaaggagaattgcaatgatgctgtggcaagctacgccagccagtctctggcagggacgcgacgacagcgcggaagcgcccaatgcgctgcgcctgttccagaccatcgcccgcgcggaacgcttcgcgccgcaggagatgcccggcgatatcgcgctgctcggcttcgcctgtgacgaaggggtccggcgtaacaaggggcgtaccggggcagcggacggcccggcgaccctgcgccgggcgttggccaatatggccagccatcagggtcatgaccgctgcgtggatatgggcaccatcagcgtcgacggcgagcagttagaagtcgcgcatcaggcgctgcgcgaggcggtggccgactgtcagcgggcgggtaaacgcacgctggtcctgggcggcggccacgagacggccttcggccacggcgctggggtactggatgccttcccgggcgaaaaagtgggcattattaatctcgatgcgcatctggatctgcgctttgccgactgcgccagctccgggacgccgttccgccagttggcgctggagtgtgacgcgcagcagcgcggttttcactatacctgcatcggggttagccgggcggcgaacacccaggcgctatgggatgaagcggcgcgccgccaggtggctatcgttgaagatctggaggtgctgacagccttcgaaactcgcgtattgccggagcttgagcgcaatatcgcgcaattcgaccgtctgtatctgactatcgatctcgacgtgctgccggcgcgagaaatgccggcggtgtcggccccggcggcgctgggcgtgccgctggccacgctgctgcgcatcgttgagccgctgtgccgcagcggtaagctgcaggcggtggatctggtggagtttaacccgctgtttgacattgacggtcagggcgctcgcgtggcggcccgtgtggcatggcaaatcgcccattggtggcgctagcgatccgcgctattattttcgtttcgccgctccgcttattacgcataaggaaagccaggccatgtttgcacaacaacctcgttccgcgcccgcgcctttctatgaaaaggtgaagcaggcgatcagcgaaaagatccacagcggcgtctggcgaccgcatgaccgtatcccgtcggaagctgagctggtggcccagttcggcttcagccgaatgaccatcaatcgcgcgctgcgcgagctgacggacgaaggcctgctggtcaggttgcaaggggtgggaacctttgtcgccgagccgaaagggcagtcggcgctgttcgaggtgcgcagtattgccgcagaaattgtcgcccgtcaccatcagcaccgctgtgaggtactcctgctggaggagacccgggcggatcatattcaggcgacggcgctcagcgtcccggaaggcacccgcatttttcactcgctgatggtgcattacgaaaacgaggtgccggtgcaaatcgaagatcgctgcgtcaatgccgcagtggtcccggactatctgcatcaggactacaccgccaccacgccccatgattacctgtcgctgatcgcgccgttaactgaaggtgaacacattgttgaagcggtgcaggccacggcggaagagtgcgcgctgctgcatattcacgcccacgatccgtgcctgctgatccgtcgccgcacctggtcgacaacccacatcgtctcccacgcgcgcctgctgttccccggtagccgatatcgtctgcaggggcgctttggctcctgatccacgctggcgtcagcaaaacgtgattgctgacgcaatataacaaaattgtatcatttctgttaaatcctggcttgcgcatgcttgtatagacaagtatatgtatctacgtaaacaacgttcattgtcaggagaaaccccgatgtcgcaaagcaaatatcgccagctggacgtccgtgcgccaagaggcacgacgctgaccgcgaagagctggctgaccgaagccccgctgcgtatgttaatgaataatcttgatcccgatgtcgccgaaaacccgcacgagctggtggtctatggcggtattggtcgcgcagcgcgcaactgggaatgctatgacgctatcgtgaaggcgctgaagaacctggaaagcgatgaaaccctgctggtgcagtccgggaagccggtgggcgtattcaaaacccatgaaaactcaccgcgcgtgctgatcgccaactccaacctggtcccgcactgggccacctgggaacactttaacgagctggatgccaaagggctggcgatgtacggccagatgaccgccggcagctggatctacatcggcagccagggcatcgtgcagggtacctacgaaaccttcgtcgaagccggtcgccagcactaccagggcagcctgaaaggccgctgggtattgaccgccggtctgggcggcatgggcggcgcgcagccgctggccgcgacgctggccggcgcctgctcgctgaatatcgaatgtcagcagagccgcatcgatttccgtctgcgtacccgctacgtggatgagcaagccacctcgctggatgacgccctggcgcgcatcaaaaaatacaccgccgaagggcgggccatctctatcgcgctgtgcggcaacgccgcggagatcgtaccggagctggtgaagcgcggcgtgcgcccggatatggtcaccgaccagaccagcgcccacgacccgctgcatggctatctgccgaaaggctggagctgggaagagtatcagcagaaagccgaatccgacccgcagggcactattctggcggcgaaacgctcgatggccgatcacgtgcaggcgatgctggccttccatgagatgggggtcccaaccttcgactacggcaacaacatccgccagatggcgcaggaagtgggcgtcagcaacgccttcgatttcccgggcttcgtgccggcctatatccgcccgctgttctgccgcggtatcggcccgttccgctgggtagcgctgtccggcgatccgcaggatatctacaaaaccgacgcgaaagtgaaagagatcatcaaagatgatcagcatctgcaccactggctggatatggcgcgcgagcgcatcagcttccagggactgccggcgcgtatctgctgggtcggtctggagtggcggcaaaagctcggtctggcgtttaacgaaatggtgcgcagcggcgaagtctccgcgccgatcgtcattggccgggatcaccttgactccggctccgtcgccagcccgaaccgcgaaaccgaagcgatgcgcgatggttctgatgcggtctccgactggccgctgctcaacgccctgctcaataccgccagcggcgcgacctgggtgtcgctgcaccacggcggcggggtaggcatgggcttctcgcaacactccgggatggttatcgtctgcgatggtaccgatgaagcagcggcgcgtatcgcccgcgtcctgcacaacgacccggccaccggcgtgatgcgtcatgccgacgcgggttacgatatcgccattgaatgcgcggcggaacagggtctgaatcttccgatggttgcggcaacgcaggggaacgctaaatgaaatctttaactttgatcccgggtcaactcagcctgtcgcagctccgcgacgtttacagccacccggtaaatattaccctcgacagcggcgcgtttgccgccattgacgagagcgtggcctgcgtcaacgccatccttgccgaagggcgtaccgcctacggcatcaacaccggttttggcctgctggcgcaaacccgtatctcgacggaagatctggagaacctgcagcgttcgctggtgctgtcccatgcggcgggcgttggcgagccgctggacgatgatctggcgcggctgattatggtgctgaagattaacagcctgtcccgcggtttctccgggatccgcctgagcgtgatccaggcgctgattggcctggtgaatgccggcgtgacgccgtggatcccggccaaaggctccgtcggcgcttccggcgacctcgcgccactggcgcatatgtcgttgaccctgctcggagaaggtaaagcgcgggtacgcggcggcgactggctgccggccaccgaagcgctgcgtcaggtggggctggagccgattaccctggcggcgaaagaggggctggcgctactcaacggcacccaggcctcgaccgcttttgccctgcgcggtctgttcgaagccgaggatctgttcgcctccgcggtcgtctgcggggcgttaaccaccgaagcggcgctgggctcacgtcgtccgtttgatgcgcgcatccatgaagtgcgcggccagcgcgggcagattgatgcggcggcgttgtatcgccacctgctgaccgacgatagcgcgatctcgcagtcgcaccataactgcagcaaggtgcaggacccgtactccctgcgctgccagccgcaggtgatgggcgcctgcctgacgcagatccgccaggcggctgaggtgctattggctgaagccaacgcggtctccgataacccgctggtctttgccgccgaaaatgacgtcatctccggcggtaacttccatgccgaaccggtggcgatggccgcggataatatcgcgctggcgatcgccgaaatcggctcgctctccgagcgccgcatcgcgctgatgatggacagccatatgtcgcagctgccgccgttcctcgtcaaaaatggcggcgtcaactccgggtttatgattgcccaggtcacggcggcggccttagccagtgaaaacaaagcgctgtcgcacccgcatagcgttgacagcctgccaacctctgccaaccaggaagaccacgtctcgatggcgccggcggccggtcgccgcctgtgggcgatggccgagaacacccgcggggtgctggccgttgagtggctggcggcggcacaggggctggatatgcgcgaaggactgaccaccagtccgctgctggaagaggcgcgtcacttgctgcgcgaacgcgtgccgcactatacgcaggatcgctacttcgccccggatatcgataacgccattgcgcttctggcggcccgtcacctgacgcgtctgctgcctgccgtactgcattaatcaccgttgttctctgtacccgcgtcgggggaagtcattcccccgaccgccctacaccgcatatttgtcgtcatataaaaaaatcaggacacctgtatatgcaacaacaacacaagccacatctgctgcgcgggctcaatgcccgacacattcggtttattgcgctcggctccgctatcggcaccgggctgttctatggctcggcctcagccatcaaagcggcgggcccggcggtgctgctggcctatctgatcggcggcgcggcggtgtttatcgtcatgcgcgcgctgggcgagatggcggtgcgcaacccggtttccggctccttcggcagctatgcccgccagtatctcgggccactggccgggtttattaccggctggacctacacctttgaaatggtgatcgtcgccctggccgacgtcaccgcattcggtatctatatggggttgtggtaccccgatgtgccgcgctggatctggatcctcagcatcatcttctttatcggcgcgatgaacctgtgcaacgtgcgggtatttggcgagatggagttctggctgtctctggtgaaggtggtggcgattatcgccatgatgctggcgggggcggggatcatcttctttggctttggccacagcttcccggccaccgggctggaaaacctctggagccacggcggctttgcccctaacggctggcagggcgttatcgcctcgcttggcatcgtgatgttcgccttcggcggggtggagattatcggcgtcaccgccgcggaagcgaaggatcctaagaaggtgatcccgcaggccatcaataccattccgctgcgcattatcctgttctacgtctgcaccctggcggtactgatggcgatcttcccgtggaacagctttggcgaacaggggagtccgtttgtgcttattttcgacggtctggggatcccggcggcggcgaccatccttaacatcatcgtgatcagcgccagcatctcggcgattaacagcgatatttttggcgccagacgcatgatgtacggcatgtcgaaagaggggctggcgccgaaaagcttccagcgcatcgccagcaacggtgtgccctggatgacggtggtggtcatgggcggcgcgctgctggcggcggtggtattgaactatctgatccccgagcaggtatttgtgctaattgcttcgctggcggcattcgccacggtatgggtgtggctgatgattctgctatcccattttgccatgcgccgcggtttgtctgccgaagagcgcagccagatcgcctttcccattccgttctggccggttgcgccgctgttgacgctgctgtttatggggctggtcatcgccgtactagggatgtttgccgaaacgcggatggcgctgatcgccggcctggtctggctcgggctgctgacggtggtgtggtatgcgcgggtgcgtaaaacggcgctgcaggtagccactgaacagtaagatcaatttccccggtggcgctgcgcttaccggggctacaaatggcacggaccgtaggccgggcaaggcgtcagccgccgcccggcataaaagcggctccgtgcccgcggcaatcgcccggcggcgctgcgctagcatgggcctggggggagtgtagatactgctatcggcttgtaacggttttaatccggtaaaaacagttgttttgtattaattccgagcacattgcgctcccgaaatgtcttctacgttatgttactcatggcgcagggagcgcacagggggcggccagtcgccgccgccccctgtacgcccgggcttcggccagcaacatcgccactgcgtggtgccttcgacttatccctgcaggcttcgggtcgggccgaggcagcgtccttgcaaaacacggccctcagcccgcatccatgcgggctgccccggccttccgggaacgtctcagcgatgttgaggccgccagccccggcagtttcagcggccccatgtttggcggcgattcacatactgggtctggaccccgtaggccgggtaaggcgtcagccgccacccggcaaaataaccgcgcaatagcaccgtaggccgggcaaggcgtcagccgccgcccggcataaaagcggctccgtgcccgcggcaatcgcccggcggcgctgcgcttgcgtaggtctacgtttattgtagattctgttatcggattgccactttctcagtccggcaaaagcgtgtatcacgtgtgacttcagcgttctttgcgctcccggttattttttctgcactttgtttttcatggcgcagggagcgcacagggggcggccagtcgccgccgccccctgtacccccgggcttcggccagcaacatcgccactgcgtggtgccttcgacttatccctgcaggcttcgggtcgggccgaggcagcgtccttgcaaaacacggccctcagcccgcatccatgcgggctgccccggccttccgggaacgtctcagcgatgttgaggccgccagccccggcagtttcagcggccccatgttcggcggcgattcacatactgggtctggaccccgtaggccgggtaaggcgtcagccgccacccggcaaaataaccgcgcaatagcaccgtaggccgggcaaggcgtcagccgccgcccggcataaaagcggctccgtgcccgcggcaatcgcccggcggcgctgcgct

SEQ ID NO: 134 - DNA, 186600 bp, Unknown
  source: /note="Description of Unknown: MKP2_2161_1 Mutant Bacteria sequence"
gcggtgctcgtgctcgcgcagcgcctcggcgctaaaggtttcgaacggcacccggcagcggtgagccagctggcgcaaccccggctcgtttgccttcaggctcacgctgccgatcgctttcagcgccagcgggtcaagacgctgagcggcaagctggcgatccagcaacgtactgagcagcgcgcagggggtgtcgcgccgacagccgatccccgccaccacccgctggggcaccagcttccagtgaggcaccggcagcggcggcagcgaccggcgcagggtgacgcagatcagggcgtcgagcgccggcaagcgcgccaggtcgcttaccgggataaacccgcgccggtcgcagcggcttagcgccccggtaaattcgccgtcgcaccacagccccacccgcttaccgctcaccagcatctggttaacggttttcaccgccgcgcgaaaatcggtcatccgggcgttcagctggaaggccagcgtgtcgagggcggccagctcgttgacgtcggtggcggtggtgatcaccgggtcggcgtcgagcatcccggcgagatagcgggtcagcgcattggcccccccggcatggccggagagcaagctgatgacgtgccgggcgcgctcatcaatcaccaccaccgccgggtcgctgagcttgtcattcaccagcggggccagcacccgcacggcaatcccggtggcgccgataaaaatcagcgccgagaagctgctgaacgcctcgcgggcagcgctggcaaagccgccgttgaaggggataaacccctcttcctgcagcgcttcgctggtgtaacaggtaagcggcagcatggccgccagccgttttgccagccgcacgccgccgggcgtcaggcaaaacagggcaatggattcaggctttacggtattcatggctaaaatccgctgcgtacagttttgagtagtgatactcatcgccgaggaaggggccgaccaggatcagcgccgttttgcggatcccggcgtcgcgtactttgtcgccgatgtccgcgagggtaccgcggacggtctggctttccggccaggtggccttgtagatcaccgcgaccggggtggtcgcggggtagccgccctccaccagccgctccgccacccggtgaatacgttgcaccgacaggtaaatcgccatcgaggtttgatggctggcaaaggcttccagctgttcgcgcgcgggaaccggcgtgcgcccttccagacgggtaataatcagactctgcgagacttcgggtaccgtgtactccacccccagctccgccgccgcgccgaggaaagcgctgacgcccggcaccacctgccagcggatcccgcggcgggtcagctcttcgccctgctcgcgcaccgagccatatagcgagacgtcgcccgtctgcagacgcaccaccgtttttcccgccttcacccccgcctccatcaggtcgaggatctgctccagatgcagcgcggcgctgtcatggcactccgcctgtggcggacagtaggccagtagctcggtgttgatcagcgacccggcgtagatcactacctgcgcctgctgtagcagacggtagcctttgagagtaatcagttcgcgatcgcctggaccggcgccgacgaaccacacgcaatggggatcaaaagtctcagccatggttttcttccttctgacaggcgatgacaaaaacgggattatggggtttgaagtagtggccgctgcccagggtagccagggtggagaccgccagctgctggcagtccacctcgtggatgccgctctgccgcaggtgcgccagagcgctatgaaggttttcctgcaaaataaaagtcatcaccagccggccgccgggatgcagctgcgccagcgaccagtcgatcagcgccgtcaggtggccgccgctgccccccataaagatcgcgtcggctttgtcggcgaccgccagcggcgcaacgcccgccacgatagcgatgttgtcgcagccaaagcgctgccggttctccgccagcaggcgcagcgcgtcggcctgacgctcaatcgccgtcacccgcagcgccgggttctgtagagcagcctcaatgctgacgctgccggtgcccgcgccgatatcaatcagatggcgcgcccggtgcagctccagcttcgccagcgccagcgcgcgcacggcctctttggtcatcggcacctgggcgccgcgcaaaaacagctcatctttcatcgaggatcaccaccgcattcatctcatattcgtcctccacggcgctgaccggcagccagtggatccgctcgttttccatcgccaggttctcgcctatcaccatccagcgatggcctttgccgcgggccatcagctgggcggctatctcccgcggtccgcagcggccgtcggtcaccatggcgactttccggtgggcggccagagcatcgaagctcaccgcccggccatggctgctggtcagccacatatcgttcatgtcgatgcccgcccgggcgcagaggtactgcaccgcgctgatgccggggatcacctgcactcgttcccggccaaaatgggcaatcagccgggtgccaatgccatagaacagcgggtcgccagaggccagcaccacgacgcggcgcccggtacgggcctcgatccacgccagcagcgccggcatatcggccctcagcgcgaagcgctcgccggcgaagtcgggaaactgctggagatgacggctgccgcccaccagcgcctcggcggcggcgattgcctcgcgcgcggccggggtcagccactgcagccccgccgggcccattcccacgaccgtcaacatgtcagctcccgggcaatcgccgccagcggacggctgctgcccagtacctggttatcaaaagaaaacagaaccgcgtcgcaggtgggcggttgttgagtgaagcgcagcatctcaagaacacgctggcagattcgctcagccagatggttatagaggcgctgatatccccaggcgtcgatatgctccattgccgcttcggtggtgtcgcactcgctgaccagcgtcagcagcggcagcggcgcgccaagcagcgccagatgagcgacgagggtttccatccgcgcatcggcgatatggctgtgggtatgaaagatcccggcggcgattttgatcagttttccgggatggccgatgagcacaatctggcggaaaccgagccggaccgcctcttcaatcatgtagccgacgaagttgctcatggtgaccaccatctgcgggtcgatgcccatctgctcgcggacaaagcgctcaccgtggttgcccggcaccagcaccacgcgctccagcccggcggcgcgttttatctccagctcgagggagagcgagcgcttccagctctcttccgacatcggggtaacgatccccgtggtgccgataatcgagatgccgccgaggatccccagccgggcgttataggttttttgcgcgcgaagcgcgccttccggggcaaaaatctccacctgcgcgccgcgggtaggacctatcgcttcgcgcacggcggtctcgatggtgtgccgcggagtgcggtttatcgccgggctgcctgtcggcaggccgatccctttgcgggtcaccgtgccgataccctccccgccctgcaggctaatctctccgctgtcattgagggtgacccgggcaaaaatcagcatgccgtgggtggcgtcgacatcatcgccgccgtctttacggatcgcggcgaccgcctgctgcccttcgacgtgcggggactcaacgttcaggcacagggtgacgccggagggggtgacgatcgagacctgatgaatcagatgctggcgcatcaccatcagcgcagccacttttgccgccgctgtggcgcaggagccggtggtgtagcccttgcgcagcgctttgccgtgatgccacaccggggcgtcaaaggtctgatcgctcattgcgcctcccgcaggtggtaaagcagagcgttcacaatcgctgccgccacgttgcttccccctttgcggccgagcgcggcgatggccggcaggccgctctcgctgagcgccgctttcgactccgcggcgccgacgaacccgaccggcacccccaccacgccgccgatggcggtctcgcgatgttccagcaggcgaaacagcgcggttggcgcattgccgaagacgaacactttctccccgggctcctgcaccgcaatatccaccgccgccatcgagcgggtcatcccccggctttgcgcctcgcgcaccacccacgggtcgctgatatagcagcggcattcgccgccaaagcgggccagcagggttttgttgatcccggacagcgccatggtggtatcggtatacagcgtgcagggccggctcaaggcctcactcagcgcgatcagggcatccggagaaaaccacagaatatccagccagtcgaagtcagcggtggtgtggatcacccgcttgataatcgcctcgtgcagcgggctggcgaaacggtagtccggtcgcgtttcggcgatgatctcgctgatgatgtcgaagcttttcgcctcgatcgcctgcggttgttggatgtactgcatcaggttctcctcaggccgcgccgaccagccagtagcgcacgccgataaacagcgccagcgccaggcttgacgccacccacattaatcgaatggttcgggaaatatcgtccaccgcgatgtcgcggacggcgtcgcctatccagggcttttcaacgcgctggccgaagtaatcgttcgggccgccaaggcggatccccagcgcgccggcgacggtcgcttccggccaggcgcagttaggactgctgtgctgatagcgatcgcgccagcccgtacgcagcgcccgggcgccatcttcccggcatagcaccgcggcaaggctgagcaacagccagctcagccgggcgggaaggaagttggctacatcatcaagacgagcgctgaccatgccgatcgcccggtatttttcgtgtttatagccgaccatggaatcgagggtgttgaccgctttataggccatggccagcggcgcgccgccgaggagcaggaaaaagagcggcgcgataatgccatccaccgtgttctccgccacggtctccaccaccgcacggttgatctgcgctggctggagctggaaggtatcgcgcccgacaatccaggagagcttatgccggctttcggcgagatctccggcctgcagcggccgggccaccgccatcgccgactgtgccagacagcgtcccgccagcgcggtgaagatcatccacacttccaccagccatccaagccaggggtggatcccgtgcgccagcgccagtacgccccaggccacgccccatgtcaggccgatcaccaccagccacatcaccccgccgccgatgcgcagcgcccggtcgctatggcagacgcgtcgcactacacgctggctgacggcgatcaggcgacctatccagcgcaccggatgcggccagtgcggcggatcgccaatgacgacatcaagtatccaggctacacaccaggcgagaagggtcatagcgccctccttgctgcccgcaaccagtggttgagcatggtgggacgctgggcaaaatggacatggagatagctggcaaaggcgctgccgaactgccatcctccctgccactgctggagcgtcttaccgtctcgctgtttacggcaggccagtacggcgggggtggcgggagaaaaatcggagtaatgaaattcatggccgcgcagccactcgccaggggctgccagcagcgtctgctgctgcgcctgcgcttcgcagtagccgaaccgggtcagacgcgtccccattcggctgtgtccgggaataatatccgccatcgtgtagcgctcgccgctggtgacttccagggtcgtgcccaggtacatcaggccgccgcactcggcgtagatcgccaccccgcgccggtgcgccgcgcgaagctgtgtcagcatctcgtggttagcggatagcccggccgcatgcagctccggatagccgccgccgagccagatcatctggcaggccggcagctggcgatcgcgtagtgggctaaagcgcaccatcttcacgccgcagcgcgccagcagcgccaggttatcggggtaataaaaattgaaggcctcatcgtcggcgagggccagcgtcagtccttcgccggcatcggcggcaagctgttctccccactcgccgatcggcatggcggccagttcgctgagggccagcagccggtctatgtcgagggtgcgccccagcaggctggcaaaatcccgccatgcctgctgattgaccaccgactcgcgggcggtcaccagtcccagatgtcgttcgggcagcgccacgccttccacgcgcggcacatagccgagcactggcacctgacagtagcgctcaatggcgcttttcagcagctggaagtgcgcgtcgctgttgacccgattgacgataacgccagcgatgtcgagagccggatcaaaatgttgaaaacccatcaccgtggcggcgatggaggtcgacaccgctttgccatccaccagcaaaatcaccgggcagccaagctgcttagccattgccgcgctgctgcagtagttggggtcggtgccgtagccgtcatacaggcccatcaccccttcgataaccgcgatgtcggcctgctgtagctgttcggtaaacagcgcgttgagtatcggggcgggaagcataaagctgtcgagattgcgggaagcgatgccgctgatggcggtgtgccaggcggtatccaggtagtcaggccctactttacagggttgcacccgcataccgcgctgttggagcaagctgagcaggccgagcgtaacggtggttttgccacaaccgctgccggtacccgcaagaatgaacgcacgcctggttgccataccctgtcctgttctggcgggcagggtatagctacgcgcatgcctggtcctgcgaccacgcaccgctaagccacccacttcccaccgaagttgttggtcagttaccggcaggcaggtcttctggcttagcctcgttctcgcccgcccttcccaatctttcgatcagtggtttttgcggggtcgtcagcatcacagcagcgggggctgcgggggatttacacccccttccctgacaccaaactggtgtcgaacctgtcggtttgtttcgccgatgcgccctgcatcgacgggtattactttatgttttcttttaccgtttcatcactcgtcacaatgacgtcagtgaaggaaagcggtgttgtgataatcagctgtctcgtattaacggacactctatctcatcacaaaaataaaaactggtgtagtttatccctcgaatatcactattttgttgcgctatgacaatttattgctctactgtcgtttttttcattttatattgatgaagatactcggggatatcaaaaatcggcaatagcaaaatattgtcatttaaaaagactcagtttgtgatccggcattaatttgctgacgaaatgcctgcggcgttacctgataggtctggcgaaacactttgcaaaaatagctggtttgcgaaaaacctaaattccgcgcgatgctggcgatgctccagtcgctgtggcatagcagctcttttgcgctcgccatccgctgctgattgacccaggcgttaaaaccgatcccctgatactttttaaacagtttgctgaagtagtacgggctgagatagacatgcgccgccacatcctccagacgcagctcatcggagagatgcgcgtcgatatagcgcagcgccttcttcattttgccatcgtgcggcgagggcgcccggctggcctgcgccgggtcgttctgcgacgggttatctttgataaccacaaagttgagctgttttttcaggcaattctcgacgatcagcttcagcagatccgccgaagcgataacccgcgaatagtccatctccggcacatcgcgaaacgcctggaccagcgccggatcgtcctgccagcggtcatcgacgttcaagatatcaaccagttcaacatcattgctcagacgcacctgcccgcacagcacgaagccgaccaggtggccggcgatcaccagcgggatggaaaaatcggttaaccccgcatgacagcggtagatacacagctggtcttttttcgaggcttccagcccgccgcagcggtcgctcatgcgacagcgtccgctgtgctccgggtgctgacgcatcagctggcaaaacggcgtgaaattaaacaattcagaaatctcatcaccgtgaatattgacgaccacaaccgccagactggtggcttgcgcaaaatcctgtgcgattttattgatgagttctgagtttagggtactcgcagaaatcatgataaaacccctcagttaattttttgttataaataaaacatatttttcatatttaccttttttagcatcagatcccatcgacgataaaaaagtgcattgacaataacaaaagtctcccaacccggggagactttttgagcggttcgtgatatcggttcatgaaattagcctggctatttcacagatacattccccttatgacgctaacgcgtattttcttcctccacgcaggtatgacagggcagattattggcgataagaaaacgataaattgcggcgccgaggcaggcccctaacaacggtgcgataatgggcacgataaaatagggaatatctcttcccccggtcatggcgatattgccccacccggcgaaccaggtgaacaatttcgggccaaaatcgcgtgctggattcatcgcgaagccggtaagcggcccggtcgaggcgccgatcaccgccaccagaatgccaatcaacagcggcgccagtgggcccttgggtacgccgttgccatcatcggtgagcgccatgatcatccccatcagcatcgaggtgatcaccacctccaccagcgccgcatgccagatgctgagctcaggcgccgggtaggtgctgaatatactggccagctgcaggctttccaggctgccgcgcaccatatgatgcaccgtttcaaattgcgtaaacagggtgctgtaaagtatccaggccagcacggcgccgccaaacgcgccggcgacctgagccaggatatagggcaccacttttctgcccgggaagcaggcaaacagccacagggcgacggtgaccgcggggttcagatgtccccccgaaatgccggccgtcaggtacaccgccagagaaatacccagtccccagataatacagatctcccacagccccaggctggcgccggtcagtttcagggcgctcaggcagcagataccaaaaaacagaaacagcccggtgcctaaaaactcggcgatacattgcgcgcgtaaagaaccattcattgtgacacctcgtgacgaagttcgtgtccaggccagccaaccatccgctggctcgttgggtacggcgaggcccactatagaaaccggcagcggcaaagtgttggcatcctgcggaaatcgggcggcgtaaagtcgccgaagaagaataatttattgctatttgttcgcgaatccatgcagcaatggcgggcgttcagggggtattttaatttccaactaaatgataaaaaattgcgaaagcgcagtgcttattttccaacaaatatcacatcacgcaaaatatcgcatagcaaaaacaatttaaaaaatcacctcttaaaatgtaaatacggagcgttaattgcaatataatcacatttatacaaacaataaaatcaaataaaaacaacgatataaaataaaataaatccattttatattatataaaaaccactattttttcgctctccaccatcaactcagccattctttttcgccgctccgccatatagttccctcactggcacatatcctgcgaggtctttatgcaacaagaagcattaggaatggtagaaaccaaaggcttaaccgcagccatagaggccgctgacgcaatggttaagtcggccaacgttttattagttggctatgaaaggatcggttcaggcctggtgaccgtcatcgtgcgtggcgacgtgggggcagttaaagccgccaccgacgccggtgccgccgcagcccgccacgtgggcgaagtgaaagccgtacacgtcattccccgcccccataccgatgttgaaaaaatcttaccgaaggggaatagccaatgagcagcaatgagctggttgaacagatcatggcgcaagtcatagcccgtgtagcgacgccagagcagcaggcgcttcccgataccccccatcccacaggagagacggctatggcagagaaaagctgcagcttaacggaatttgtcgggaccgccattggcgacaccctcgggctggtcatcgccaacgtggatgccgcgttgctggaggcgatgaagctcgaaaaacgctatcgctctatcggcatcctcggcgcccgcaccggcgccgggccgcacatcatggccgccgatgaagcggtcaaagccaccaacaccgaagtggtcagcattgagcttcctcgcgacaccaaaggcggcgccggccatggctcgctgattgtgctgggcgggaatgatgtttccgacgtcaaacgcgggattgaggtcgcgctgaaagagctggaccgtaccttcggcgatgtctacggcaacgaagcgggtcatattgagctgcagtataccgcgcgcgccagttatgccctggaaaaagcgttcggcgccccactgggccgcgcctgcggcattatcgtcggcgccccggcgtccgttggcgtgctgatggccgataccgcgctgaaatcagccaacgtcgaggtggtagcttacagctcaccggcccacggcaccagtttcagcaacgaagccattctggtgatttccggcgactccggcgcggtgcgccaggcggtgatctccgcccgggaaatcggcaaaaccgtactggcgacgctgggcgccgaaccgaaaaacgatcgcccctcctacatttaatacccgcgaggctgattcatgagatcgaaaagatttgaagcactggcgaaacgccctgtgaatcaggatggtttcgttaaggagtggattgaagagggctttatcgcgatggaaagccctaacgatcccaaaccttctatccgcatcgtcaacggcgcggtgaccgaactcgacggtaaaccggttgagcagttcgacctgattgaccactttatcgcgcgctacggcattaatctcgcccgggccgaagaagtgatggccatggattcggttaagctcgccaacatgctctgcgacccgaacgttaaacgcagcgacatcgtgccgctcactaccgcgatgaccccggcgaaaatcgtggaagtggtgtcgcatatgaacgtggtcgagatgatgatggcgatgcaaaaaatgcgcgcccgccgcacgccgtcccagcaggcgcatggcactaatatcaaagataatccggtacagattgccgccgacgccgctgaaggcgcatggcgcggctttgacgaacaggagaccaccgtcgccgtggcgcgctacgcgccgttcaacgccatcgccctgctggtgggttcacaggttggccgccccggcgtcctcacccagtgttcgctggaagaagccaccgagctgaaactgggcatgctgggccacacctgctatgccgaaaccatttcggtctacggtacggaaccggtgtttaccgatggcgatgacactccatggtcgaaaggcttcctcgcctcctcctacgcctcgcgcggcctgaaaatgcgctttacctccggttccggttctgaagtacagatgggctatgccgaaggcaaatcgatgctttatctcgaagcgcgctgcatctacatcaccaaagccgccggggtgcaaggcctgcagaatggctccgtcagctgtatcggcgtgccgtccgccgtgccgtccgggatccgcgccgtactggcggaaaacctgatctgctcagcgctggatctggagtgcgcctccagcaacgatcaaacctttacccactcggatatgcggcgtaccgcgcgtctgctgatgcagttcctgccaggaaccgactttatctcctccggttactcggcggtgccgaactacgacaacatgttcgccggttccaacgaagatgccgaagacttcgatgactacaacgtgatccagcgcgacctgaaggtcgatggcggcctgcggccggtgcgtgaagaggacgtgatcgccattcgcaacaaagccgcccgcgcgctgcaggcggtatttgccggcatgggtttgccgcctattacggatgaagaggtagaagccgctacctacgcccacggttcaaaagatatgcctgagcgcaatatcgtcgaggacatcaagtttgctcaggagatcatcaacaagaaccgcaacggcctggaggtggtgaaagccctggcgaaaggcggcttccccgatgtcgcccaggacatgctcaatattcagaaagccaagctcaccggcgactacctgcatacctccgccatcattgttggcgagggccaggtgctctcggccgtgaatgacgtgaacgattatgccggtccggcaacaggctaccgcctgcaaggcgagcgctgggaagagattaaaaatatcccgggcgcgctcgatcccaatgaacttggctaaggggtgaaaaatggaaattaacgaaacgctgctgcgccagattatcgaagaggtgctgtcggagatgaaatcaggcgcagataagccggtctcctttagcgcgtctgcggcttctgtcgcctctgccgcgccggtcgccgttgcgcctgtgtccggcgacagcttcctgacggaaatcggcgaagccaaacccggcacgcagcaggatgaagtcattattgccgtcgggccagcgtttggtctggcgcaaaccgccaatatcgtcggcattccgcataaaaatattctgcgcgaagtgatcgccggcattgaggaagaaggcatcaaagcccgggtgatccgctgctttaagtcttctgacgtcgccttcgtggcagtggaaggcaaccgcctgagcggctccggcatctcgatcggtattcagtcgaaaggcaccaccgtcatccaccagcgcggcctgccgccgctttccaacctggaactcttcccgcaggcgccgctgctgacgctggaaacctaccgtcagattggcaaaaacgccgcgcgctacgccaaacgcgagtcgccgcagccggtgccgacgcttaacgatcagatggctcgtcccaaataccaggcgaagtcggccattttgcacattaaagagaccaaatacgtggtgacgggcaaaaacccgcaggaactgcgcgtggcgctttaacaaaggatatcccgatgaataccgacgcaattgaatccatggtacgcgacgtgctgagccggatgaacagcctacaggacgggataacgcccgcgccagccgcgccgacaaacgacaccgttcgccagccaaaagttagcgactacccgttagcgacccgccatccggagtgggtcaaaaccgctaccaataaaacgctcgatgacctgacgctggagaacgtattaagcgatcgcgttacggcgcaggacatgcgcatcactccggaaacgctgcgtatgcaggcggcgatcgcccaggatgccggacgcgatcggctggcgatgaactttgagcgggccgcagagctcaccgcggttcccgacgaccgaatccttgagatctacaacgccctgcgcccataccgttccacccaggcggagctactggcgatcgctgatgacctcgagcatcgctaccaggcacgactctgtgccgcctttgttcgggaagcggccgggctgtacatcgagcgtaagaaactcaaaggcgacgattaacaggggggtaagcatgcgctatatcgctggcattgatattggcaactcctcgacagaagtcgccctggcgacggtcgatgacgcaggtgtgctgaacattcgccacagcgcgttggctgaaaccacgggtataaaaggcacattacgaaatgtgttcggtatccaggaggcgctaacgcaggcggcaaaagcggccggcattcagctcagcgatatttcgcttattcgcattaacgaagccacgccggtcattggcgatgtggcgatggaaaccatcacggaaaccatcatcaccgagtccaccatgatcggccataacccgaagacacccggcggcgtcggactgggggtcggcatcaccatcacaccagaggcgctgctgtcctgctccgcggacactccctatattctggtggtctcctcggcctttgactttgccgatgtcgccgcgatggtcaatgcggcaacggcagcgggctatcagataaccggcattattttgcagcaggatgacggcgtgctggtcaataaccggctacagcaaccgctaccggtgatcgacgaagttcagcatatcgaccggattccacttggcatgctggcggccgtcgaggtcgctttacccggtaagatcatcgaaacgctctccaacccttacggtattgcgaccgttttcgatctcaacgccgaggagaccaaaaatatcgtgccaatggcgcgggcgctgattggcaaccgctcggccgtggtggtgaaaaccccctccggcgacgtcaaggcccgcgctattccggcaggtaatctgctgctcatcgctcaggggcgcagcgtacaggttgatgtggccgccggggcggaagccatcatgaaagcggttgacggctgcggcaaactggacaacgtcgcgggagaagcgggcaccaatatcggcggcatgcttgagcacgtgcgccagaccatggcggagcttaccaataagccagctcaggagatccgcattcaggatctgctggccgttgatacggcggtgccagtcagcgtgaccggcggtcttgcgggagagttctcgctggagcaggcggtgggtatcgcctcgatggtcaagtcggatcgcctgcagatggccctcatcgcccgtgaaattgagcacaaactgcagattgcggttcaggtgggcggcgccgaagcggaggcggccattcttggggcgctcaccactcccggcaccacgcgcccgctggcgatcctcgatctgggcgccgggtcgaccgacgcctccattatcaatgcgcagggagagatcagcgccactcacctggccggcgccggcgatatggtcacgatgatcatcgcccgcgagctggggcttgaggaccgctacctggcggaagagatcaaaaaatatccgctggctaaagtcgaaagcctgtttcatctgcgtcatgaagacggcagcgtccagttttttccgtcggccttaccaccgacggtatttgcccgcgtctgcgtggtgaaaccggatgaactggttcccctgcccggcgatctgccgctggagaaagtgcgcgccattcgccgtagcgccaaatcacgcgtctttatcaccaacgccctgcgagcgttacgccaggtgagccctaccggcaacattcgcgacatcccgttcgtggagctggtgggcggctcgtccctcgatttcgagatcccccagctggtcaccgacgcgctggcgcactaccggctggttgccgggcgcggcaacatccgcggctgtgaaggcccacgcaatgcggtcgccagcggattactcctttcctggcaaaaaggaggcacacatggagagtagcgtagtcgcccccgccatcgtcattgccgtcactgacgaatgcagcgaacagtggcgcgatgtcctgctgggcattgaagaggaaggcattccttttgttctgcagccgcagaccggcggcgatcttatccatcacgcctggcaggcggcgcagcgttcgccgctgcaggtaggcatcgcctgcgaccgggaacggctcatcgtgcactacaaaaatttacccgcatcaactccgttgttttcgctgatgtatcaccagaacaggctggcccggcgaaacactggcaacaatgcggctcgtctcgtcaaagggatcccatttcgggatcgccatgcttaatccacaggagaacgcagtatgaataacgcactaggactggttgaaacgaaaggcctggttggcgccattgaagccgctgatgcaatggtgaaatccgccaacgtgcagttgattggttacgaaaaaattggctccgggctgattaccgtgatggtccgcggagacgtcggcgcggtcaaagccgccgttgacgccggcagcgcggcggccagcgtggtcggcgaggtcaagtccagccatgtgatcccgcgcccgcatagcgatgtggaggccattctgccgaaatccgtctgaccctcaaaaaaggagcacagcgtgaagcaatcactgggattacttgaggtcagcggtctggccctggccatcacctgcgccgacgctatggcgaaagcggccgccatcacgctgctcgccctggaaaagaccaacggttccggctggatggtggtgaagatcgccggtgatgtggcctctgtccaggcggcggtgatgaccggggccgaactcgccgaacggcagcaggggctggtagcgcagaaggttatcgccaggcccggggaaggcctgctgccggcccgcgtccaggcgccttcaccagcgcctgacgtcgccgtgacggaggagaacacggccctcacagacgccccctcccactctacggagcgggtgacctgcaacctgtgcctggacccacactgcccacgacaaaaaggcgatccccgctcgcagtgcctgcacgccggtaaacgaggtgacgcgtaatggataaacaacagttggcttcgacagtcaacaaagtgctggatgagatgcgccagcgtcccattccaatcggtatctccagtcgccatatccatttagcggcggctgactatgccaggctttttcccgcgcagcccatccagccgaaaaaagcgctgctgcagccgggacaatatgctgcagagcagacggtgaccctggttggccccaaagggcgattaaacaacgtgcgcctgctcggccctttgcgccagaccagccaggtggaaatctcacgcaccgacgcccggatcctcggtatcgccgcgccgctgcgcatgtccggcaatctgcagggcacgccggggatccgcctgataagcccctttgccgaactggagttgagcggcgggacgattgttgcccagcgacatattcatatgtcgccacttgatgcgttgatcctgcgcgtctcccatggcgatagcgtcgcggtggcgatcgaaggcagcgacaggcggcttatcttcgacaacgtggcggtccgcgttgccccggatatgcgtcttgagatgcacatcgatactgacgaggccaatgcggcaggcgctgacgctgcgcaagcctgggcaacgctggtgacgaagccatgaaccacgcgatgctgcagcgtatcgtcgaagaggtcgccgcccgtctgcgccatcgcgccctcagcacggccacgctcagcgtggcccagctcggcgaagcggatatccgcagcctgctgtgccagcacgcttcgctgcgcatcgtgcaggtggatttaccgctgctggagcagcttgccggccagcgtgcgctggcggcagccggttgcgcactgcatgaggcgatggcctggggcgttcgggtacagctaacgctgcttcccgccctgctccccgcgctggcggtaaaaaaactcgcccgcttgccgctgacgttcagcgatccgcttggccagcccgtcaggcttcacgccgcgtcggtgctcacctatgccgacgtagcccgtttcagtggcggctatctggtgctgcgccgccgtcccattatcaccgccctcgcccgcgaagcggccgtcgcgcggcatgttcaattgattaagcaggagtgaactatgcatctggcacgcgtgaccggcgccgtcgtctcgacgcaaaaatcgccctctctgaacggcaaaaaactgctgctggtgcgccgggtaagcgcggacgacgatcgtccgattctccccacgagcggcgatgaagtggcggtagattcggttggcgctggcgtcggcgagctggtgctgctctgcagcggctcgagcgcacgccacgttttcagcggcccgaatgaggccatcgatcttgccgtcgtgggcattgttgactcactttcacgctaagggggcgcctgtggctatctatacccgaaccggcgatgccggcagtacatcactctttaccggccagcgggtcagcaagacgcatccgcgcgtcgaagcctacggcaccctggatgaactgaacgccatgctgagcctgtgcgtctgcgccgtcgctgaagaggaacagcgcaccctgctcgaagccctgcagcagcacattttttggttcagcgcggagctcgccagcgacagcgaacagccatcaccgggtaagcgctatatcagcagcgaagagattgccctgctggagcagaccatcgatcgcgagatggcccgcgtgccggcgctgcaccagtttgtattgcccggacgctgtgaagccgccagccgtctgcacctggcccgcaccgttgccagacgggcggagcgccggctggtcgagctggcggcagaggttactatccgtcagatactgctgcgttatctgaaccgcttatctgactgcctgtatgccctggcgcgcagcgaggatcatgccgctcaccagcgccgccttgtgacggagatcgcggcccgctatctggccgccagcgggtcgcctgcgcccgacgcgcccaaagcccaggccgggtcgctctccttttacgagctgcatcagctcatccgtcaggccattgaacacgcccgccagctgcaggtgccggtggtggtcagcatcgttgacgcacacggcaccgaaaccgtgacctggcgaatgcccgatgcgctgctggtcagcagcgagctggcgccgaaaaaagcctggaccgccgtcgccatgaaaaccgccacccacgagctcgcgacgaccgtacagccaggcgctgcgctgtacggtctggagagccatctgcagggcaaagtcgtcacctttggcggcggatatccgctgtggcgcgatggccagctaatagccggcatcggcattagcggcggcagcgtcgagcaggatatggctattgcacaggctgccatggcggccattaacgtgagaactcatcaatgaatacagcagaactggaaacccttatccgcaccatcctcagtgaaaagctcgcgccgacgccccctgcccctcagcaagagcagggcattttctgcgatgtcggcagcgccatcgacgccgctcatcaggcttttctccgctatcagcagtgtccgctaaaaacccgcagcgccattatcagcgccctgcgggagacgctggcccccgagctggcgacgttggcggaagagagcgccacggaaaccggcataggcaacaaagaagataaatatctgaaaaataaagccgctcttgaaaacacgccgggcatagaggatctcactaccagcgccctcaccggcgatggcgggatggtgctgtttgagtactcgccgttcggggttattggcgccgtggcgcccagcaccaacccaacggaaaccattatcaacaacagtatcagcatgctggcggcgggtaacagcgtctatttcagcccccatcccggcgcgaaaaaggtctcgttgaagcttatcgccaggatcgaagagatcgcctaccgctgcagcgggatccgtaacctggtggtgaccgttgccgagccgacctttgaagccacccagcaaatgatgtcccacccgctgattgccgttctggctatcaccggtggccctggcattgtggcgatgggcatgaaaagcggtaaaaaagtgatcggcgctggcgccggcaatccgccgtgcatcgttgatgaaaccgccgatctcgtcaaagccgccgaagatatcatcagcggcgccgccttcgattacaacctgccctgtatcgccgaaaaaagcctgatcgtcgtcgcctccgtcgctgaccgcctgatccagcagatgcaggattttgacgcgctgctgttgagccgacaggaggccgataccctgcgtgccgtctgcctgcccgacggcgcggcgaataaaaaactggtcggtaaaagcccggctgcgctgctggcggcggcgggtctcgccgttccgcctcgccctcctcgcctgctgatagccgaggtggaggcgaacgacccctgggtgacctgcgagcagctgatgccggtgctgccgatcgtcagggtcgccgactttgacagcgccctggcgctggccctgcgcgttgaggagggtctgcaccacaccgccattatgcactcgcagaatgtctcgcggctcaatctggcggcacgcacgctgcagacctccatttttgtcaaaaatggcccgtcttacgcgggaatcggcgtcggcggcgaagggtttaccaccttcaccatcgccacgccaaccggagaaggcaccacctccgcgcggacgttcgcccgcctgcggcgctgcgtgttgaccaacggtttttccattcgctaaccgggggcgccatgcataccttttctctgcaaacgcgcctctacagcggcccgggcagcctggccgcgctgcagcgctttagccatcagcacatctggatcgtctgcgacggcttcctggcgcgctcgccgctgcttgaccgactgcgcgccgcgctgcccgccagcaaccgcgtcagcgtgttcagcgatattacgccggatccgaccattcacaccgtggcgaaagggatagcgcagatgcaggccctgcgtccgcaggtggtgatcggcttcggcggcggctcggcgatggatgccgccaaggctatcgtctggttcagccagcagggcggtctgcctgtcgacacctgcgtggcgatccccaccaccagcggtaccggttcggaagtgaccagcgcctgcgtcatcagcgacccggaaaaagggatcaaatacccgctgttccatgaggcgctctgtcccgacatggcgatcatcgacccgacgctggtggttagcgtaccgcccaccatcacagcccataccgggctggacgcgctgacccacgccctggaggcatgggtctcgccgcaggccaccgattttaccgatgcgctggcggaaaaggccgtaaggctggtgtttcgcgccctgcccgttgcgattcgtcagggcgactgcattgcgacccgcagcaaaatgcacaatgcatcaaccctcgccggtatggcctttagccaggctggccttgggctcaatcatgcgatcgcccatcagcttggcggccagtttcacctcccccatggcctggccaatgcgctgctgctgaccgcggtgatccgcttcaatgccggcgagccgcgagcggctaagcgctatgcgcgcctggccagggcctgccgcttctgcccgcccgaagctggcgaacaggaggctttccaggcgctgcttaccgcggtggaaacgctgaaacagcagtgcgccattcccaccctcaagggcgcgctgcaggaaaagtatccccttttcttatcgcgaattcccgccatggtgccggccacgctggccgacgccaccctgcgcaccaacccgcgtccggtcgatggcgcggccatcgcgcaactgctggagaacctgcaatgagtgaagcgatagtgccactatcaagcattgatgcagcggagatccgcgaacgcgttcgggccgctggcgtcgtaggagccggtggcgcaggctttccgacccacatcaaactgcaggcccgggtggacaccgtgctggtgaacgccgccgaatgcgaaccgatgctgaaggttgaccaacagctgatggctcagcaggctgaccgactgattcgcggcctgggttacgcgatgaccgccactggcgcccgggaagggatcattgccctgaaggcgaaatatgctccggcgattgcggcattaaccccacgactcccggaatgggcccggctgcatattctgcctgacgtctatccggccggggatgaggtgctcactatctggctggcgacgggacgccgcgtaccacctgccgcgctgccggtcagcgtcggcgtggtggtcaataacgtgcagacggtgctcaatatcgccagagccgtggaacagggctatccggtaactcgccggacgttgaccgtcaatggcgccgtcgcccgtccgctgacgctggccgtaccactgggtatatcgctgcgcgaggtgctggatctggccggcggcgcgacggttgacgatccggggtttatcaacggcggtccgatgatgggctcgcttattacctccctcgagacaccggtcaccaaaaccaccggcggcctgctggtgctcccgggcaaccatccattgatccagcgacggcggcaggatgaacgaacgctgctcgccatcgcccgcaccgtctgtgaacagtgccgtttatgcacagatttatgcccccggcacctgatcggccatgagctttcccctcatctgctggtgcgggcagtgaactatcgccaggcggccaccccgtcgctgctgctcagcgccctgacctgttcggagtgcaacgtttgcgagagcgtcgcctgcccggtgggtatttcccccatgcgcatcaaccgtctgctgaaacgtgagctgagggcgaaaaacctgcgctacgacggaccgctgcgtccggcggacgagatggcgaagcaccgcctggtgccggtcaagcggctcatcagcaaactgggacttgatccctggtatcaggaagcgccgctgagggcggtggaaccggaggtggcctgcgtcaccctgcccctgcgccagcatatcggcatcagcgccgtgccctgcgtcgcgccgggagagcgggtaacgcgcggccaggtgctggcggatatccccaccgacgccctcggcgcgccggtgcacgccagtattgacggcctggtctccgccatcacggagcaggccattacgcttgtaagaggttaatcatgacccaggctatcggaattttagaactgaccagcatcgccagggggatggagctgggcgacgtcatgctgaaaagcgcgaacgtacagctcctgctctgcagaaccctttgccccgggaaattcctgctgatgctcggcggcgacgtcggcgccgtgcagcaggcaatcgccgccggcaccgcgcgcgccggggagatgctggtggacagcctggtgctggccaacattcaccccagcgtactaccggcgatcagcggtctcaacgtggtcgggcagcggcaggcggcggggatcgtcgaaacctggagcgtggcggcgtgcatcagcgccgccgaccgcgcggtgaaagcggccaacgtcaccctggtgcgggtccatatggcgtttggtatcggcggcaaatgctacatggtggtggcgggtgatatcgccgatgtcgacaacgccgtcacggtggccagcgacagcgcaggcgagaaaggattactggttcaccgggcagtgatcccgcgaccgcacgatgcgctgtggcaacagctgatggagggataatggaaccgcaaacccctaccgaacgcatgatccaggagtatgtcccgggcaaacaggttactctggcgcatctcattgccaatcctggcaaagatctgttcaaaaagctgggtctgccggacgcggtctccgccatcggcattcttaccattacccccagtgaagcatcgattatcgcctgcgacatcgctaccaagtccggcgcggtggagatcggttttctcgatcgcttcaccggcgcggtggtgttgaccggcgatgtctccgccgtggagtacgcgctcaggcaggtcacccgcaccctcggtgagctgatgcgcttcaccgcctgcccaattacccggacctgagcccatgaaacgcctgatgcttatcggacccagccagtgcggcaaaacttcgctgacccaggtattgcgcggcgaaaccctgcgctatcagaaaacccaggccatcgtctggacgccggccaccatcgatacccccggggaatatctggaaaatcgctgcctgtacagcgcgctgttaaccagcgcctgcgaggccgatgtcatcgcgctggtactgaatgccgatgcgccctggtcacccttttctccggggtttaccgccccgatgaaccgcccggttatcggggtgatcaccaaagccgatttagccgccccgccccgtctgcaacaggtccggacatggctcgaggcggcgggcgccggacatatttttatcaccagcgcgttaaccggcgacgggcttgatgacctgttcgcctgcctgaatgcagaggaatatcaatgacctataaaatcatggcgattaacgccggcagctcctccctgaagtttcagctgcttaacatgccgcagggggcgttgctctgtcaggggttgatcgaacgtatcggcctgcccgaggcccgcttcacgctgaaaacgtcggcacagaaatggcaggagacgctgcccatcgccgatcaccatgaggcagtgaccctgctgctggaggcgctgaccggccgcgggatcctcagcagcctgcaggagatcgacggcgttggccaccgcgtcgcccacggcggcgaacgcttcaaagacgccgcgctggtctgcgacgataccctgcgggagatcgagcgcctggcggagctggcgccgttgcataacccggtcaatgcgctgggcatacgtctctttcgccagctgttacccgcggtaccggcggtggcggtttttgataccgcctttcaccagaccctggcgccggaggcctggctctatcccctcccctggcgttattacgccgagctgggcattcgccgctacggttttcacggtaccagccatcactatgtcagcagcgcgctggcggaaaagctgggcgtaccgctgagcgccctgcgggtagtaagctgccatctgggcaatggctgtagcgtctgcgccatcaaaggcgggcaatcggtgaatacctcaatgggctttactccccagtccggggtgatgatgggcacccgcagcggcgatatcgacccgtcgattcttccctggctggtggagaaagaagggaaatccgcccagcagctcagccagctgctgaataatgaatccgggctgctgggcgtctccggcgtgtcctctgattaccgcgacgtcgaacaggcagccgacgccggcaacgaacgggcggctctggcgctgtcgctgtttgccgaacgcattcgcgcgactatcggcagctatatcatgcagatgggaggtctggacgcgctgatctttaccggcggcataggcgagaattccgcccgggcgcgggcggcgatctgccgcaatttgcattttctcggcctcgcgctggacgacgagaaaaaccagcggagcgcgacctttattcaggcggataatgcgctggtcaaagtggcggtgatcaacaccaatgaagagcttatgattgcccgcgacgtcatgcgtcttgcattgccgcaggcgcgcgagctggcggtgtcggcataaacgacgcgcctcctcttgcggagaatcatggtaaccggcgggtcgccatgccactatgcgccctggcgaaggtaagcggaaaggtgaaaacgtggctgttgcacaatgtcccgcctcgtgcggagaacttatccagggctggatcctcggcagcgaaaagctggtctcctgtccggtggactggtacagcaccgtcgaggtcgagaccggagtaccgcgaaaagacgagcggccgctgtcgcgggcgatggtcgaccagctgctggcccactggggctaccccccagcgctgagccagcagatccgcatcaccctgcactcaacgatcccagtggccaaagggatggccagcagcaccgccgatatcgctgccaccgccgtcgccaccgcccatcatctgggccatctactggatgagccgacgctggcgcgcctgtgcgtcgcgctggagcctaccgacagcaccctgtttcgccagctgacgctgttcgaccataataccgccgccacgcaaatcgcctgtccccctccgccggcgctcgacctgttagtgctggagagcccgctgacactgcgcaccaccgactatcaccagctgccgcgcgagccgggcctgttggcaaacgcctcccggctgcagctggcgtgggagaaagttcaacaggcctgccactgcggcagcccgcagctgctgggcgaagcagcaaccatcagcgccattgccagccagcagctgttgcctaagccggggtttgacgcgctgctggacctggtggaaagcgcagggctctatggtctcaacgtggcgcacagcggcagcgtcgtcggcctgctgctggaccgccgtcggcatgacgtcgaatttctgcaatggcggctggcagacagcgacatcgccgcccactggccgcagcagcatctgctggcgatggtgcccgggggcgtcatcctgcagtaggcctcaggccagcacccggcgcaacgccgccagcagctggtcgttttcctcggcgctgcggatcgccacgcggaaatagcggctatccagccccgggtagttggcgcagctgcggatcagcacatgctggcgcagcagggcatattgcaggtcaaaatcggctctgtcgcagcgcaagaacaggtagttagcacgcccgggccacacggtcagcccggccatctcctgcagctgcgcatagaaacgcgctccctcctcctgcagccactgccaggtggcccgctgatacgcccgatcctggagaataatttccccggccagggcggcataggcgttgatggaccacggcatttgtcgcgcgcgcagtcgggccaccgcctgggcatcagcgttcagcaggtagccgagacgcagccccggaatggcataaaatttggtcagcgatcgcagaacccagacgtgcggatgctgcgccagcagaggaataaaccccggctggtcggggataaagtcgaggaaggcctcatcgaggatcaggctgatgttcagcgcccggcagcgctgcgcaatggcttccagcaggccccgctccggcagcaggccggtggggttgttcggggtgcagagaaacaggcagtccagcgccggagtcagggcatcgaggatcgcgtcggtcagctgccagccatcgcgctcccgcagggcatactccaccacctcgcagtccaccgtctgcagcgcccgccggtactccgcgaaaccgggaatgacgatcatcgcccgccgcggcttaaggccgtggacgagggtgaagatcgattcagtttcgccgttgccggcgaggatatgcgccgccggcaactgatggtgggcagccagcgcctgatgcagctgttgatactcgacgtcagggtagcgttcggcgcagcctgggttgtcaacgatcgcctgcctgagcgaggcgggcatccccagcggattaatgttggcgctaaaatccagcagctcgccgggcgcaatgcccagcagggcggcggcctcgcgggtgttaccgccatgggcgcttttcagtaaggccatgtccctttcctgtgtggttatccgcggcgggccagcgtcgcgccatcggcaaagtaggctttaatcccggcgaggatcgactcggccacctcctgctggaatttggccgttttcagctttcgctcttcttccacgttactgataaacgccgtctccaccagaatggaggggatgtcaggcgccttcagcaccgcaaagcccgcctgttctacccggttcttgtgcaggttattgatattgcccattttctccagcaccgccttgccaaatttgaggctgtcagcgatggtgagagactgcaccatatcgaacatggtgtggtcgacatagcggtcgccgctcttgctgaccccaccgatcagatccgaggcgttctgcgtctgggcgagatattttgccgcggtactggtggcccccttggtggagagggcaaacaccgaagagccgctgggctggcggctggtaaaggcatcggcgtgaatcgacacgaacaggtcggcgcgctgcttctgcgccttggcgacacgcactttcaacgggatgaacacgtcttcgttgcgggtcatataggccttcatattgccttctttgtcgatcagcgcccgcaggcgacgggcaatctgcagcaccacgtctttttcgcgggtgcgatactttcccacggcgccggagtcttcgccgccgtgtccgggatcgagcatgatgacaatcggccggtcgcgcccggctttgcccggctgcggcccgctttgcgccggcggcacctgccgctccagatcgcctttgttgtaatcctcgagcagcgccagcagcggatcctgaacatcggtagcgttggcggggtagagatccatcaccagacgctctttaaagccggccaccggcgcgagggcaaacagctgcggcttaacgttctgcttgagttcgaagaccatgcgcacggtttgcggatcaaactggcccacccgggcggacttaataaagggatcgtcagcgcggatctgcccccccatgcccttcagtaccgagttcaggttaaccccctccagatcgaccactacccgttccggattactgagggcaaactgccggtatttcagcacatgattcgattccaccgtgacgcgggtgtaggtcgatgctggccagacgcgaacagcgaccacccgcgcggcggcggccagcccgacagggctcacgctcattaaccacatggcgcccgccccctgcaataaacggcgacggcttaatccagagttgtttcccgacatgccactcccaagcaataaaaacgcatttatacccaaaacaaacagattgaccagaaactttaacgaaaggcatataacctgtcatctataaaagggtaaacattcattgacaccctgcgccgggtcacatgtttttcgcggcttagcctcaaattggggcttgcgtttaacggcaaaacagaataaaaatacaataattacgaataatcatgcattgagggtttgtcatggtgaaggaacgtcgcactgaactggtagaaggattccgccattctgttccctatattaatgcccatcggggaaaaacgtttgtcatcatgctgggcggcgaagccattgagcatgaaaatttctcaaatattgtcaatgacataggattattgcatagcctgggcattcgcctggtggtggtctatggcgcccgcccgcagattgacgctaacctcgccgagcaccatcacgagccggtctatcacaagcagacgcgagtgactgacgccaaaacgctggagctggttaagcaggcggcggggatgctgcagctggagatcaccgcccgtctgtcgatgagcctcaacaacaccccgctgcagggggcccatatcaacgttgtcagcggcaactttatcattgcccagccgctgggcgtcgatgacggcgtcgattattgccacagcggacgcattcgccgcattgacgaagaggcgattcatcgtcagctcgacagcggcgccattgtcctgatggggccggtcgcggtgtcggtcaccggcgagagctttaacctgacttcggaagagatagctacccagctggccatcaagctgaaggcggagaaaatgatcggcttctgttcgtcgcaaggggtttacaaccaggccggggaaattgtctccgaactgttccctaatgaggcgcaagcccgcgtcgaagagctggaagcagacgaagactataactccggcaccgtgcgcttcctgcgcggggcggtgaaggcctgccgcagcggcgtacggcgctgccacctgatcagctatcaggaaaatggcgcgctgctgcaggagctgttttcacgcgacggcatcggcacccagatcgtcatggagagcgcggagcagatccgtcgggcgaccatcaatgatatcggcggtattcttgagctgataagcccgctcgagcagcagggcattctggtacgccgttcccgcgaacagctggagatggagatcgacaaattcaccattattcagcgcgataacaccaccatcgcctgcgccgccctctatcctttcccggaagagaagatcggcgaaatggcctgcgtggcggtgcatccggattaccggagctcgtcgcggggagaggtgctgctggagcgtattgccgctcaggccaggcagatgggactgagcaagctgttcgtgttaaccacccgcagcatccactggttccaggagcgcggcttcacgccggtggatatcgacctgctgccggagagtaaaaagcagatgtataactatcagcgccggtcgaaggtgctgatggccgacctcgcttaagcccttctcctctctatctaacggcccgggatagcgcgacgcttatcgctttatccccggccggtctcccgcccctcttcccgccagcctggcgtacgcacgcgggcgaaattcctggtttccgcgcaggccatttctttctcgctggctcaccgatatgctattggctgtcgacaggacgtcgactggcgccgcggccgccacccgcccagcaaggatcgcttaaagaatggaaaccaaaccgaactggctggtcagacatattaatctcattaccaccgcggtcgccctctatccgtggttgctgatgatactgctcctctgggataaccagcgccatcatcagcatggctatgccgcgctcggcgccgccatcgcgatattatttctgctggccctgacgtccggcatgaatcttctcatctcctcgctggtgattttttgtgcccgctgttccaccccaccgctggccggcggcgcagcagtccgctttttcgccatgaactcgatctcggcgctctggcttatccctctgttcttcagttactgatttttccgccagcccgggcaacggctgcagcattttccatcgcccggacccggcgtctcagggggcttcgcgcccggcgaaaatctccgccaggccgctgcgccgttcggtgcgcgtcacaatggcctgggagagcacctgctcgtcggcatagagcgacaaccgccgtttcgcgcgggtgatcgccgtgtagaccagttcgcgggtcaccagcgggacgctgcgcgccggcaggatcagcgccgcgtgttcgaactccgagccctgcgatttatgcacggtcatcgcccaggcggtatcatgctccggcagacggctcggctgcaccgacttgatggcgccgtcgggcatcaggaaccacacccgcagctcgccgttgcgctccagggcgatgccgatatcgccgttaaacagccccagcgcgctgtcgttgcgcgatatcatgatcggtcggccatcataccagcgagagtggcgcggcagggcgatcgcccgctggcggttgagccgctgctccagccgctcattgacgccgctcacgccgtacggcccctcgcgcagcgcgcacagcagctggaattcgctgaaagcggccagcatggcctgcggttcggcccgctcgcggcgcagctgcaggtagcgctcatagccctgctgagccgcgccgagcatggcttcgtactcttcggtcgtgctgaggggatgaagcgcgatatcgtcaaacggctggcgcagcgtggccttcacctccgcgcgcgcgccagcgttcaccgcccgcgccaggctcccgatgccggagtgactgccgaagcgatagctcttttgcagcaggcacaaactgtctctcagcgcgcccgcgatagccccctcgcccgccggcaccggcgaaccggtcagccgggtcagctcctgcgcccgcgcggcggtatagcccgaactcgcccaggcgcagatatcccccagcaccgcccccgcttctacggaggccagctggtcgcgatcgccgaggaaaatcacccgcccgtgggccggcagcgcgtcgataagccgcgacatcatcggcaggtcgatcatcgaggcttcatccaccaccagcacgtccagatgcagcgggttgccggcgtgatagcgcatccgctggctgcctggctgggcgcccagcagacgatgcagcgtgctggcctcggtgggaatcaacgctttctgcgcgtcggtcagcggcaattttctcagcgccgcgcccagcgattcggtcagacgcgccgccgctttcccggttggcgccgccaggcgaatacgacagcgcgggctgtcttcgatctggatcagcgccgccagaagcttcgccacggtggtggtcttcccggtcccgggaccgccggagatcactgagatgcggcgggtcagcgccaccgccgcggccactttttgccagtcggtttcgccggtggcagggaacagggcattcagggttgacgccagccgggcctcatccatctccagcacccggttggcttcattgaagaagcgggcgacggtcagctcgttgcgccacatccgattcagatagagccggtcgccgcacaaaatcatcggcgccggagcatcgccgcagctcaccgccgacgaagcgagcagtagcccgggccagtcctccggcgcgccggcttcggccagcagccgatcgcggatctcccccgctttaccgctcagcgcctcgtcgccgctcaaccgcgagagcggcagacagacgtgcccctcgccggcatcccggctcagcaaggccgccgccagcttgaccgccggcgggtcgttttgcgccaccatcagggcaaactggacgtccagcggccgcagcagacgctgctccaccgccgccagcagtagttgttcgaaagtcatgaggcctcctcctgagtttctccggcaaaaagctgatccagaccgtcaatcagcggtcgcaccggccgggtggtgaagatcccctgccccccctcctgcccgtccatgccgcgcaggaaaagataaatcacgccgccgaagtggcggtcatagtcataatcggccagccggtggcgcagatagcggtgcagcgccaggctatacagctgatactgtagatcgtagcggtgggcacgcatcgcctgctccatcgccggccgggtgtaggcctcgcgatcttcccccagccagttggatttgtaatccagcaggtaataacggccttcgtgacggaagaccagatcgataaagcccttcagcatgccgcgcacctggcggaaatccagcggcggcgtgtcggcagagaggggatcgtactggcggataagcgcgtcaaggcgctccgccgtcagcagctgggcgatgggcaggtaaaatgccatctccacctgtttatcccgcgccgcaagctgattgagcgcgatatccggccccggcaggcgggtcttcagcacgccccccagccagtcggtcagcaccggcgcccactgcgcgtcaaacccgctcagctgcagcttctccgccatccacccttccggcaccggctgggtgaagtccagctcctcaaacaggctgtgcaggaaggtccccggcgcggcgccgcgcgggaactggtgcggagtcagctgcggctcttccacgacttcgccgacgccggcggcatcaacatccagacgcggcagcaaatcctgcccgccgctgaaaccatgctgctgcagtccggagtaactggtcacccgccagtcgtcggcgatgcggcgctgcagctcgcgcgccgacaatcgcgggatggtcgccgcgggcgcctgccacggggtgagatccagttcgcccggaatctgtaatgcaatatcgccatgacagaagtccgccagccgcgcagccagcccggcggcgtccatggcttcgcccgcctgcagcagccgtcccagcgcgctgaggtggaaatcgctgttgccggatttccggctgctgagcggcgccacgccgaggctgcagtgccagaccgcgcgggtcagggcgacgtacagcaggcgcagatcttccgccagtcgttccgcctccgccagctcgaggctggcctcatcctggcccagatccagcaccgccgcgaacgtctcgcgatcgtggtaaaacgcctggtcctgtttacgaaaccgggcgataaacggcagccagaccagggggtattccagcccttttgacttgtgaatggtgacaatttgcaccaggtgcttatcgctttcgagacgcatctgctggctggcggcgttgctgtccggctcggcgatatgctgcgccagccagcgcaccagggcatgctcgctttccagctggctggccgcctcctgcagcagttcgctgatgtgcagaatgtcggttaaacgccgctcgccgccgcgggtcgccagcaggttctcggcgatatgccgggctgtcatcaacgcccgcagcatcggcatcaccccgcgctgccgccaaatctggcggtattcgctgaactcttccaccagcgcgtcccacgcctgctcgtcctggttcaggttttcaatatccagcgcggtcaggccaaacatcgacgtcgccagcgcgctgcgcagggtattttcccgctccggggccagcaccgcctgcagcagccagagcagctcctgggcctcaagcgtctcaaaaacgctgtcgcggttagagaggtagactgagggaatgcccagcgtctgcagcgcttcacgcacctgcgccgcctccagccggttgcgcaccagcacggtaatatccgaagcctgtaccgggcgcgaggtttccccgcgccacagcagcgcgcgcccctgctgaccggcgctcagccagtcgcggatctgcgtggcgcagagctgcgccataaaggtctgataatcgccagacccgacagtgtcgccgggcatcagccagacgttcatcgccggtacgtccgccgcgtcaacggtaaagcgcagccccttgttcttcgccgccgccttcaccggcaggaacgggatctcgtggaacatgaaggggttatcgctgaggctgaacagccgattgacgctgcccaccatgcccggcgaggagcgccagttggtatcgagggtgtagtgcgcggcaacgtcgccgcgcgctttcatataggtaaagatatcggcgccgcgaaaggcgtagatggcctgcttcggatcgccgatcagcagcagagccgtctccggctgccggcgccagatgcggcgaaaaatccggtactgctgagggtcggtgtcctgaaattcatcgatcatcgccaccggaaaacgctggcgaatggcgctggccagcgtctcgccgctgtcgccgcgcagcgccccgtcaagccggctgagcatatcgtcaaaccccagctcgccgcggcggcgcttttcgcgggcgaccgcatcgcggatctcgaccatcgctctcgccagcaccagatcggtgagcgtcagcgaggaggccagcaacgactctacggcgctaaacaggggatgcaccggcggttcgccaccggctttggtgcgctcgagcagaaacgactgggcaaatttctccagcgcgtcaggcagctggtagcttaacgtctcttcctgcgcccaggcgttcactttctccatccacttgccctggttgccgcgattaaacttccgccggtcaaggccggaattttccagcacgccttcgatctcgcccacctgctcgcgccactgctgcttgagcgagtcaatgcgggcgatgatctgctgatggcgttcggccagcgtctcgttaggggctggcggcgacttaagctgcggcgcttcgccctgcagccagcggtcaagggacttcagcagatcgcgcggccctttccagacgtcgtggatcaccgcagcgatatcgcgggtcaggggatagcagtggcggcgccagaaatcggcgcaggcctgatagcgcaggcgggattcatcctcgatcagctgttgctcgaacagcatgcccgactcgaaggcgttaaggctcagcatccgttggcaaaagccgtggatggtgaataccgccgcctcgtccatctgccgttcagccagcagcagcgtcttcgcggcgtcgtctttatcggcgatctccgccaacaacgcgctgtagagcggattgtcggattcgccgcgcaggcaggcgatgcgcagttcgtggatgttgctgcggatacggccgcgcagctcttcggtcgccgcctcggtaaaggtcaccaccagcagttcttcaacgctgatggcgcggggataggcggcctcaccgcccagccccaacagcagccgcagatacagcgcggcgatggtaaaggtttttccggtgcccgcagaggcttctatcaggcgctcgccgatcaggggcaagcgcaggggatccaaagactcagcggtgtcggtcattcattctctcgcatcaggggtaaggattgctgcaatgcgctgacgttttcccacactttgccgcctttcggctgggcatagtccgctttgccattctggctaccggaaatctgggacaagatcgtcatgccctgcggatccaccaccgtctgatggaagaagtcggcaagtttttgcggcgtcagcagtttaatctgagccactactttatcacgtgaatcaaaacgcatattaccgcgatcgaaatctttgctcagtttcgaggcttcatcgcccagcgtctgcggcgcctgcagcatctggcttatcaccgcctgctggagctgagcaaactcttccggcttcatcgcccgcagcttcgcctccgcggtggggaagaaggcctggaaccgctgccagaggaaggccggctgcttatcgctactctgcagcaggaagcccatgccccactggcgccccacgttcatcgggaaggcaaagaccgcgtagccgagctgctcttcagtacgcagctggttgtagaaccacggctgaatgatctgccccagcagggtgctggcggcggtgctgctgaactcatccacgttgggcggcgcaaacaccgcggccagcgcggagtcggtgctattgcccgctttgttgaagatcgccagctgctgtcggttcaccaccacgtctttattgcggcaccattcgttgccgtcggcgcccagctgctgctggatctggcgggccagggtcgtggcggcatcggcggtcatattgccgatcaccatcagttcaggacgccccctggttttcaggttggcgcggtagtcgagcacctctttaagggtaatggagggcagcagcgcccggcgcacttcgcgctggaagtacggcacctgcgagaccatctggatcggcattatcgcctgatcgtaggctttgcctttctcggcggaatccatcatctgcgcataccaggatttggcctgctccagctgctcctcggtcggcgtatagctgaagtatccctgcagcagatcgctgaacagcgccggaagatgctgggtatagccgttggcattgaccattaatccgttattagcgccggtagagaacgaaatgccgccgaccgccgcctggttactgagctggtcgagggcgatgccggcgagataatcgttgagggcaaacatcacctgccggcgagcgctgtccatcgcctggggattacgcagcaccagggagatgtccgccttcggctcgctggcaaaatactggctcggggcatacaccacccgcagcgtcggttcatcaaggatcagctgcggatgcggccaggctttatcgcttttgataagggtgaagtcatccggaatataggggttgagcgccggcagctgcagctggatggcctgcgatttgtgctgccagtcagcgaacgtctgctcgctaatcttatccacctgatacggcgcatcgacaaagtaagccgtcttgttatgcggctcctgggggctgatataccagatgcgggcgttctgcggggtcatcatcgccagccggtctttgatcgcctgcgggtcgtactggtcggcaatattcaccacgtccagcgcatgctcgaccggcacccggatcatggtgtccgccagccattccacgtagtccatgtcgcggttgatcgacggatagcggaaatcgagcgccagcacatgcgccagttcgtcgaaatagcgtttgtcgatgccctgagtacgcaggaggtcgaggtagctgaaaatggccgccgtcacttcatcgcggtgcgccaggcctttgtcggtgagggtggctgagatcgccagtacgccgctgttgccgtttaccaccggatcggaatcggcgcggataccttccgccagaccctgtttttgcaaccagtcagagagcgtgcccgggctgcggttgccgataagataggtgaccagctcatcggttttgctgcggaagcgatcgctgttgttgtcgatgcgaaactcgacgcgcagcactttacgcggcatcgccggcacatagtgaataatgatgcctttttgcgcatccgtgaccaccgggacggtaatatccggcctgctgatctgacgattcggcacgcggccaaaggtgtccgcagccatgcgcgccagcgccggcaacggcttgttgctgtagatcaccgctttcatcagattggcggagtaccagctatcgcggaaggtgtgcagcgcatcaagcaccgggctgccgggcttatcgctgagcgtctcgaggttgccgccggagaagtgggccgccgggtgagccgggttgatggtctccgcgctgacctgggccatgcgcatcccgtctcgcgtccgggccatcgtcagctcggcgttgaccgcgttacgttcgcggtcggcatattttttatccagcagcggcgcggcgatggcgtcggccaggcgatctacggccccgtccagcgcatcattttccacttcaagataaaacgcggtgcggtagggcgcggtactggcgttatggctgccgccgtgcagcttaagaaactctgcaaggctgtcaggctggggatatttttgcgaccccatcagcgtcatatgttccagaaaatgcgccagcccctgatgatctgccggatcctgcagggatcccaccggcaccaccagcgccgacagcgatttcaccgcctgcggatcggaaaccagcagcacgaccatgtcgttatcaaggcggatcgcctgatactgacgcgtatctttttcgcttttgcggatcgtctcctgaatcggctgccatccggtgtcggcctgactaaacggcgcccagagggcggccagcacaacaaaaaccttgaaccataaactgcggggcattcacgaacctcatcattaacaaacttgcgctgcacagcgtgcagccttttatgtccatcagtccgtgatacgttgcgcatattaaatgaaccgtcattcactgcgcaatttttatactatttaaatttgtgtggaccgatggtaacgatatagcggtaacagataacgctgcgtctgggcaatgatttcttcgtaatgcgccggctccagcgaacgccacaggcgttgataccagatatcggcgccctccccgctgaccaccatgttcccttcgtaggtctgcaggaatttgctccgcgctttctgctgcgtctcttcgtcccttaagatgacatccttttcggcgtcgtaacaggctttcagccaggcgccaccgctttccggcagcagcagcagcggctgcgacatccccagcaaatagccatccaccagctcgttaaggtacgcctgcgcctcggcgggcgccagcgccggaaagcgccactctccctctttccgcacaaacagccggctctcgccggtgccgccgctggcgcagtagacaaggtgttccagccaaagttgcatcccctgggagacgctcagcagcgaaggccgccagcgcagcagaccgtccggctgcacctgctgcagccagccggtcaggttcacgccgccgcactgcagatcgatctccatgctctgcgcctgctggcgctcggccatcacccgctcggccagcgcctgcatctccaggcgctgcgtctcccagaccagctcgccaaaggcgccatacggcagctcgccggcggcgcgaaagcggcggaacatagccgagacgtcctgctcctcaataagcgtattgagcagttgctgattcagttgataacggctcagcccttcaagagtgaacggctcgtcgtctggaatatcgtcctcttcggcgcggaaattgacccgcaaacgctgctgaaagaacgcgcgtaccgggtgctgccagaagcgcaggagctgatcgaacggcaggctgtcaatcggcggcgcggtgagcggctgtataaaatcgctatgcgcctctccctgctggccggcggccgccagccattcacgagcgtagctcttgttctcgtcttcctggaaattggcaacgtcgaacggcatgcgcgtatgcagatgggtgatgtgggctttaacccgcgcttcgctggcgtcgcagtcaagctcttcgtcaccggcgagacagtgactctggccgatataatccaccagctcctgcaccagcaccgaaggaaaacgctcgctgttgtcctggatcgaacggccgatatagctgatatacagcgtctgctcggcggacatcagcgcttcgaggaacagatagcggtcatcatcgcgccggctgcggtcgccgcgctgcggcttctggctcattaaatcaaagcccagcggcggtagcgtgcgcggataaaccccgtcattcatccccagcaggcacaccaccttaaaggggatcgaacgcatcggcatcagggtacagatattgaccgggccggcaagaaagcgctggctgatccgctgctgatcgaggcgctgggccagctcatcgcgcagcagcgtcagcggcacctgctcgccatactgcgcctccagaccgctatcaataaccgccagccactgctgctcaatcagcgccagcgccgcttcggtctcactgtccggcaggaaaaagtcattcagcagatcgcgacagaccggcagccactccgccagcggccgctgctgggccaggccgcgtcgccacagattaagctgcatcagcagcgacgcgaggttgcccaccagctcggcgatcaaaccgctggattcgtcatacggcagcaccgactgccattctccctcgcggctgtccatcgcgtagcccaacagcatgcgggtgaggccgaaccgccaggtatgctgcccggtcgccggcaggtccagctcacggacgttgtcgtcatccattccccagcggacgccggactcgttcacccactggcgcaggtagcgcagcccttcttccgtgatattaaagcgcgccgccagcaccgggacgtccagcagcgccagcacatcttcactggcgaagcggctgtccggcagtgagagcagcgtaataaacgcctgcagcaccgggtgcgactctcgggcgcgacggtcggagatcgcccacggcagccagcgatcgccgctggcggcgccaaacaccgcctgtatataggggctgtagctgtcgatatccgccaccatgacgatgatatcccgcggcgtgagcgtcggatccgcctccagcatcgccagtagcctatcgtgcagaacctccacttcgcgctgcggactgtggcagacgtgaatgctcagactgcggtcatccagcgtcagcggacgtttgtcgcgactgtgggcgaatgcctctgcgctctgcccggccaccgccgcgttgcgtagttcaaggatatccgactgcaggttatgcaacaggttatcgggggcgatgtcgacaaaagcgtccagctcctcatagcgctccagccccgccagcaggtagatatagtcgcgccccagtttcccccaggaggcgagcaacgggttgccgacatcctgttccccggcgtcattaaacaaccccggcgcctgctcggtgtcgcgaaacaggggtagcgcgcgcgcctcgcggtgatggcgccgctggcgcgacagcagcttcgccaggaacgccggatccttaatgtctccccagtagtagcggcaggggttggtaaacaagacatagacatcgacatgcttacccagcgcctgcagcgcctgaagatagaccggcggcagcgcggaaatcccgcagatgaagacgcgcgacggcagcccggcgggcggttcgtccgctttttccagggtactgataaagcgctggtagagattggcgcggtgccactgcggctgccccagctcggcggtgtagctcaccagcgcctgccacagcggcgcctgccactgctgggcatcgccgagaccttccacccgctggccggcctcccagcgcatcagccactccgggcgatagacgaggtactggtcatagaggtccgccacccgggcggccagctgaaacagcttgcgcttgtcgccgtcatcactcagatactggcgcagcaggataaaatcgtcttcctccaggtgctgcggcaggagggtcatcagcttccagctcatgctctgcttgctgaaggcgctttcgccaggaatatctttcaggacgcgcacgaacatatcccagataaagctcgccggcagcgggaactcgatattggcggcaatcccgaagcgcacggccagggtcatctgcagccactgcgccatgccggtactctgcaccagcaccatttcggcctgaaaagggtcatccagccgctggcgctcgacgataaactccatcaacgcctcgagaacatccagccggtttgagtggtatacccttaacataattgctcctgactactggctgaccgggcaatgcagccgggtcatctgcacccgctttgcaacgggtctactgatcgttaccgtgatgctgacacatctttgcctcgatgtctgcatacggcttacctgcccgcgtgccggcgacggcggcgcggagagctggctatagcgccacgcgtcgcgccacagttgacgggtctggttcaactggacaattccttgcgccattccgcgctgatagccgcccagcgcggtgaccgtcagcaccatcagcgccatcgccagcacggtctccggcaggctaaacccccgctgacgcttcagggcatttgacataagctcgcctccctgagcgggcaaaaatcgctccagccgtgggcggaaaaacgcacctgcccgccgcgcacctcgccggactgccagacctgcacctcgccgctggcgctgctgagcaccagtgaaccgtcgccgaagatacgcagacaggcgcgccagccctgcggcgcctgctcccggcaggccagcgccacctgcgccgaccagacctgctgttttccccactgcagcgcggaatgggctatcgccgtatcgcggatcgcttgcgtttcgctggcggtttgcgccagcagcgcccgctgctgcaggttaagcccctcgagtaacaggctgccgagggtcagcaacaggagcaccatcagcagcgacgacattccacgctggcggatcacaggttataccccgtcacccgctgctcaacctcgctcgtcaggcccgtctgttgcgcggagcgcgccgccagcgtcacgctcagctccggcgcgaagcccggggtgacctgacgttgtaccgagaagcgcgtcaccacgatggcggccgggttggtgattttctcccatccgccgccgcggcagtcgctggccccgcgcagggtctccagcgcgccgtcgcgcaggcgaaagccggtgctctccgccgctgccgcgggggaggtttcccatctcccgttgctgttcgcatcccagcgcacaatcagacactcgccgccagcggctagctccagcccggctccgccgcacgctccccggcagtacccggcgcgctgcagatgttttcccacggcatgcacacgctgccacagctcgttctccagggccagctgttcgccctggcgcagaatatgacgctgcagggcaggcagaaagcggcaggcccccatcagcagcagcgagccgatggccatggcgataagcgcctccgccagggaaaatccgcggcggctcactgacaccctcctgcgctgtcgctgcggcataaacgaatccgcccccagtgtgagatcacaatgctccagctgccggccgcgctctgcagccgcagattccccgcccaggcggtgctgcgcagaccataaaaccccagaccaggcgtaacgccagccagcgtgatccccggccagcgcgggcgcagcgtgaaggatgtccccgaggcgcagtcaggcccctccccctccgcgctcaggcaccagcccacttcgtcctggccgacgcgaagcacgcggtcccggttgtaggcgttggcgtcatcgcgcagaaagagcagaaaatcccgcacctggacggcggtttgccacagtcgttgctgctgctgccagcgctgccagccgtacaggccgccgacgctgaggagcatcatcagtgtcagcgttaccagggtttccatcagggtgtagccatgttctctgttcatggcgtcgagtatgccgcggcgattggccctggcgcgacgacggaaaatagctttcccggccagatacgcaaaaaagctttgcatactcgacagaagaacatttttttgcgaacgtctacccaacttcgcccaccgcaaccacctgtggcctggggggcaggtgaaaacaaccttctcccggtggtaacggaaagcgctcccatcgggtggtgcgaagggcataaaaaaaccggcgccatcgggcgccggttagtcatctctgctggggggttaaatcgccaccggcgctttaatgcccgggtgcggatcgtaaccttcaatctcgaagtcttcaaagcggtagtcgaagatcgacgccggcttgcgtttgatgaccagcttcggcagcggacgcggttcgcggcttagctgcaggttggtctgctcaagatggttgctgtacagatgggtgtctccgccggtccagacgaaatcaccgacctgcagatcgcactgctgcgccaccatatgcaccagcagcgcgtagctggcgatattgaacggcaggccgaggaacacatcgcaggaacgctgatacagctggcaggagagcttgccgtcggcgacgtagaactggaagaaggcgtggcacggcgccagcgccattttatccagctcgccgacgttccatgccgagacgatgatccggcgggagtccgggtcgtttttcagctggttcatcaccgtgctgatctggtctatatggcggccgtccggcgcaggccaggaacgccactgtttgccgtagaccggccccaggtcgccattctcatccgcccactcgtcccagatggtgacgttgttctcatgcagataggcgatgttggtgtcgccctgcaggaaccacagcagttcatggatgatggagcgtaaatgacagcgcttggtggtcaccagcgggaagccttcctgcaggttaaaacgcatctgatggccgaaaatggagatcgtgccagtgccggtgcggtcattttttggcgtgccctcggtgagcactttctgcatcaaatcaagatactgtttcatggttcctcaagaattctgttgctgcggacggtggcggtaagcccaaaccatcataatgatacccgcaagcaccatcgggatcgaaagaatctgccccatactgatgtactgcacccagccgccggtgaactgggcgtcgggctggcggaagaattccacgatgatgcggaacaggccgtagccaatcaggaacagaccggaaacggagccggtcgggcgcggtttacggataaacaggttgaggatcaggaacagtaccacgccttccagcgccagctcgtacagctgcgacgcgtgacgcggcagcgcgccgtaggtatcgaacagcgattgccattccggatgcgtcggcagcagcgccaggtcttcggcacgggagcccgggaaaatcatcgtgtagtggaagctcgggtctacgcggccccacagctcgccgttgataaagttgcccagacgcccggcgccaagaccaaacgggatcagcggcgcgataaaatcggagacctggaagaaggtgcgtttggtgcgtctggcgaagataatcatcaccaggatcacgccgatcaggccgccgtggaacgacatgccgccgtcccagacgcggaacagatacagcggatcggcaagaaataccggcaggttgtaaaacagcacgtagccgatacggccgcccaggaagacgccgaggaagcccgcgtagagcaggttttccacttcatttttcgtccagccgctgcccggacgattcgcccgacgggtggccagccacatcgcaaagacaaagcccaccaggtacatcaaaccgtaccagtggagggagaccgggcctagagaaaaaatgaccggatcgaactccggaaaatgcaggtagccactattcatctgtcaccataaagacttgttattccgccgaaagtggacagcggtgatgatccatacccgaacaaaacgggcacgccgaaggaggcgaatcatagcataagccacaagagcgatccgcgccgaacgtgtaaaagatatgtatacggatgctaacagaatgccgttttcccggcggtaccctactttgccggagggtgcgagcagaggatccccgggttacggcttacgcctcacccgggctggcgctaccgcccgccgcggatcaggccgccgagaccgcgacgctccataaaggccgccacctgatggcgcacctcggcggtcatctgcgcatcgaggctgcgacgcgacagctcctgcgcctcttcgatatcaatgcggcgcagcagatacttcaccctcgccaccgagcggccgttcatcgacagatggcggtaaccgaggccgataaggatcgtcacgcacattgggtcgcccgccatctcgccgcacaggcgcagatcgatgccaaagcgctccgcgtcatgggcgatcatcgccagcgcccgcaataccgcaggatgcaggctgtcatacatgctggcgacccgggtattgttgcggtcgacggccagcaggtactgggtcaggtcgttcgtccctaccgagataaaatcgatccggctggccagctgcggcagcataaagaccatcgacgggacctccagcatcacccccaggcgcggacgtgggatggcgtagccgatcatctcttccacttcccggctggcgcgatcgatcagccgacgggcctcatccacctcctccagactggtcaccatcggcagcaaaatgctgaggttgccggtggcggcgttggcgcgcagcatcgcccgcacctggatcaaaaagatctccggctgatcgagggtgatgcggatcccgcgccagccgaggcacgggttctcttcgctgattggcatatacggcagctgtttatccgcgccgatgtccagggtacgcagggtcaccggtttgctgttaaacatctgcagcatgccctgatactgggcgacctgctcctcttctgaggggaagccgctctgcagcataaagggaatttcggtgcggtagaggccaatgccgtcaacaaagctgccgagcttctcttcgtgctccgggcttaagccggcgttaagcatgactttcactcgctcgccgcttttcagctccgacgcgcgctggagatcgtcctccgccaggcggctgagttcgttctcttcgctgataaggcgctgatactcctgcaacaggacaggttcaggatccaccagcagctcaccgcgatagccatcgacaatcagcgtatggccatgcagcagcgagggctgaatatcggcgcccatcaccgttgggatgccgagggcccgcaccataatagcggcatgggagttggcggcgccatcgcgcaccaccacgccggccaggcgatcctgcggcacttcggcgagggtggtggccgacagctcgtccgccacgaggataatgcgcgccggccaggtgttgggcccctgaatactgtcgtcgagatggaacagcagacgctggcccagggtacgcagatcgccggcccgctctttcaaatagccgtcgctcagcgcggcaaactgttcggcgaacttctcaatgatctttttgacggcccactcggcgacggcgcctttgtcaacttcggcaaacagctcgcgacgcaggcgggcgtcagagagcaggtgcgagtagagatcgaagatcgccgccgtctctttttgcgccccggcggcgtagcgtttgctgtagcgacgaaactcgttggccgcctcttccagcgcaccggtcaggcgttcgcgttccgaggcggtgtccagcgtcgaggcttcatacacctgctccatcagcggcaggctgacgtccatccagccctcggcgatcgccaccccggaagaggccggcagagcgcgaatgcgcgtttgacgatactggccgaacagggcgttcagctgggactgggagcggatcgccgccatctgggtggcgagggtgacgaggaaagactcttcgctttcatcaaactgacgcagctcgcgctgctggaccaccagcacgcccagcagctggcggcgctgaatgatcggcacgccaaggaaggcgcggaagcggtcctctttgacggcggggatatatttgaagctggggtgtttttgcgcatcggcgaggttgatgggttccgccaggcggccaaccagccccaccaggccttcatcgaacgccagcgcaacggtgcgcccgcgaggtttttttaacccgcgggtggccatcaggtaatagcagcgtcggtcattgtcagccaggtaaaccgagcagacttccgtctccatcgcctggcagacatccgtcaccagaatatccagcgcctcgtttaaacgcggcgcgctcgcgaccttctcgactatttctcgcaaccgagtgagcataatgtgcgtggcttaacctcttttacgtcgataagcaggcgcgttttgcggcttaggtgcgctctccgccagcgacatggtcacgctggcgaactctttcatcacccggcggtagacgtcgcgcttaaacgacaccacctggcgaaccgggtaccagtaactcacccagcgccaaccatcaaattcaggtgtactgctggtttgcatattgatgtccgcatcgttgccgatcaactgcaaaagaaaccacttttgtttctggccgatacaaaccggctttgtgtcccaacgcaccaaacgtttaggcaacttgtaacgcagccagttacgggttgaggccaggatccgcacatctttacggcttaacccgacctcttcaaacaattcccgatacatcgcctgctctgcggattctcctggattaatgcccccttgcgggaactgccacgagtgctgaccatagcgccgggcccacatcacctggccctgacgattacagattacaataccgacatttgggcggtagccatcgtcatcaatcaccggactacctcaagataagcttcaatgtgaatgattgtttcacactcgccggaaacggtaaaccactctgttcgcacactgagaacggataacatttgaataactcacagtaattgccagagttataaacaatgaaagcgcgtgacagccgattttattcactttttctgtggatagagttgtgaagaagtacggaattaacccgggaaaacccagagtaatccgaacatcgcatcgctagcatctgaaaataatagtatcatattcataaagttagaatatattcctttcacacattacagcataacgtgacgatcatcacacatgcgatctgccgactgatgaaagatcgagcaatgtcgattttatccacagattacgcgcaggccaccggcagattttctctaaaaattcgattttcgtcgcacgtcaaggctgtaaatcgaaccagtagtgagtcttttccccagttatcccacttttctgtggataacatggtgtaagatcctgtttattgtcagtgaccagttctggaaaacccgtttacaccgttttcataagccgcatgatgagtttaaaaagccatataaatcatgagattggtatagttactcagaaaacggtaaactctatccacaacgcgcaaaattagcgctcactttttaaccaaaggtattgccctatgcccgctatcgctccgctcgcctcaccgccgcaaagtcaggaacagctgttggcccaggcccgccagctggccggctattcgctgggcgagctggcggcgctggcggggatccccattccgcgcgatctgaagcgcgataaaggctggacgggcattctgctggagctgtggctgggcgccagcgcaggcagtaaacccgagcaggatttcgccgcgctgggggtcgagctcaaaacgatccccatcgacagccggggacgcccgctggagaccactttcgtctgcgtcgccccgttaaccggcaatagcggcgtcacctgggagagcagccatgtacggcataagctgcagcgcgtcctgtggatcccggtggagggtgaacgcaccatcccgctggcggcgcggcgcgtcggcgcaccgctgctgtggagcccggacgaagacgaggagcgccagctgcgcatggactgggaagagctgatggatctcattgttctcggtgaggtagagcgcattaccgcccgccacggcgaggtgctgcagttaagaccgaaagccgccaacagcaaggcgctgaccgaagccatcggtgcccgcggggagacaatcctcacgctgccgcgcggtttctatctgaaaaagaattttaccgccgctctgcttgcccgccatttcttgttacaacacgattaattttttgttctgcgttgggggttgcatataattgctgctttctattttgcaggactttgaacaatgttatttgcatggataaccgatcctaacgcctggctggcgctgggcacattgacgctgctggagatcgtgctcgggatcgacaatattattttcctctctctggtcgtggctaagctccccaccgcccagcgcgcccatgcgcgccggatcggtttgatgggcgcgatggtcatgcgtctggcgctgctggcctcaatcgcctgggtcgttaagcttaccaacccgctctttaccgttttcggtcaggagatctcgtttcgcgatctgatcttgctgctcggtgggctattccttatctggaaagccagtaaagagatccatgaatctatcgaaggtgaagaggaggggctgaagaccaacgtccactccttcctcggcgccatcgtgcagatcatgctgctggatatcatctttagcctcgattcagtgatcaccgccgtcggcctgtcggatcatctgttcatcatgatggcggcagtggtgatcgcggtgggggtgatgatgttcgccgcgcgacccatcggcgattttgttgaccgtcatccttcggtgaaaatgctggcgctgtcgtttctgatcctcgtcggctttaccctgatgctggaaagcttcgacgtccatgtgccgaagggatacatctatttcgccatgttcttctctatcgcggtggagagccttaacctgctgcgtaataagaaaaacccgctgtaaaccacaaaattgcagcctggtcacaggctgcaaccctttttcagactttactgctttttatgtctcacaaatcaggctattaatagacgggtatggggtgcagctactgaagaggtgttgacgatgaagaaatgggcagtattgatttccgccgtaggactggcgttctcggtttccggttgcagcagcgattacgtcatggcgaccaaagatgggcgaatgatcctgaccgacggtaaacctaccgtggatgacgataccggtttaatcagttacgaagatcagcagggtaataaaatgcagatcaatcgtgacgacgtttcgcaaatcattaagcgttaatctttccctgtcggccccagcttctgttgacgctgcgcttaccgaccaccagtcttttgagaagagtcgggatataccaggacgccgcgggtttcacccaccgcccctcctcgtcacccggcttttttgattttttacttcctctttttctcaccctctgccatgttgatactcctttgtcggggaatgcctgaccttataaataaaaaggaagctggctatgcagtatcaccgtatcccacacagttctcttgaaatcagcaccctcgggctgggaaccatgacttttggcgaacagaatagcgaggccgatgcccaccagcagctcgattacgcggttgccaacggcatcaacctgatcgatgtcgctgaaatgtacccggtcccgccgcgcccggaaacccaggggctgactgaaacctacgtcggcaactggctggcgaaacgcggcaatcgcgaaaagctggtgctcgcctccaaagtcagcgggcccgcgcgcaataacgacagcagcattcggcccaatcacgtcctggaccgcaaaaatatccgcgaggcgctgcacgccagcctgaagcggctgcagaccgattatctcgatttatatcaggttcactggccgcagcggccaaccaactgctttggcaagctgggctatacctgggccgacgccgcgcccgccgtgacgctgctggataccctcgaagcgctgaccgagttccagcgcgccgggaagatccgctacatcggcgtgtcgaacgaaaccgccttcggcgtgatgcgttatctgcacctggcggataagcacgacctcccgcggatcgtgactattcagaatccttacagcctgctgaaccgcagctttgaagtcggcctcgcggaagtgagtcagttcgaaggcgtggagctgctggcctactcttgcctggctttcggcacactgaccggcaagtatctcaacggtgcgaagccggcgggggcgcgcaatacgctgttcagccgctttacgcgctacagcagcgagcagtcgcagaaagcggtagcggcctatgtggatatcgccaaacgccacggcctcgatccggcgcaaatggcgctggcctttgtgcgtcggcagccgtttgtcgccagcaccctgctgggggcgacgaccatgacgcagctgcaggccaacgtggaaagtttgcagcttgagctgagcgaagaggtattagcggagattgaggcggtgcatcaggtttatacctacccggcgccgtaaaaaagcaaagccccgggtagcggcgtatacgccttacccgggctaccgaagagcagatattggcgaccccctcgcccagtcaagcgcagcgtaagccgggaggttatttacgccgcccccagacccacagcgcggcgatggccacggcgaataccgcgccaaagcctatccccacggcgaccggtggaacgcccacgctcaccgccagggaatagagccccagcatcagcagcatcgccacgttctcaccgaggttctgtaccgcaatggcgttacctgccccgaccgaatgtttcccacgctcctgcagcagcgcgttcagcggtacgataaagaacccgccgaacaccccgagcagcagcagcagaccgaacgccggcagcagcgactgctgcaccgcaaaggctatcaccgcgataccgatcaaaatcccggccggcatacagcgcgacaccgtctccagggtcaccagcttcgccgccgccccggcacccagcacaatccccaccgccaccatcgcattaagataggtgggcatggcgttgctggtaatgcccagcgccaccggcacccagatcaccagcaggaaacgcaaggtcacgccagcgccccagaacaggctggtgcccatcagcgaaaagcgggtttcgccgttgcgccacagcgtccggcaggcgctgaagaagctgtgcgtcattggcttaaaacgccacgactgccccggacgcgccgccggcagcctgggtatccacaggttagccactaccgccccgccgtagaccagcgcgcagacgatcagcgccgccagcacgtgccagtcggcgaggatcccgccggccatggagcccagcaggatcgccgcgatggtcgaggactccatcagtccgttagccttcactaacttatcgccggtggtgagttcgccgagaatgccatacttggccggcgaataggcggcggcgccaatccccaccagcgtatagccgataaacggattgacgccgaagcagatgcagccggcgccgagcagtttcaggccgttggccaccatcatcacccggcctttggcaaagctatcggcgaactggccgacaaagggggcaaagaggatgtaagcgcccacaaacaacatctgcaggaccggctggctccactccggataatagagctgcttcatcagcgccagggtggcgaagagaagcgcattgtcgccgaaggccgacaggaactgggcgcagatcaccgccaccatccctttcgagtacagcgaagggttagtatgtactgactcactcatgggttgtttccgcctcgtcgaccatatttttcagggtgacatagtctggcttgccgctgccgagcaccggtagctgtttcagccagcgtatatctcgcggcaccgccagctccggtacgccgtgctggcgggcgtagcgcagcagggcttcacgagtcagttcattatcggtggtaaacagcaccaacgcctcgcctttgctggcgtcctgtttaatcgccgtggcgtgcattttgtccggcgacgcgccgagggccacctgctccaccatctcgagggagatcatctcgccggcgattttggcgaagcgcttcgcgcggccctgaatgcggacatagccctgctcgtcgaaggtaacgatatccccggtgtcataccagcccgcttccatctcgccgtgctggttttccgccgcaggcgcttccagcacgccggggttttccacccgcaggtagcctttcatgatgttcggccctttcagctgcagccgccccccttgatcaatgcctggcatcgccagcaggcgggcgtccatccccggcaggatgcggcccacggtgccgaccttcgccgccatcggcacgttaatcgagaccaccggcgcgcactcggtcacgccatagccttcgagaatgcgcaggccgaatttatcctgccacagctgtttggtgctctcctgcagcttctccgccccggcgaccacgtagcgcaggcggtagaaatcgtacggattggcgaaacgggcatagttggcgaggaaggtcgaagtgccgaacagcaccgtacagttgcgatcgtagaccagctccggcaccacgcgatagtgcagcgggctgggatagagaaacacttccgccccggtaagcagcggcgtcagcaggccgacggtgaggccaaaagagtggaacagcggcagcgccgacataaagcggtcattggcggtaaagtcggcgatagttttgatctgctcgacgttggacagcagactcttatggctgtgcaccacccctttcggattgccctcggaaccggaggtgaagaggatcatcgccgcgtcttccggctgctgcttaacctgcgccagacgcggcgccagcagatgagcaaaaatccacagtttgtcagcgagggtgatatcgcctttaagatcttccaggaatacccagcgcacctgggtcagctgctccggcaggtgccagagtttgcctttatcgaggaaggtgcgcgaggtgaaaatggtgttgagctccgcggcggctatcgcgctgctgagccctttcaccccggcggtatagttcatcatcgccggaatacgcccgcgggcgatagcgccgaaaatcaccgccgcgctgatgccggcgttaggcagcatcaggccgatcttctcgcccggctggctgtatttttccagaatgcgggcgacaaacagggttttggtcagcagcttgcgataggtatccggctggaagttgatatcctccacgcagggtttgcgcgcgccgaagcggtcctgcgccgccagcagcgactcatacagggtttcccgcgggcgcaccgccatccgggcttccatcatgatctggtgcagcatctccccggcgatcttccgccggtcgcgggcgcgcggcgcctcgggcatcggcagatgggtgggcggcaggagatgcagctgaatacgcgggaacaggcgacgtttcaccagccccttcagccggctgaagggtgtcagttcggcgccttcaatacgcagcggcacaatggtcgcctgcgatttggcggcgacaaaggcggcgccgtcataaattttcatcagcgagccgctgaccgaaattcgcccttccgggaaaataaccaccggccgcccctgctcaatcaggcgcaccagatgtttgatcgacatcggcttggtcgggtccagcggcacaaaatcgataatcggcgtcagcgcgcgcataaaccagcgctggctgattgaggtatagaccgcaaaaaccggtcggaccggcaaaaacagcgccagcagaatgccgtcgaggaaagagacgtggttcggggtgattaagaccttttgctggtataaagcctgcgtgtcgccggtcagtctgacccggtataaccccttgaacagcagtctgaaaaatcccaaaagcataacaactccatgtgaccggttgatgagtcaaagcaggttacacgagaaggcatgggaaagcagtgcagcggggggattttcggaataaaaaaaacctgcgcatccgcgcaggtcggtgtaagacgttcagtacgaagagcgtacctgagaaactcacctatcaatacctctgggatctcgattgtcacgttttttggccgtaacgggccagcgggaaaacgcaagggagtgagcctaagtgcaacgaggtattacgattttcgctatctgtaacaacgccgatagcgggcaaaaaaaaacctgcgcatctgcgcaggctggtgtaagtaaagtggtcaacgtgacgttgactccacctatcaatacctctgggatagccagaatatcaaccggatccgcgaacaaaccagcgaacattcgcaacagcgcatcgcaaagtgtaagcaaaggtttgtatttccctgcgccggtttcaattaccgatcgcgtcaatgtaaacaggtcaccgataagcccgcgctgaatcacatttgcgccattccttcgccgccgcgccttgaatctgccgctctttcccgtaacatagcagtatgtaaacgcttaccctagaaaaggcatggtatggcgactattaaggatgtagcccgactcgcaggagtctccgtcgctaccgtctcccgcgtcatcaacaactctcccaaagccagcgaagcctcgcgtcagtccgtgggcgcggcgatggaaaccctgaactatcaccccaacgcgaacgcccgggcgctggcccagcagtcaacggaaaccgtcggcctggtggtgggcgatgtctccgaccccttcttcggcgcgatggtcaaagccgtcgaacaggtggcctaccgcaccggcaattttttgctgattggcaatggctaccacaacgtgcagaaggagcgccaggcgatagagcagctgatccgccatcgctgcgcggcgctggtggtgcacgccaaaatgatccccgatgaggaactggcggggttaatgaaacagatccccggcatggtgctgatcaaccgcatcctgcccggatatgaaacccgctgcgtggcgctggacgaccgctacggcgcctggctggcgacccgccatttgatccagcaggggcacacgcgtatcggctatctgtgctcaaaccatgatatctccgatgcggaagatcggctgcaggggtactacgcggcgctggaggagagcggcctgccgtgcaacgaccggctggtcacgtttgccgagccggatgaaagcggcggcgaacaggcgatgaccgaactgcttggccgcggccgccactttagcgccgtcgcctgctataacgactcgatggccgccggcgcgatgggggtgctgaatgacaatggcatcgacgttccgcgggagatttcgctgattggcttcgacgatgtcctgatttcgcgctatgtccgcccgcggttgactaccgtccgctatccgatcgttacgatggcgacccaggcggccgagctggctttagccctggcggagcaacggccggcgccggagatcacccatctgttcagcccgacgctggtccgtcgtcactcggtggtcgccccgcaggaaggcgataagtcatagcgatagaggtgcacggcggtggccgggtaatccagtccctcgccgatgtagcgccagccgaagcgttcatagaaatcccggcaggcggagtagagatagagctcccgaaagcccgcgaggcgggcataatcgatcacatgccgctgcagttttccggccagcccctgaccgcgggcggcgggcgcgacgtacagcgccgccagccagggaaacagatcctggcggctgatcaaatcgcagcgccagaggccaatcgtgccgagcaactgctcgccttccaccgcaataaaggtcaacggcagcgcctccgccgtctggctatgctgcacgatgctggcgaagaattgccgcggcagcgtctcgccgccaaaggcctgccacaaccagtcggtcacctgcgggacgtactgcggcgcagcgtacagcggcaggatcgtcataccagcttcccctgaaaaatcggcactgagtcgaacagatagccgtcaaagtcgggggcgtcctcatcggaaagctccagcaggctgtttttgacgttttccagatgctgccacatcgcctgccaggcgcccatcacatcgcgacgccgcagcgcggcgagcagagtctgccggtcgccgagccatttcagccgccaggcgcggctggcaatatgcacattgaactgctgccacagcgggctgctgtccatctgcagccagatccgctctaccgtcgccaacagcatctggttctgcgtcgccccggcgagcaccagatggaacagacgagcgttatcctgcgcggtgtcgttgagagcgattgcccgctgctcctgttcaataatccgcttcagattgtcgatatcggcgcgggtggccattttcgcggcaaaggcggcgatgttgctctccagcagctggcgcgcctggagaatttcaaacgggccgacgtcgctgctgagcagctgctcctcttcgctgtcgttctcgtggggaatgcgcatgacatacaccccggatccctgacgaatatccaccgtcccctgcagctccagcatcagcagcgcttcgcgcacgatggtccggctgacgccataggtttcggcaatatggcgttccggcggcaaacgcgacccgaccgggtagcgcccctgcgcgatctgggcgcgcaggtcatcaccaatctcctgatagggcttcttttccggcggaactatcgctttttccacaaaatcacctgtgcgttacatgcctgcgagtcaaatacgccgctatcttagcaaatattgcccccggctagcggtattcatcatcgatatccagcaccagttcacgccgttcgcccagttgacgaaaccagtgcgccgaggctttgggtcgccgggcgcgatggttttgcagatcgatttcgataagcccgtagcggtttttaaaggcgttcatcggcgatacgttgtcggtaaacgcccacagcatatagccctggcagttggcccctgcctcgcgggcgcgcagggtgtgccacagatgttcgctgataaaacgaatgcggtagctgtcatcgatgacgccttcgcggttacggaactggccttcgttttccacccccatcccgctctccgccacgaaccacgggatgttgcgatagtcattttttatccgcatcgccatatcaaagatgatttgcgggtagatttcccagccgcgggaggcgttcatccgccggccgggcagctcaaacggctcataataccaggccggatggaacggggtgtgcggatgccaggcccgcgacggggctttgacccggtgcgggtagtaaagattaatccccagctcatcgacggtgtgctcgcggataaccgccagatcctcctcgctggtctcccacgtcacctgatgctgctcaagcagcgcgagaagctccggcggccagacgccgtgcaccagcgggtcgaggaacatgcggttgtagaacagatcgtagatctccgccgcgcgcaggtcatggggggcgcgtgagcgtgggtaggtcacctccggattgaggatgcagccgacggtcccgggatagccgagctcgcgaaaccgcttcacgacgctggcggtcgccagcaccttatgatagttccactgcatccaggtgctggtgttctgctcatagggccagcgcagagcatccagatagacccgggtctgcaccacaattggctcattaaaggtaaaccagcgcgtcaccttcgggtggtagcgggcaaacaccttctccgcgtagcgcacaaacagctcaaccaccgttttcgacccccagccgccatacttttccagcagatagccgggcaattcataatgctcaaggcagatcatcggcgtgatgccgttggccagcagcgcatcgaacagctggtcgtaataggccgcatactcctcatccaccgtgacgttttcgtagtcggtcagaaagcgcgaccagttgattgaggtgcggtagtgggtcagcccggccagcttcatcagctgcacatcttcctgaaagcggttgataaaatcggtggccaccgccgggccatagccgttatgccagacgtggcgatcgtttttgtaccagagatcgggccaggagtcctgccctggttttttcccgctccagccttcggtctgccaggcggaagccgccgcgccaaggataaaatcatcgggaatggtcatccgtacggtagtcataggctcctcagacagggttggcggtttgttgattgtctacctgacgctgcgcggcatcggcacggcgggaggcgattttgacgaaaggcagatagataagcaccgcgacgacgatgcagataagctgggtcaccaccgcccccatcgagccggcggtggagagccaggcgttgatcagcggcggcgtggtccaggggaccatcaccaccgccttgccggcgaagccggtcagggtggcgaaatagccgatgctgccggtcaccagcggggtgatgataaacgggatggcgaggatcgggttaagcatgatcggcatcccgaagatcaccggctcgttaatattgaacagccccgggcctatcgacagcttggcgatctctttcatctctttgcgcctggtggcgatcatcaccgcaatcagcaggccgatggtcagccccgagccgccgatgctcatgtagacatcccagaagggcatcgtgatgatgttcggtacctctttcccctgctcaaaagcgctcatattgacggtgatcgctcccagcagcagcggctcgcggatcggcttgatcatctggttgccgtgaatgccgatcacccagaacagctgggcgacgaacatcagcagcaggatccccggcaggctctgcaccacccgctccagcggctgctgcaccacctggtagaccgcatcgtagagatacattcccgtcagctggtgaaagagaaaaccaaaggtggcgatcgcggtggtggtgatgatcgccgggatcagcgcggaaaaagaggcagagacgttcggcggcacggtatccggcattttggtcttcagtcccttgcgcccctccagccagcagtaaatctccactgacagaatggcgatgaacatcccaaggaacagactgcgggtatcggaaaactggcgcagcaggacatctttcaccacgtgcatctggccatcgaccatcatctccaccgtggtcggcgtgacgcagataaagcagatcaccgccaacaggccgggaaacaggcttttgatgccgttgatccgccccagctcaataccgatcagaaacacggcgccgatattgaggaagttgagcgtagcgtagttaagcgcgctggtgatcggcttcagcgccgcaagaaaggagagcgaggaaaagctggcgagcccatttttcggatccagcaccatattggagatcagcaccgaaaaggccccgacgatgatcaccggcatcagggtaataaacgccgatttgatcgccataatgtagcgatagctgttgaatgtcgtcgcgaaacgccccagcgcgtcgatcagtttgtcctgtaatgccataaaagagtacctcagtgtaaagggcttaatgcggccaggtgaacagccagagacttttggcataccaaaacatagtcgccaggcaaaaatagttctgtgacagcgctcgcaacgcgcacagtggtatcccaaatatccgataaaatcgacattggcataccagagtctgtcggctcgtcagttcctgccaaaagcgtgatcgcgatggtttttccgccccgccccgtcgatatgtcccttttcggtctgtgataaactgcgctttaccacgtgaaatcaggaatcgatgaatggctacaatgctggatgtctcaattcgcgcaggcgtctcgaaagcgacggtttcccgcgtgttgaacggcacaggtcaggtgaaagagagcacccgtcaacaggtctttaaagcgatggaagagctgggctaccggcccaatttccttgcccgctcgctggccaatcagaccagcaatagtatcgggctggtcgtctccacctttgacggcttttactttggccgtctgctgcagcaggcgtcacgccagaccgaagcctggggaaagcagcttatcgtcaccgacggccatgatacgccggagcgcgaagaggaagcggtgcagatgctcgccgaccggcagtgcgatgcgatcatcctctatacccggcacatgagcgagaaggcgatcatgtcgctgattaactcgatcgccatgccgctggtggtgattaaccgcgatgtggcgcaggcccgcgaacgctgcgtgttcttcgaacagcaggaagccgccttccaggccgtggagtatctgattacccagggccaccgcgatatcgcctgcatcaccgtcccgatgcatacccctaccggccaggctcgcctgcagggctaccgcaacgcgctgataaaacatggtattgagtgggatccgagccgggtgaagtatggggactcgacgatgacccgcggctacgaactgtgccgggaactgctggacgagaaagcccgcttcagcgcgctgttttcctgtaacgatgatatggcgctgggggcgtcaaaggcgctgcatcaggcggggctgcgtattccacaggatgtgtcgctgtttggcttcgacgatgcgccaagcgcgaaatggctggagccggggctgtcgacggtttatctgccgatcgacaacatgatcactacggctatcgaccaggcgatcaagcttgccaatcagcagccgatagaaacgatcccgccgtttaccggcacgctggtgcttcgcgagtcggtgacgacgggacctttttttaaataagctctaaggccagcagctcctggatggtctggcgacggcggatcagccgcgccttaccgccatcaaacagcacctccggcagcagcggacggctgttatagttggacgacatcgaagccccgtaggcgccggtgtcatggagcaccagataatccccaggcgccaccgccggcagcaggcgggtctcgactttgcccccctcctgctgggtaaagacatccccggattcgcacagcggcccggccaccacggtttcgacctgcggcgcggcgctgagatcccggccatcccccgccagagcggtgatatggtgatagctaccgtacattgccgggcgcatcaggtcgttaaagccggcgtcaatcagcacgaagtgacggctgcccatctctttcacgctgcgcacctgcgacaccagcacgccggactcggccaccaggaagcgtcctggctcaatctccagtttcaccgggtgccccagatgggccgcgatctgctcccgggcgcggttccacaggccataatagtgggcggtgtcgatggcctcttcaccttcgcggtaaggaatcgacagaccgccgccggcggagatggcctgcagatcctggccaaagtcgacgacctggcgcaccatcgcgccgcacacctgctccaggtgaccatagtcaacgccagagccgatatgcatatggatcccgatcagctgcagctgatagcgacgcatcacttccagcgccgccggcaggtggctgtaccagatgccatgcttgctattctcaccgccggtattggttttctggctgtggccgtgaccaaagcccgggttgacgcgcagccagacgcgatggcccggcgacacctcgcccaactggctcagcatgtcgatcgagccggcgttcaccgggatctgtaacgccttcacccgatcgagggtggcgtcgtcgatcagatcggcggtgaagacgttatcctcgggattctgctgcggatcgtagcctgccgccagcgcccgctcgatctcccccagcgacaccgagtccaccttcaccccctgctcacgcatcagacgcagaatatgaatgttagagcaggctttttgcgcaaaacgcaccacgtcgaactggctgagctgggctatctggcggcgaataatctgcgcatcatagacccagaccgggcagccaaattccgccggcaggcgcagcaggttgtccgcggtcaggtcagtatcggtggcgtaaagcgagtgtggcataagaactccggtgcagtacgtgtgttggtcgctgttttttctgattacgccacagtgacagacgaataaaaaatatcgttttatcgcgactctatgcaaaaatgatatggttccagccgagcctcacggagaccgcatgccagccgtcaatttgcgtcatattgaaatctttcacgcggtgatgaccaccggcaacctgaccgaagcggcgaggatgctgcacacctcgcaacccacggtcagccgcgagctggcgcgctttgagaaggtgctcggcctgcagctgtttgagcggacccgcggtcgcctgcagccgacggtgcagggcctgcgtttgtttgaggaggttcagcgctcctggtatggcctggaccgtatcgtcagcgccgccgagagcctgcgcgagttccgccagggcgagctgtcgatcgcctgtctgccggtgttttcccagtcctttctgccgctgctgttgccgccgtttctcgctcgctacccggaggtcagcctgcagatcgtcccccaggagtcgccgctgctggaggagtggctctccgcccagcgccatgaccttggcctgacggagaccctgcatacccccgcgggcaccgaacgcaccccgctgctgacgctgaatgaagtctgcgtgctgcccgccggccatccgctggcggcgcaggcgacgctgacccccgccgattttcagggcgaaaactatatcagcctgtcgcgcaccgacagctatcgccagctgctcgacgccctgttccttgagcatcaggttaaacggcggatggtggtcgaaacccacagcgcggcctcgatctgcgccatggtgcgcgccggcgccgggatctcggtggtgaatccgttaaccgccctggactatgccgatagcggcgtggtggtgcgccgcttcagcgtcgaggtgccgtttaccgtcagcctgatccgccccctccaccgcccgcgctcggcgctggtcgacgcctttgttgcccacctgcagcagagtctgccgcagatcctcacgccgctggcgtcggtcctgcagagagcataaagttgaccgcgtcttccgcgtggatcgccgcggtgtcaaagaccggcagcgggctgagctcggcaggcaccagcaggccaatctccgtacagccgaaaataaccccttccgccccctgctccgccagggcggcgatcgtctgcagataataatcccgcgacgcctcgctgaaggtgccgagacaaagttcgtcgaagatgatctgattgatctgcgcccgatcgtcagcctcagggatcagcgtctcgatggcaaactgctcctgcagacgaccgcggtaaaaggtctgctccatggtatagcgggtgcccagcagcgcgacccggcgctgacctttggcggcaatcgcccgtccggtggcatcggcaatatgcaggaagggaacctggcagcgggcggcgatggcatctgcgactttatgcatggtgttggtgcacaggacaatgccttcggcccccgcctgctgcagcccgaccgcggcctcagcaaggatctctccggcgcgatcccagtcgccggcggactggcaggcttcgatgtcgtgaaaatcgacgctgtgcagcaccaggctggcagagtgcaggccgcccagtcgcgccttaacgccctcattgatcaaccgataataggggatcgtggactcccagctcatgccgcctaacaggccaatggttttcatcttctgctccttatgtcgtttctgccagtgaagcaaacttgtgatcaactttccacttctctggccgcgtatttctttttcatgaagagtgggataagttaaatgaaacaatgtttcactttaacaacaggatcgccagatgtttatttttcataaagacaccacccttgaagacctcggcaatggcgtaacccgccgcattctggcccacgacggcaaaatgatggccgtggaggtgaattttgccgccggcgccgtcggcccgatgcataaccatcctcacgaacagctcacctacgtgctttccggcgagttcgagttcaccatcggcgaggagacgcgcgtcgtcagcgccggcgatacgttgtataagcggccggggattatgcacggttgcgtctgcctgcagcccggcacgctgctcgatacctttactcccattcgcgaagattttcttgaaggctaatccataacgggggcgttcgccgtccccggttactgcccggcgcccttcaataaaaagatgcggccacaatcattatcctggtaattatatttcccgctcagttaagcctaatttttcattcctttcagacgccctttacggccaaaatgcttaccacctcacctttttgaaacatcgtttcgactttgatcacatttccatcctgatctgcatgacgcagaaacaaatcgcaataaaatgaaattaaaacggtgttttataaaaaacagttccgcataaaaaaaggggctgacagcccttacctgctagaccagttaaagaataccccattaattaacaaggacatgttaagcagaggaagcgttcagacatttttgcgttgtcaggcgtaaaaggccgacagcgcggcgtcaccggatccgtattacaactcgtaagccaggtaggtatgtatgaatgaaaacaagctgctgggattggcatggatatcgccctatatcatcgggctgatcgtctttaccgcttttccctttgtttcatctttctttctcagttttaccgagtacgacttgatgagcccgccggtatttaacggcatcgaaaactatcgctatatgttgaccgaggatagcctgttctggaaatcgatgggggtgacctttgcctacgtctttttaaccatccccttaaaactggctttcgccctcggcattgcttttgtgctcaatttcaaactgcgcggcatcggctttttccgcaccgcctattacatcccgtcgatccttggcagctcggtggcgattgccgtgctgtggcgcgccctgttcgccattgacggcctgctgaacagttttctcgccgtctttggcattgatgccatcaactggctgggggaaccctccctggcgctgatgtcggtcaccctgctgcgcgtctggcagtttggctccgcgatggtcatcttcctcgccgcgctgcagaacgttccgcagtcgcagtatgaggcggcaatgattgacggcgcctcaaagtggcagatgttcatgaaggtcaccgtgccgctgatcaccccggtgattttcttcaactttattatgcagaccacccaggcgttccaggagtttaccggcccgtacgtgataaccggcggcggtccgacctattacacctacctcttctcactctatatctacgataccgcctttaagtacttcgacatgggctatggcgccgcgctggcgtgggtgctgttcctcgtcgtggcggtctttgcgtcgatcgcctttaagtcatcgaaatactgggtcttctactccgccgataagggaggcaaaaatggctgatattcaacagatggcgccggtgatgagcgacgccgatcgtgaggtcgcccgtacgctgcgccgggaaaaggtgagccgggtggtgcgctacgtcgtgctgatattcgtcggcctgctgatgctctacccgctggcgtggatgttctccgcctcgttcaagccgaaccatgagatcttcaccaccctcgggctgtggcctgcccacgccacctgggacgggtttatcaacggctggaagaccggcaccgaataccatttcggccactatatgctgaacacctttaagtatgtgatcccgaaagtggtgttaacgatcatttcctccaccatcgtggcgtacggcttcgcacgctttgagatcccgtggaagaagttctggttcgcaacgcttatcaccaccatgttgctgccgagcaccgtcctgctgatcccgcagtacctgatgttccgcgaaatggggatgctgaacagctatctgccgctgtacctgccgctggccttcgccacccagggattcttcgtcttcatgctgatccagtttctgcgcggcgtgccgcgcgatatggaagaggcggcgcagatcgacggctgcaactccatccaggtgctgtggtatgtggtggtgccgatcctcaagccggccattatctcggtggcgctgttccagtttatgtggtcgatgaacgactttatcggtccgctgatctacgtctacagcgtcgataagtatcccatcgcgctggcgctaaaaatgtctatcgacgtcacggaaggcgcgccgtggaacgaaattctggcaatggcgagcatctccattctgccgtccatcattgtcttcttcctggctcaacgctacttcgtgcagggcgtgaccagcagcggaatcaaaggttaagagggaaatatcatggctgaagtgattttcaacaaactggaaaaagtctactccaacgggtttaaagcggtgcatggtatcgacctgaagattgccgatggcgaatttatggtgatcgtcggcccctccggctgcgccaaatcgaccaccctgcgcatgctggcgggtctggagaccatcagcggcggcgaggtgcggattggggacaaaatcgtcaacaacctggcgcctaaatcccgtggcatcgcgatggtgttccagaactacgccctctatccgcatatgacggtgcgcgaaaacctcgcctttggcctcaagctaagcaagctgccgaaggcgcaaatcgacagacaggtggaagaagcggcgaaaattctcgaactggaagaactgctcgatcgcctgccgcgccagctctccggcggccaggcgcagcgcgtggcggtgggccgggcgatcgtcaaaaaaccggacgtcttcctgttcgacgaaccgctctccaaccttgacgccaagctgcgcgcctcgacgcggatccgcatttccgatctgcataagcagtggaaaaaatctggcaaaccggcgaccaccgtctacgtcacccacgatcagacggaagcgatgaccatgggcgaccgcatctgcgtgatgaagctcggccacattatgcaggttgataccccggacaatctctaccaccagccgaaaaatatgtttgtcgccgggtttatcggcgcgccggagatgaatattcgtcccagccagctggttgagcacggtggtcgcctgtatttgacgctgggcgatcagcggctgccgctcaacgatcggctgcaaaacaaagttgaaacccataagaatcagcaggtgttctttggcgtgcgcccggagtttgtctctctctccgatgaaccgtttgccgaaggttcctgcgcgggtgaaatggtacgcgtagaaaacatgggacatgaattctttgtttatctcagggttgctgattatgagctgaccgcccgcgtgccgtcggacgatgcgaagccgatgattgccaagggactgaatcgcaaagtctatttcacctttgatctcaacaagtgtcacatctttgacgccaaaaccgaacagaacctctctctgtgaaccctggagcataacaatgaaaaacgtgctgataagcgccaccctctccgccaccctgggccttagcgccttctcttcgctagcgcaggacgtcgacctgcgtatgtcctggtgggggggcaacggccgccatcaggtcaccctcaaggcgctggaggaattccacaaacaaaacccagacatcaacgtcaaagcagaatacaccggctgggacggccatctttcacgcctgaccacccagattgccggcggtaccgagcctgacgtgatgcagaccaactggaactggctgccgatcttttcgaaaaatggcgatggcttttacgatctgaataccctgaaagacgagatcgacctcagccagttcgacgccaaagaactgcagtccaccacggtcaacggcaagcttaacggtattccaatttccgtcaccgcccgcgtcttctactttaacgacgaagcatggaaaaaggcgggcatccccttcccgaaaacctgggatgaactcatggcggcgggaaaaactttcgaaagcaagctcgggaaacagtactacccggtggtgctcgaacaccaggacgtgctggccctgctcaactcttatatggtgcaaaaatacaatcagccggccatcgatgagaaagggcgaaaattctcctacagcaaagcgcagtgggcggatttcttcggtatgtataagaagcttatcgacagccatgtgatgccggacacccgctactatgcctccttcggcaagagcaacatgtacgaaatgaagccgtggatccagggcgaatggggcgggacctacatgtggaactccaccatcaacaaatattccgataacctgaagccgccggcgaagctggtgctgggggaatacccgatgctgccgggcgccaccgatgctggactgttcttcaagcccgcgcaaatgttgtcgattggcaaatcgacgaaaaacccgcaggcggcggcgaaagtgattaacttcctgctgaacagcaaagaaggggtggatattcttggactggagcgcggcgtgccgctgagtaaagcggcggtcacctacctgaccgaggatggggtaatcaaagccgacgatccggcggtgtccggcctgaagctggcgcaatccctgcccaccgctctgccggtctccccgtacttcgacgatccgcagatcgtcgcccagttcggcaccaccctgcagtacatcgactacggtaaaaagtcggtggaagaagcggccgaggacttccagcgccagaccgaccgcattctgcgccgcgcgatgcgctaacctgcccgtctgaactctcccgcggcgcacgccgcgggagggtctgccagaaggccctgtcagaagaaatatttaaagcgcacccgggcgccgtagcgttcatcgggattcccgctcttcgctgccgtggaatcgagccacgaggcataggcgccaaggtaaatattgaagttcggcatcgccatgatattcggcaactgccaggaggtgtgcagggtatggatgtcatagcgccccggcgccaggatagcgcaatcgccatcgcattcgctggtcaccccggccatattgaactggtcgattttattgtgcgcatagatatagcccagctccacgcgatgccaaagggcgttgatcccggcgctgaagtcggtttcgtccgccgcgtccagcagggcggtactcagattgaccaccgccccatcctgcggatcgcttttcagggtgttccagctcatggtcagcccgtagccggtgcggtttgactggtcgacccagcgtccgctctggctctgatagccgtaagcattgttgacgagattgctctctatcgccgcggccgccgaccaggcgccggactgccacgccgccaccggccgcacgtacaccacatttttgcggttttccagcgcgttaccatgatagttctgatcgacaaacagcgaactgccgtcctccaccagggtgttaacttcgaaataccagttatccaccgttttgctaaacagaaggttaccgccgctgctgctgcgcccgcgcccctctttcatcatgtaaatatagccatagccatcggaatagagatcgttggcggtattacctgaatattcaataaaggtatcctgattcagcgggaacatatcccaggcttcaaagcggcctatttttattttccagtcatcctgctggccgaagaaaaataccgcatcatcaagattcattttgccatccatatccgccagaggctgcacgctgaatccggcatattgcccgtcggcgccattccgtctgccatcgaaacccagcagaatacgaccgttaatatcccagcgctctttatcgccgggcgcccagcttttattcgcgctggttttgaccgacgtcagactgccggtgcgactggcgccatcgaggttaaattcgacgtcgccataaaattttaattcgccattgtcatttagctgcaaacgcggcgaagcaggcgccgcgcgggcgaccgtcgcggcctgctgctggcctttcagcgtcttaatttccgcctctgcgctggcggcgcgcgcctccgtcgcctttagccgctgctccatttgcgccagtcgctcctccagcgataacggcgcctgcgccataacggatggcagatacagagacgtcagaaaacacccgacccagattttattcatcggtaaacccttttattatggaatgaactgaattttttattaatgggtaacgcacgacgatgcaggcaataataacccgcccatcgtcaaagacgggttattaacgacaacagccttattattattcgagctgccaggcgccggcttcggttaatgccgccgcgccgctccaggcaaataacgctaattcacggcggggagcctgcggatagatacggctgctcaggcaggcttcgccgtcattgacaaaaacctccaccgaagagctatcgaaaaatattcgcaggttgagatccgccccggcggtcaacggcacgctgcgcgtcccgcacaggccatactgcggataatgccgttccagcaccagacgctgctgttgggcatccacgtagatgcgcagcccatcgccaaagcgcagaccatactgctcggcgctgctgcgggcgcagtcccagcgcagattcacctccatcgcctcgcagttgtcgaccatcgtcgtctgctggttgttcagggtgctgaccggccacgggaaccaggcgccgcgcaggctctccacttctttcgccgggcgcatctgcaggcggtcatccgcgctcaggctcagctcgcgcggcagggagagcatgcccgcccagccgtcctgctgctccggcagcggcgattcccacatatccagccagccaatcacgatccgccggccatcgggggtggcgaagctttgcggggcatagaaatcgtggccgttatccatctcccggaattcgccatggcgaataaaacgctggcctggctgccactcgccgatcagatagccgctctggaacagattgcggttgctgaaccccgcggcctgcatcccctgtggggaaaacatcagaacgcgtttgccgttgagggtgaagaagtccgggcactcccacatatagcccatggtgctttccgcttcatccagcacccccgcgtcctgccactggcgcagatcggctgaacggtacagccgcacctggccggtatcgccttcgcgcgcgccgacgatcatgtaccagctatctccctcacgccagaccttcgggtcacggaagtggtgcatacccggcggggtgtcgaccaccatcccctggcgctcaaagtggatcccgtcgcggctggttgccagacactgcacctgatacagattggcttcgtcgccaggatcgccgtggaacttatgcccggtgtaaatcagcgccagggtatcgccatcgaccaccgccgagccggagaagcagccgtctttatcctccgggccctccggcgccagggctaccggcaaatgctcccagtgcaccagatccttactgcgcgcgtgcccccagtgcatcggcccccactgggtggagtacgggtgatgttgataaaaggcatggtaccagccgtcgaaccacaccagaccgtttgggtcgttgatccatccggcgcgggccgccaggtgatagtgcggataccagcgcaggttcagcgcctggcgttgtgtctggagtacctgttcagcccgggagattgtgtaagtcatcattttcactctttttgattcagatagcggtaggttgcgacaccagcggatcggcggaggatttgccggagcgcaacaagaagatggaaataaaggtggtgcagaacaccagcaggcccatgatcaggtaggactgggcgaagccatatttttcatagctgtagcccgccagcggcgacaatacgctggcgataatcgagctggtgcaggcgaagcccaccagatagagggtggaggagagacgtttatcgaagttgaggctgttgtacttaaagatagccaccagcagtatcggcaactccaccgcgtgcagcagtttggtgatggagatcagcagcggcccctccaccagaccggaggccaccatgcgcatcgccatcaccatgccggcgaaaatcagaccgtttttggcgccgatgcggttcaccagccacggcgcgcagaacatgccggccgcctcgaggaacacctggaaggagttgaggtagccatacatctcattgccttcctgcagggtcgcgaactgcgatgagaaatagaccgggaactgctggtcatagacgccgtaaatgcaggtgccgatgacgaagaagaccagcgcccaaaagcgcggcagcgtcagcaggcgcagcgcatcttcgagggtcaccttaccgcccgataccgcctcctgcatcgcatgcggcgccgaggagacccgcagccgcgccaacaggataaagaacaccagcccggaacagctggcgacgaggaagtttagctgcggattgatgttaaacagcaggccggcgaagaaggtggccaccgcccagccgagcgagccccacatccgcgccctgccgaattcaaactggctctgacgcgccaccctctcggtgtaagattccagcacgccgatgccgccgttaaaggtcaaaccgatatagatcccgccaaaaatgctgcccaacaggacgttgattttcagcaggtggccgaacagcagatacgccggaccagagaggatcagcagcgcggtgatataccagagcagatgtttgcgcagccccagcttgtcctggataaatccatagcaaacttgcgcaaacagcgcggaaaccgacagtacggcatagataataccggtatcgcctgccttcagcccaacctcctggtgaagccagatagagagcaaggagccggatgacgaccaggtcacaaaaaagaaaaatagtaaggcactgagcaacgggtagctgtgtgagtgaggcgctttcatcatgacattctcgtgttagaggaatgcaattatggtaacgttaacaaaaaacaaaacgcaggtggattcgctgcgatatatgatgttaatcacaaaagttaacgttaacataatgaagatgcgatcgcgatcaaaaatcaaccgcaacatagctcacgacggcgatagcagaaaatcgtttcactcttttacatcagcgacttagttgtatagcctgtactctgcggcaatggcggaggaaaaaatggcgtccctgaaagatgtagcaaaactggcgaatgtatctctgatgaccgtctcacgggcgctgaacaccccggagcggctgaagcctgagacactggcccgcgtgcaggccgccatcgccgagaccaactacgtccccgacctgtcggcgaagaagatccgcggggcgcgcgccacccccagcaccatcggcgtgctggcgctggataccgtcaccacgcccttttcggtggagatcaccctctcgatcgaagagacggcccgcgcccacggctggaacagctttgtggtcaatatgttttctgacgatcgtccggaagcggtggtcgacctgctcctctcccaccgtccggacggcattatctttaccaccatgggcctgcgccaggtaccgctgccggaaaaactgctgactctgccctgcgtgctggccaactgcgaaagcctcagccagccggtggccagctatatcccggacgatgaacaggggcagtacgacgcggtgaaagccctgcttgccgctggctatcgtcgtccgctgtgcctgcacttacccgccagccagccggcgacgatccgccgccgcctggggctggagcgcgcctgccgggaggccggtatcgaaccggaccatctgagccattcgtatatgggccagggcgatgagcattaccacgatatcccggcggtggtgctggcgcatatccgcgagggtaaacctggctttgactcagtgatctgcggcaacgatcgcatcgcgtttatggtctatcagacgctgctgggccaggggttacgcattccacaggacgtggcggtagtgggatacgacaacatggtgggcattggcgatctgtttctaccgccgctctccacagtgcaactgccgcattatgacatcgggcgcctgagcgccctgcatatcattcacggcgacaaccatcgggagacgcgcaaagtcgccagcccgtggttgccgcgcgcctcacattaacgattaccgatgttgcgcagcttctcgcccgccatcaggttgcgctcaatgtgctcgagggtgacattcttggtttccgggatcagccagaaggtgatgccgataaaggccacgttgagcgccgtgtagagccagaaggtgccggcggcgccaatcgcgtcaagcagcgtcaggaaagtggcgccgatgatcatgttcgacacccagttggtggtggtcgagcaggtgataccgaagtcgcggcattttagcggctggatctcggagcagaggatccacactaccggcgccgcgctcatcgcatacccggcaatacacatcatggtcatgccgacggagagccaggagaggccgctggatgcggtgccattgtcgaactgcatcaggcagtagcccagcaccagagtgcccagcgccatcacgctaaagccgattttcagcgctggcttgcggcccgctttatccactgtgaacaccgcaataaaggtggcaaacataaaggtcaggcccaccaccagggtggcgatcatctgctgttcagtagtggtaaagcccgccattttaaagatacgcggcgcatagtacatgatgatgttcatgccggtgaactgctgcatcgcctgcagcagcatgcccaggaacaccgcccggcgcacgttacgattgaccttaaacaacgcccaaccgccctgcttcagcttgaggctctcacggatctcgttaagctcgtcgcgcgccttttccgaggtatcgcgcagcatccgcagcacttcttccgcttcgatatggcgtcccttctccgccagccagcgcgggctgttcggcaaaaagacgaccagaatgatcaggatcaccgccggcagcgccagcacgcccagcatggcgcgccagttaccgctgtagctaaaggcggtatcggaaagaaacgccagcacaatgccaagggtgaccatcagctgatacatactgatcattttcccgcgcacgttctcgctggccatctcggagaggtacagcggcgcggtataagaggcaatcccgactgccacgcccaacaccacgcgggccaccagcagcacctccacgctggcggcaaaagcggatccgatagagccggccacaaagagtacggcccccgccatcaggctgtatttacggccaaggcggaacgacagccagccgttaaacagcgcgcctatcgccgcccccaacatcatgctgctaaccacccactcctgaagctggctggataaggtgaaatggtcggttataaagggcaacgctccggatatcacgccgatatccaggccaaaaagcaagcccgccaccgccgcggcgatggaaacaaaccagttcatccgccgggtatcacgttgcgtccgcggcgataatgtagagtcgttactgattgaagtcatttttttcctgccacacagagtaagacataagacgaaagtacgtgactggtggatgaatgggtcaggcaggataagccaaagatatggactatattgctggcaggatgggttttgtgatggacattaaactttcaaagtaacaaaaaatgcgtttccaatagttaataaccctgtttatacagagcggtaacattatacctgtgttcaggagtatggacgatccgcacttttgcgtatggacaataattgctcagaaggccggagcgataccacagaccccggccatcgcggacggttagcgcgccagccagccgccgtccaccgccaccgtgtagccattgatgtaatcggaggctgaggaggcaaggaacacgactggccccatcagatcggccggtagcccccagcgcccggcgggaatgcgatcgaggatttcgctgctacgctgctcgtcggcgcgcagctgctgggtgttgttggtcgccatataccccggggcgatggcgttgacgttgatgttgtgtttggcccactcgttggccaacaggcgggtgacgcccatcaccgcgcttttggatgcggtatacgacggcacgcggatccccccctggaacgacagcatggaggcgatgttaatgatcttcccgccgctgccctgggcgataaagtgtttcgccgccgcctgggacataaaaaatacgctcttgatgttgaggttcatcacgtcgtcccagtctttttcgctgaacgccagcgcgtcctcgcggcgaatcaggccggcattgttgaccagaatatcaatatggccgaactccgccaccgcccgctccagaagctgaggaataccgtcgatctggcgcaggtcggcggtcaggctgagaaaacggcgtcccagcgcggttacccgctcgatagtctccaccggttcgacgatattgataccgacaatatcgcagcccgcttccgccagcccgagggccatcccctgacctaaaccggtatcgcatccgctcacgacggccacttttccctgcagggagaatgcatcaagaatcatattatgttccttagtcgttcagagcctgctgtttgcaggcaaggttctctcggcccggtccgcgccggcggcgcgactgagcgtggggcgaactctcgggcatagcccaccataatgaaattaaaacagagttccgttttgctgatgggtgccatcttagccccgcccccagccattttcaatattatttaaaacgatgtttcattttttatgatgacgattacaaaaaaagaaaaagcgaaggagcctcccggcacgcgccaggccggaaaaggttttgaaaagatgaagattcaaccgattgtctgcagaggtgccgaagcgaagccagcagcccgctgaaaacgcgggaattacgctgaactgcgtgagccatcacaaataatgaaacgatgttttgataaattaatacccgtcttttaaaacatatcactcagcgacacgcctctggtccagcggcatcgcaggaaagaaaggagcactacatggctaaaggcatgcgggtcaaactgaattatcacgtcagccacgatccggataccggggcggaagtcacccgcttaacccccccggaggtcacctgtcatcgcaactacttctatcagaagtgcttttttaacgatggcagccatttactgttcgccggcgagtttgacggccactggaactactatctgctgaatatcgccagcgccgaggccgtccagctaaccgaaggcgccggggataacaccttcggcggcttcctctccccggacgataagtcgctttattacgtgaaaaatgaccgtatcctgctggaagtcaacctgaccaccctcgccgagcgcgaagtttatcgcgttagcgatgactgggtagggtatggcacctgggtggcaaacagcgattgcagcaaactggtgggcattgagattgccaaaagcgactggacgccactcaacgactggcagattttccatgatttcttccataaaggaccgcactgccgcctgctgcgcgtcgacctgcgcagcggtgagagccaggtgatccatgaggaaaaaatctggctgggacacccgatctatcgtcccttcgacgaccataccgtcgccttctgccatgaagggccgcacgatctggtggacgcccgcatgtggctggtcaacgaggatggcagccatgttcgcaaagtcaaagcgcatgctccaggcgaaagctgtactcatgaattttgggtgccggacggttcggcgctgatctacgtctcctatctgaaaggccagcaggggcggacgatctatcgctttgatcccgaaagcggcgtcaacgaggccctgatgacgatgccggcctgctcgcatctgatgagcaatttcgatggcacgctgctggtaggcgatggctcaggtacaccggtggatgtcaaggataccggcggctactccattgataacgatccctggctgtatgtctttaacgtggcggaaaagcgctacttccgcgtcgcgcgccatgatacctcgtgggcgacggtggccaacagccgccaggtaacgcacccgcacccctcatttaccccggacgatagcgccattctgttcagctccgataaagacggtaaaccggccatctatatcgcgaaattacccgcgcacccgtcaatgctgagcgcctgatccacaccacacttttttctgtaactggccttgccctccttcgcggagggcttttttgtcccttctctttcccccataaaaaaaccccggctgacggcgccggggaaaacaaacgatgagggatgaatggtcggtcagaacgagtaggccaccccaacgcggaagcgggtctgacgatcgctgcggtcgttcaccccgacgttgccaatttcaccatacggcgaccagttattatccagcttataggccaccttcacgttatattcctgcgagtagggtttattgtcgttgcggctgaccccttccgagctgcgggcatagacatagttcagctctgtacgccagtcgccgaggacaaatccggcccacgcgtcgccgcggttaactttgtcatcatctttgccggcgttgttcggatagcgggtgtattcatagcgatagcgagcggcgacatagaagccgttgtcgaagctgtactgcgcgtgcaggtgcggcttgtagatggagcggctgtcgttgctctcaatggtaaacccgggggtgaggaaaaagttcgacgtcgctttccagcgccagctgatggtgtcttcatgaccattgcccaccacgtccgaatagggttgcgaaccgttgtcgccacccgaacgccatttggcctcgacggtaaagcctaagccgttggcaaagcggtgagaaacggagacgcggtcagcattacttttatcactctttccgccatcaataaattcatgacgtaaatctatcgttaccgcggttgctgcaaaagacataccgcagagggcggcgagaaccagagagcgttttaacatagggtacccttacaataaataaaatgacatttcgtttttatgaaacatcattttattttttagacaccatagttttagtgaccaggatcgtagttatttgtttcaaaaaaggtggcacaacaagacgtgacgaagctcaataatttcgccggggagagtgaaagagggaggggaaaaaataaggggtcggcaaagcacggcgcataaaaaaggcctcccgcaggaggccatggaaatcgaggtatagcgctatgcgcgttctaccgccagcgccacgccctgaccgccgccaatgcacagcgtcgccagacctttgcgggcatcgcgcttgatcatttcatgcaccagcgacaccagaatccggcagccggaggcgccgatggggtggccgagggcgatcgcgccgccgttgacgttgacccggcgctcatcccactccagtacccggccaaccgagatcgcctgagcggcaaaggcctcattggcttcgatcagatcgacgtcgtccagccgccagccggcccgctccagacagcgacgggtggcatgcaccggggcaatgcccatcagcgccggatcgacgccgacgctggcgaaggcgcggatccgcgcaaggatcggcagccccagctccagcgctttagcctcgctcatcatcattaccgccgccgcgccgtcattgatgcttgaggcgttgccggcggttaccgatccaaggcgatcgaaggtgggctgcaggctggccagcccttccgcgctggcatccacccgcggttgttcatcggtatccacggtgcgcgccgcgccgttatgctcggtgacaaccgggacgatctcatcgcgaaagcgaccggaatcaatcgccttgcgcgccttatgctgtgagctgagcgcccaggcgtcctgcagctcgcgactgatgccaaattcccgggccaggttttccgccgtgacgcccatatgataatcgttgaaagcatcccacagcccatcatgcaccagactgtcaatcagctggctgttgcccagctgggcgccggtgcggctgtcggtaagcacatgcggagcgcggctcatattctcctggccgccagcgatcaccacgtccgcttccccgcactggatcgcctgggtagcgaggtgcagagccttcaggccggaaccgcagacatcgttaatggtgatagccgatacggtgttaggcagcccaccgcgaatagcggactgacgcgccggattttgtccggtccccgcggtcagtacctggccgaggatcacctcatccacgctgtgcggatcgattcccgtcttctccaccagcgccttcaccaccacgctccccagctcgacggctgaatggcgcgataatgcgccctgaaagcagccaatcggcgttcgcagcgcgccgacgatcacgacatccttcatcctctacccctgcccatgcatttgcgcaaagaaacagcgatatactagataattgttatcaaaaaactttgtaattgtttaaaaaaagtgaagccaatcacaaagaaatagctattcgttaacgttcacgccgctgcagatgctgacgcagccagctgccggccgctcccggcggcgctttcttattccacagcagatcgactgaaatcgcccgcggccagccggggatatcgagcgccaccagcccgccctgcggcgcaaactccgccaccagcgcgctgggcagaatgcaccagccgaacccctgcgccgccatgctgagcagcagcaggtagtttggcgccgaccagacctggcctgcggcaggttcggtggcgctggccagaaaggtgctcaaacgcagctcgcgccagctgcgcagctcatcccaggcgaccttaccctgcgccgccagcggatggccaggggctacataaatgcccatcgccgtctgcagcggcaggcgggtgctgccgatatcggtggggtagcgctccctcgcctcaatcagccccacctgggcgcgggatttttgcaggagatcgatcacatcctcgtcttcgccaatcaaacactcaaactcggtatgaggaaagcggcggtcaaactgtaccagcagatcttccagcacgtccgggtgcagagtatcggagagcacgaaggtcagccgcggctccgtctcgccggacagcgacacagccagttcgtccagccgctcgctggcggcaagaatcgctttgacatagctcagcacctgctccccctgcggggtcagcgtcggttgccgcgttgccctgtcaaagaggattacgccgagatcggcctccagattggcgatggcggtactgatcgtcgactgacttttccgcaggcggcgggcggcggcggagaacgatccgctgtcgaccgcctcgacaaaggcggttaaggcttccggtgaataacgcatgatgtatctacaatatcgatgggtcctatcttttgtttatcatatttttccataaactgccgggtaatttcctgttcaggctaaaactggaggtagctcgccatgcaacagaccccacatcagcgcaagacgctcaccgaacgcgttatccacgccatcaccttcgaaggactggcgacgctgatcctcgcccctaccgccgcctggctgatgcagcgctcggtagtggagatgggcggactgagcattctgctcgccaccctggcgatggtatggaacattatctataacgcggcgttcgatcgcctgtggccggtctcccgcttcccccgccagctgaaagtacgcgccctgcacgcgctcggtttcgaaaccggattcgtcatcattggcgtcactatggtggcgatcgtgctgggcgtctcgctgctgcaggcgtttatgctggagatcggttttatgcttttcttcctgccctacaccatggcctttaactggatatgggacaccctgcgcgagcgcgttattcgtcaccgccgcccgcgccagacggcgcgcggttaatcccggcgcggatcttcgacgatccgccgcgactttatcaccaaaaactatcgcaacagacgaaccataaatatggtaaattgcactccttttttttggtttgacggttgataaagtcgcataatgtctaaaatttggtctaaagaagaaactctatggagttttgccttatatggcactgcagtaggcgctgggacgctatttctaccgatccagctgggttcggctggcgccattgtgctgttcatcaccgcgctggtcgcctggccgctcacttactggccccacaaagcgctgagccagtttattctctcggccaatatcgcgccgggaaccgggatcaccggcgcagttaatcactactatggtaagaaaattggcaacctgatcaccggcctctatttccttgccttctttgtggtggtgctcatctacgccgtggccatcaccaactcgctggccgaacaggtggcgcatcgcacgccgatgaccccagggctgcgtgcgctgctgagtctgggggtcgtgctggtcctcaacctgatctttctcatgggacggcaggtcaccatcaaggtgatgggctttctggtcttcccgcttatcgcctgtttcctgtttctctccctctatttaatccgcgactggcatccggagcatctcaccagccagatgcagttcagcccgcagacgctccaccaggtctggatctctattcccgtgatggttttcgcttttagccatacgccgatcatctcgacttttgctatcgatcagcaggagaaacacggcgacctggccatgggtaaatgcaaaaaaatcatgaaggtggcctacaccatcatctgcgccagcgtgctgttttttgtcttcagttgtctgctggcgatcccggcaacctatatagagaccgcccgcgatcagggggtgactatcctctccgccctgtcgatggagccaggcgcgccgggatggctggcggtgaccggcatcatcgtcgccgtcgtcgctatgtcgaagtcgtttctcggaacctacttcggagtgattgagggcgccagcgaaatcgtcaaaagctcgctgggcctgctgggcgtgcgtaagagccgcgctttcaaccgcgcgatgtcgatcctgctggtctccgccttcacttttgcggtgtgctttatcaacccgaatgcgatctcaatgatctacgctatcagcggaccgcttatcgccatgatcctgtttatcatgcccacgctgtcgacatggctcattccggcgctgaagccgtaccgctcggtgggtaacgccattacgctggtggttggcctgctctgcgtgtcggtgatgttcttcggctaatcccctctggcgacagcggctgcctgagctgctgtcgcacattctgacaatattctcccccttgccttccttgtgagcggattacacttacggcttagccaccgtgaggagagttcttatgtccagtgtcaccttatccggtcgcggcacgctcggcgatcgccaggtctatcgcttaggttacggcgcgatgcaactggccggccccggtgttttcggcccgcccaaagatcctgaagaagcggtgcgcgtactacaggccgccgtcgaggccgggataaaccatatcgatacctctgatttctacggtccacatgtcaccaatcagttgatccgcaaagcgctccacccctaccctgacgatctgtgcattgtcaccaaggtcagcgcccgccgtgacgagaaaggcaactggctaccggccatgtcgcccgccgaactgacccaggccgttgaagacaatttgcgtcacctggggcttgaggtactggaagtggttaatctgcgcagtatgctgagcccgcacggcccggtggagggttcgctggaggcgccactcgccaccctgctggaactgaaagagcgaggattaatccgccatatcggcctcagcaacgtgacggcaaagcaggtcgcggatgcgcagaaaatgacgcccatcgtctgcgtgcaaaacctttataacgttgcccatcgcgccgacgacgcgctggtggatgcgctggccgcccagcacatcgcctgggtgccctttttcccgctgggcggttttacgccgttgcaggcgcaggagttgaacgaggtcgcggcttcgcttgaggcgacgccgatgcaggtcgccctcgcctggctgctccagcgagcgccaaatattctgctgatccccggcacctcctcccgcacgcacctcgcagaaaatattgccgctgctgagctggtcctgcccgcggaagcgctgcgtaccctcgataatatcgccaccgccgcgcgccgctgacctgccagacaaaatggagggaaccctatccctcctcaatatttgcctggaaaaacctcaccgctactggcactatagatcctacaaatggggcgtgatcgacgatcgttctctcattatccccgttaattaaacttaagtttttatccttcgaccggtctccagcttggaggccgttgtcgtttttgtcatgaccaaaattcgaaactcttgattacaggaaatacaatatcaaattccaagtttatacatatcaatctggctgcaaagatagtcaataacatcaaacgctcataaaaacatctgattaacccaatcagaatgttgctattgctataagaaaaatcaaacgcctcacgacaactatttacaagggatgcatatgacagagggaacgataaagaccagtaagtatgaaattattgctattttcagagaggagttgcgcaaacgtactgaaattgaaatattttttaacaacaccagtatcataacccaactgacgcgcgtggactttgccgagtttcatattcagacccatcgcaaaatcccgtccgggcataaaattcgctttctcctgcatagcgattcagggaaaatagagtttaatgcggccctgacaaaacatgacaatagcggtgtcgataaaggtatccgctacgctttttcattgcctgaatgcctgcaggtagtgcagcgtcgccgcgatccccgctttcgtttacgccatgagcatgacttttattgccgcggccgccataaaaacggcgaaaactatcttttcgatatcaaagacatttcagatggcggttgcgcattgatgaccaaaacgccgaatcttaaatttctcagccacaacgccttactgaaaaacgccgtacttatgcttgcagaatatggcgagatcaccatcgacctggtggtcaaaaatgtcattgttatcaccctggataacgctaatgaagagagtgagagctactatcagatatcctgccagtttaagttccgccatctcgatgaccagcgcagaatagagaagatactgctggacctgatcttagaagccaagcgcaaaaagagaatctgacaaccttggacagtatattgctgtacaccaatgacaatctcattggtcactcaatctatcactaccttattgatagccatgaaaatgccacccgtctgagttatgccgatgtcatccatgagaaacatctgccactggcccagacgattattttcaatttaattaataaggatatttctgccatcagaatcgtcgatctgctgaatgcgctccgcctttccctgctgcgctgccagcagccggtgctaatggtgaaaagcgacattgtcgggctgtgcagagagttgataaactttgacaacgctatgattattagcgagaaatctccgctaactcttttttcatctatcgtccagcgcgccaaaggcgtcagcgaactgccgccgcgaggattgcgcaaacagctttcaccacgggagtgtcagatcctcgaactgctcattgccaacaataataataagcgtattgccgccctgctcggcattgctcataaaacggttcatagccaccgcatccatatcatgcaaaaactgggtattgataattcccgcactatgaatcagcgtattgccgctctccatcaatgctaaatgttctcccggtaaatcagtagcggataaagcgtacttattcgctgttgatttacatttcccgccattcccattaatcatcaggtagcctataattaatgtatcctctgcctattgtctgactaacctcgtgaagagggataatgaacactaaaatattcgaagacaacattttatctcgtaatgatatcgctgtacgctacgtctttcagaaaatgttttccccacaaggtactctggtcgcggtggaatgcttaagccgctttgataatctttctatttcccccgaagattttttccgccatgctaccgccgccgttcgtgaacgtatttttctcgaacaactggcactgattgaaaagcataaagcctggtttttacgtaaccatatttccgcaacaattaacgttgatgaccatatcctgaacctgttgcgccagaaggatataaaagccaaagtcgccgccctgacctgcgtccatttcgaggtaaccgaaaacgccgagaatctgctgcataattctcttgccgcctggcagagcccacaggatacctcactgtggctcgacgacttcggctccggctacgcgggaattaacgctattcgcggttatcactttgactatgtgaaaattgataaggattttttctggcacctgatgcgcaaagagtccggccgccagctgatggatgcgctggtgacctttttatcgcgcaaccatcataatgtgattattgaaggtgtggaaagcgaagcccataaagaatggctgcagggaatggagtggtttgctatccagggacattactggcgggaagtcagtattgaacaactggtcgccgatgatattgccatgtaaaaaaagccgggaattcccggctttttaacgtcacttaattataaactaattcccacgttgcccagctggtaatcggcccgctggtggcgcttttcggcgttggcgaaacatagccaacgtaataggtgaacaggccgccgctgaccgcgctttcctgcaaacgcacctgattttgctgcgggtccgccgggacaattttattactcttatccagagtattattatcgttagtcgatagggccagataaatattctgcgctccatccggcaaggtattggccagatacccggcattttcgttaccgaccgccgtcagtaaaaaaccatcgacccagcgcacgctgacccgacgcacctcatcctgcgaggctgccccaccatcatggcgcagctggcagtttgacagtgccagggtaaacggctgcggtttcatacacgccccggccccgcgatcgtggccttccgcccggctgaccggcgccagccagacattaccgctgccggcatgctggccgccgtttagcgcgacgctacaggaaatatccgtcacccgcccggcaaaatcgacccgtccgcgatcgtaattggtctcaaaaccccacgccgagggggcggcgaggctgccgcaaaatagcagccacgcgatagtgtttttcggcaatcccttcattccccctcccgtattaatcgtacgtcaggttaaagatcatatgcgactccacctcgccggtgctggtcgtcgggccatactgataaaaacgcgcgtgcagcggtatggtgatgtagcgggtctcctgattattcaagcggccgacggtgtatttcttattaaactgcagcggggagccatccttcagcacctggatgccaatgcctttcgccatcccgctgccggctttttcattcagcaaggcgcccatggtggcggtagtgctggtggccagggtaccggagaacgaggtgctaatgttggcatatcccgtttcactcaggccgccgctgcactgcaggtcgatattaaaatccttcccgccggcggtggtgccgacccctttcaggtcggtgcgccggatggaacccacatcgacattcatatttttcccgctcagcactgaacaggagggcgagaccacggtgatggcgttggcgctcagataggtttcgaggatcgggttaccgccgctctcccagtcgtaggaggtgtacttacccgccgccagggtgccgctgccggtggttgccgcggttttgataatctccagcgtaaagcgcgacccttcgagggaatagttggtggtgttatatacccgggacgaaaagacgtcgggatagacgatatttaccgttgcgccgccgcggctgaaacgcatgccgattcccggcacgttggtggagtagattttatttccaaggtccgtggcccctggcgacacgatcttcgccgcaaagcggttggtgccggaagtacagcgatagcttgccccgccgggagcgctcatcgtccagtcgcgggtaaggatcaccgagcccaccggcagatccgggggcaccaccaccctgcccaccaccatgtccagcatcaccgttggcgatgagagacgcgtacaggaggcccaggacgaggtggttcccagcgccattaagacgataaaaagcgttagtaatttcctcagcgacatacgctatcctttgttgtttgctgtcccagatccaccgaacactgcccgccgctccacttcacaatcgcgcgtttggcgttcgcatcgctgataaacatcatgctgccctggccgacaacgccgatctccttgccgtcgggggagaaaatacttgccgcaaacggcaacggctcgtggttcgcctggcgggcctgcagggtgaggttgttctgcaccttagtgccgaacgcgaccttaaccacgctgccttcccacggcacaacctgcgccacggtgcgatcgaaggccacgtcgtcatggctgcctttcgggtcgatttccacggcgttaatccggtacgggcgcagatacggcaggatggcgtaaccattgctgtccacacgggtgcccggcgatcccggaagcatcgccccggccgcgtctttggcttcaatcagggccatcgtcgagccgctttccggtgagagcaccacgccgccgctgtgggcgatcatcgtcccgctggcgccaatgccgctctgacgatagccttcgccctggctgtagctgccgttgagggtggtccatggcgtacggtagctgccgttgagcgccacatcatgctgaccgccggtggcggtggtggtcgacacgccgtagttaaggttgttttcactgtccagcgaaccgttgataccaatctgcgagctggcaaagcgcgagttattgaacgaggtgttcgacgtcaggttggcggtgcggttatcgccaaaccacagcgggtagctgaagttgagtgaaatacgatcgtcgcgacgatgaccggagctgtctggcgtatagacgcgctgcgcgctcgccgaccaggagagacgaccaaatgaattgttgtagctgacctgatactgcttctcggtcccggagcggttccagtaatcggagatacggccgctgagataaaacccgccccagccgtccggcaggttctggttcaccgtgaaggtcatgccgtttttttgccgccacagggtgtagttgctgcgactatttttttcctgatcgacggcgtacagcgcgtcgttgaggttgtaataacctttcgtcgagtagcgatacgccgccaacacgatgctggtctgggtatcggtaaacatgcggttaaaggtcgcgcgatagctctgacccgagtcatcatgggcatcgctcttcgaccgcgaatgggtgacgtcaaaagagagcgcgccgatgccggtgttcatccctgtccccaccaggaaggcctgatagtcgtcaaaaccggtgaccccggtgtagccggtcaacagattgttgatcccgtgctgccaggtcgcctgatagagcatcggcttgttgcgcagcgcgctgtcgtccactttaccggcggagagcgcgtagcgggtcattcccggacgcagcagctgggcgacggaagcgtaaggcacgctaaacacttctaccgagccatccgcttctttcaccgagacctcaagatcgctgccatagccggaaggatagacatcctgcagggtaaatggtccgggcggaacggtggtctgatagataatattgctgccctggcgcacggtgacgagggcgttgctctgcgccacgccgcgaatttccggagcatacgagcgcatgccgtccgggaacatattgtcatcggtggaaagattaaccccgcgcagaccgatggtgtcgaaaaattcaccattggtgaaaatctgcccgccgctgacgatggagttgagctgtgggatagggcgctggagataggtctggttgctgttccagtgcgctttaccctgctgctgctgccagttcaggttgccgatgtgcttcagcagccagccgtcccacgacagaccggcgttgacgcccagataggcgctgctgttatccgacccgcctaccgaagaggtatggctgttccaggcgttcgccatccagccaagattgagcgcggtaatacctttgtcccagaactccgggctgacatagtttttcaggcgttgatcttcatagatctgcggtaccgaaatgttcaaccgcagggaggactggaccaggttgtctttgacgttttcttcgttgcgccaggatttgaggctaccgcagtagccctcctgctcgctcagctgcggattgagcttttccgccgcgatgccatattgggccagcatcgctttggtgtagcagacgcccagccgaccatctttatcgcgcgcgatgcgtaaatcgtagcgccctttccactcgtcgttggtgtagacgtcaagggagtaagtgccttcggtaatcgcgctggtcgaaaagcgcgacagatcgaccttttcgcgactgccgacaataaagccgtcgttaaactgatataccgttcccgggttttcctgtccgctggaaaatggcggaaagcagcacagcgcgatggcgatcgcggtgcttaatcttcccgggcagaatgacctctgcttcattagcttttcccttatttaacggccactttcactgcgacatcggcgccatagtcattaatgttgttaacggtcagggtttcgccgcggttgacggcggaggagagcgccaccgtctggctggactgcggcgccagcatcacggttttgctgttcagggctttaccgccgtcgcgggaaatacggctgacggtaatgtagaacggcgtcgggttgttgatggcgagactactgccgctggcggtcagggtcagcttctcggccgccgcatcgcggttgcccagtccggcaggacgataaataaatttaaagcgcgaacggatcgccagctgcagcacgttctggccttcatttttctgattggccaccactggcggaatttccagcagattcagccaccacagcgtctctttatctttcgccagaccggcgctgctaccgagcttaatacgcagcgtctggccgctcttggcgtcaacgcgcgaaatcggcggggtgataataaacggggtggtaatggtatccggtgtggcatcggcatcgccgttatccagccaggcctgcgccagcgccggacggtcggcgttatttgaaagctgtaccgttatttctttttcatttcctggataaataaagcgggtaccgttaacaataatattgttggcatgggccgcaaaactaaaaatgaaacagaaaaaaagggcaatacgcttcatgctgacctcagaataaaaatacaagcggcggacattgccgctttattattgttattaactgccccatcgcggggcagttttattttctgacggaattactggtaagtaatttcgtaagtcgcgtagctgttaaccacaccggtggttaccgtggtcggcgcgctggtggcgtagcctacgtagtaggtgaaacgcgcgccatcagctacagcggaagcgtcgcctttcgctttcggctgagtgctgtcacccgggatgattttgttggtcagcgcggtagcgttgtcagtagacagcaccagctggatgttctgagcaccggaagcttcggtgttcgccaggtagccctgttgtttgctggttgcgccagccagcaggttaccgccggtccagttcacgcccagtttgcttacgtcatcctgtttagtgccatcagcagcctggcagttagagacgtcaatggtgaaagatttcggtttcaggtaagtatccgctgctgccgctttaacttcagtcagggttaccggagacaggtaaacgttcgcatcgctgccctggccgttaacggaaacagtacaggatacatcggtaactttaccgaagaaattaacctggccgccgccaacattggtatcagctgcatgggcagcagtcatgccaaaaaacgcggttgccattgctgcagagagaagaacctttttcattgccatttccttgtcagagtgaattacgaatcaatgagcacactgtgaattcgcatagaaccagaaacatcaggcgatgctgatttatgccactgctaatagaatcttcgactgaccgggagccgcaatatttaaggcgtcaggtaacgaacctaaaaatataagttcgctggtgctatcggcgtcaaagaatgctatttattcgccgacaaatatacatttgttcacgtttcattaagttatataacagataaccatcggctattaataaacagtcattgatagatgaaaacgcgagggtggttgtttacagcgcagcaagcctaacgccagagcgagagacagtgaccgcaacagcatgcagaaaaagccctcggaaggccatcgcgataagtctgaatctgcctttgcggtggtgaaaacagcaccaaacaattcacacaacgaatgatgaaagcatgaatgaggcgcattcctctccctgaacaagggcagcccatgtgatcccccctttcagaagtaaatcattaattcattgtttttaaattaaaaaatagataaacgatcatgtttacgccatcaaaccgccataaaaatgtgatctaaatcgcactttttgccacgcgcgttatagttagcagacttattataagtccatcgaaagcaaacatgctttccaccataaaagttaaaaggacaaacaccatgaaaaacgtaaaattactcgccgctgccggtatgctctccctggtctctttcgctagcttcgctcatccggtgagcgtgacagcagacaccctggacagcgcagaagcgaaaatcgcaaccattgcgaaagaacaaggcgcttcctaccacatcaccgaagcctataccggcaaccaggtccatatgaccgccgagctgtctaaataagcgaatggttgcagagggagctgccggacaggccgcctgcgggtggctggtctggctcccgccgctcaccccgcacgcagcaatgtcgagccccgttacggggcttttttcgtttttgctcccgccgcctgacgcgccagcgcgcgctggatagacatcacgctcgccagcaccacgatcaatcccatcagcgccatcccctggatcttttgtccgaggaatatccatcccagtaccacggcggtcaccgggctcagcagactcatcgccgacacggccaccggtgagaggcggccaatcccccgaaaccacaggccataggccagcatggcgcccgccaggcacagccacagatagccggccgcctgcagcactgttacctgatgcaaaggagggtcaacgatcagcgccaccggggtcagcaccaccccaccgatcgtcagctgccagccggtcagcgcgacgatcggcagggagagcgcccagcgccgggagagccaggtgcccagcgccatactgatcgccccgagaaacgccgcgccgatgcccagcgggtcgaggacggtgtgcggcgacagcagcagcatggccataccgagtatgccggcgatggcggagaacaccgccagccagggcgagcgctgccggtcgacgcaccaggcgaggagcatcaccagcagcggctggatcgcgccgatcaccgccgccagcccgccgggtaagcgataggcggcgataaacaacagcgcctgaaacgcgccgatatttaagatgccggtaacgatcagctttgcccattcgccgcgctgcggaaaacgacggctccagatcagcagggcgatacctgccggcagcaccctcagcagcgcagcaataaatgggcggtcaggaggaagaagctgggaggtgacgatgtaggtcgtcccccagatagcgggcgccagcgcggtgagcagcaggtcgagaatcagattacgtgagagaaaagccatgattttatcttcacttcaaggtaaattagtgagtgaagtatgtaccgccaagtatcttgatatcaagacaagtgagcactaatggacaaatcaccgccgatcgacgccgtggatcgcatcctcgcccagtggcagcgggagcggccagacctcgactgcagccccatggggccgataggtcgcctgaaacgatgcgctatgctgctggagccgcaggtggaagtggcctttacgcgccacgatctggtgcgctgggagtttgacatgctggcgacgctgcggcgcgccggggcgcctttcgtactttcgcccacccagctcttctccacgctgatgattacctccggcaccatgacccatcgtctgaaggcgctggagaaacgcgggtttattacccgcctgcccaatccggaggatgcccgcagtatgctggtcgccctgacccctgccggacgcgaacggatcgatgccgcagtggaaacccacgtcgacaacgaacggcaactgctggcaggactcagtgacggtgaacgccagcagttggatcaggcgctgcgggtgttgatgcgactgctggaaacgggctaacagccagcggcgataaagtcgccgttggcgctgatcggcaccacgctgaaaaacaatcccacggcaaagaggatcagcgccagaccgccgaggatcttcatcagcggaaccagccagggccgcgggcggtgattcgtggccaatcgtttgaccgtccgatggcgcgcatagtgaaccagtagcgacagaccgaggatcgagagcgcggtgcccagcgccatgctcatcaccgcggcgatgccccagctaacaatccccaacgcgttggcgaataataaaatcatgatcgccccgctacagggccgaacgccgatagccagcaccacgccaaggcgcgtcttccagtcagcgccctgcagatcctgccccacgccgtgatggccgcagccgcacgaggcgtcatgctgatgcgctggcgtcagacggcgaatcacctgttttgccggccacaggctttgcagagcgcgaaagataacataagccccaaagacgccgatggtcagggcgctgatcttctcgacgtaccagcggctggcgctaagatcgccggcggccagattcagccccaccgcaagaataaagacgaagagtatcgcagtgacgccctgcaacaggctgccgagaaagggcaccacccgcgccgccgtcaggctctcctgattggtgctcaggtaggtcgtcacgataaatttaccgtgtcccggtccgacggcgtgcagcacgccatagagaaaggcccccaccagcagccagataccgccgctgtactgatggttattcagcaacagaaggtacatcaccagatagcgatgcagggtaatttgggtggcgagacaccactggagaaagtcaccccagtggctgtgcaaggtgatagcggcggccagcagtagaaggccgccgcacccggccgccagcaggcgccagtcgcggagcgcaatcggagtcgtcatcgttataccattgtagtaaacgtaaaccgcctgacagcaactttacgacaggcgagcgaaggtgtcagcgcttaagggtgaggaatttgtcgaagctgttcacgggattgtacgtagtcaccaggctccgcattatctaccgatcgctatcttcccgacaccgtattagcgcagaatgcctcaatatcttgagcataccacagctatatctttttatgcgttattggttaccaataccttttaacaggaataattactcaaaaaatcacagataaaaataaataagttatttcttggcgagcattttttgtcagttattatgctgcgcttccggcaagaatattctttaactgctatttattgtactcttcagcaggatcacttccatgaaaagaggcttacttaccctggttactgctgccatcgctttccgtacaggccacctggcgcagcgacaagcgccaggaggcacgtgacgaaaagtggtgaaccggcaggcttcggcgtatcctggatgtgagtccttcccgcgccgaagcgagcattccaacccgccgccagaccgtgtcgcaatacttacctgtcctctatacctcccattgatatcttcctgtatacgttgaccgtgacgagttttcatctcattcaaccgcatgtaccagattaagcttacccgttgaaatacggcgtaatgtgctctattacagacaatgctattatcaccaggctttttgcagtatggtttaatcactgttgtagttttgcagtgaatgctatccagacgacttaaggttgtattttgtctgagaaatttctcatgccattcccgaaggttgtcggcgagggaggctggtttactggggtgacattgcccagtaaacaggcaatcaatcatgacggcattgatagccgccttgccgtggccggaagcccaagccttcatcatcatgcgggtatcatcaagaggatcagggatgtacaggacgtggaaacccccaggaaagattcatcagttcagccagctcaccctttctttacccttcagatcgcggcctcttatcgttagcaatggagctagcccatgataccgctcgcgctcgtagcaaattaaaacgttatcaccacgctgtttcaaaataaaaaggcagtcaaatttaacaatgacctgacgcaggctcggaaaaccaaaaatatgcctgcaataaaagggaaaaccatgacgaataacgccgacataaaaaaaaggaacttcctgactcagaatgaaattgagtctttacttaaagcggccgataccggtccttatgctgcacgtaattattgcctgacgttactgtgcttcatccatggtctgcgcgccagcgagatctgtcgtctacgaatatcggatatcgaccttgctgcccgatgtgtttacatccatcggcttaaaaaagggttttcgactacccacccgttgctggataaagagatctacgccctaaagcgctggctggccattcgcagcagctggccgcaggccgccagcgaatggctgtttctctcccgcaaaggtaatcccctttcccgccaacagttttatcagattatcgcgtcctcagggggactggcggggctgccactggagatccacccgcacatgctgcggcactcctgtggctttgcgttggcgaatatggggatcgatacccgcttgattcaggattatctcgggcatcgcaatatccgccacaccgtctggtataccgccagcaatgcgggacgcttctatggcatctgggacaatccccgtgacaaacagcgatcgtcgctgatccaatagccttgacgccatggatggcgttgtatcgcgagcggtcgacaaattaaaatattcatgattattaaccctgcgttaattaggattactgttcccacaagttcttatttaatccttatgactgagagttaatataaccctgcgtttactcaggaataagactgggtatttattggtgggaaaaaatttccgcggctgtgtttttaataacggctggtagtgaaaaatatcctttcattttatatacctggcggcaacccgcacagatactattgagccgatgattaaaatctttaaaattaagaattatcacccgacgatatttttagtgtctggcaatgtaatatgttatcaattcatgattaatcatcttcaccctgtaccgttttagcattacagaacctatttcgtcatggcgtatggtttcgctgtgacggtcattcatacctattttcaggagcaactattgtgaaccgacgtcgttttctaaccgccaaagaagttcaggccatgatgcaggctgctcgtcagggccctaccggcgaacgggactactgcctcattctgctggcctttcgccatggcatgcgcattagcgaactgctggatctgcattatcacgatctggatctccatgaagggcgggttaatgtgcggcgattaaagaatggtttttcgacgattcatccactgcgttttgatgagcgcgaggcgattgagcgctggagcctggtccgtgccggctggaaagcggcggacaaaacggacgcactgtttatctcccgccgcggcaccgcgctctcccgccagcaggcgtatcgtattattcgctccgccggggaaaatgcgggtaccgtcacgcacactcacccccatatgctgcgtcacgcctgcggctatgaactggctgaaagagggacagatacgcgtttgatacaggattatctaggacatcgcaatattcgtcatacagtacgttacaccgccagtaatgcggcacgtttcgctggcatctgggaaagaaataatcttttagaggaaaaagaccagaagacgaaaaatgaaataactgattgattttaaataattaaaaaaataacgaacaggtcaattggggccaaactgtttatatcataaaaatgttttgacatattttgcaactcactgcgccatatttccgcaaaaaaaatcatatctaattgattattatctatttttaaacctgcaattactcaattttctctaaccatatctctgctgcaccggcgatccgtcgccaacgccatcgcttttcctttcgcaccccctcccaccacaccagattatattaccataaaaaccaaatttggcagaatttaaaaccacagaatacccaattgacacaaaatacagatcatttatcccaacgagtcaaaatggccccaattgtctcatcggttgggcgaaaactgtgcagagccggcagccggaccactcggctgaaatctgaaatgcctggaaggcacaacggctgccaatccggttcgttatttcgacatcgttcaaaggaaaacagtatgaaaatcaaaacactggcaatgattgttgtgtcagccctgtcactgagctccacggcagctctggccgataccaccacggtcaacggcgggaccgtgcattttaaaggagaagtcgttaatgcggcctgtgcggtggatgccggctctatcgatcaaaccgttcagttaggccaggtgcgttccgcgaaactggccacggcggggagcaccagttcggccgtcggtttcaacatccagctggatgattgcgacactacggtagccaccaaagcgtccgtcgccttcgccggtacggccatcgacagcagcaataccaccgttctggccctgcaaaactctgccgccggcagcgcaaccaacgtcggcgtgcagatcctcgacaataccggtacgccactggcactggacggcgccaccttcagtgctgcgaccacgctgaatgacggccccaacatcatcccgttccaggcacgttactacgcgaccggcgcagcgacggctggtatagcgaacgcggatgccacgttcaaagtgcagtacgagtaagacccgagtcaggcagggaagctattcgggccaggagggcccgctctctattttcaaccggagtgaaacgatgcagggaatgaaatctggtctgctgctgctactgcctccgctggcgctggccggtaatcattggaacgtcacgctgccggggggcagcatgcgttttcagggcctgattatggcgagctcctgccgcgtcgaagccggcgatcggcagatgacggtcaatctggggcagatcagcagtaatcgatttcatgctgtcggcgaagacagcaacccaatccctttcgcgattcatttacaggattgcagtacggcggtcagccagcatgtgggggtgacctttcacggcgtggctgatggaaaaaaccccgacgtgctgtcggtgggtgaaggtccggggatcgccagtgggatcggtattgcgctattcgacagccagggccagcagctcccgctcaatcgtccaacggatcgctggatatcactctaccgcggaccgacgacgctaaatttcgtcgccaaatatcgggcgaccggacgccaggtcaccggcggtgcagccaatgcccaggcctggttctcattgacctatcagtaattaatccgcagacaaacaggacaacacggtgagcagacaaggagataatgtgagaaaaacggcaacgatggcgcatggcttactggcaggatgtgtgcttttcgccgccagtatctttagcgccagcgcgcaggcgggcgttgcgcttggcgcgacccgggttatctacccggcgggacagaagcaggtccagctcgcggtgaccaataatgatgacaacagtacctggcttattcagtcatgggtggaaaatgcagatggtcagcgagacggccggtttgtcatcactcctccgctgtttgccatgcagggtaaaaaagagaacaccctgcgcattatcgacgccaccaataaccagctgccgcaggatcgggaaagtctgttctggatgaacgtgaaggcgatcccttcgatggataaatcaaagctcagcgacaataccctgcagctggcgattatcagccgcatcaagctctactaccgtccgggaaaactggccctgcctccggatcaagcggcggaaaagctgacctttagccgtagcggatcgtcgctgacgctgacgaaccccaccccctattacctgacggtgaccgaactgaacgccgggacacgcattctggagaacgccctcgtaccgccgatgggcaaaaccagcgtcaagctacccgcggatgccgggaacaccatcacctatcgcacgattaatgattacggcgcgctgacgccgaaaatgaatggcgtgctgcgctaacccagaagcgccccgccgcgcgggacacgctgcgcatgaccagaagcaatgacagccgggcaacgtcggaccggagggataatgtcacatcggaaatatggactggatcatttaggttgccgaactgcccggcgcctggtatctccggcgctggcgctgtggctctgctcacagccgtttgccgcgcgggcggacctctattttaacccccgctttttagctgacgatccggcggcggtggctgacctgtcgggatttgaaaaaggccaggaggttccgccaggcacctatcgcgtcgatatttatctcaacaatggttttatgaccacccgggacgtcaccttccaggccgatgcccagggtcacggtctgtccccctgcctgacacgcggccagctggcgagcatgggtgtggataccggtcgggtgccgggcatggcgacgctggacagcacggcctgcgtgccgctgaccacgcttatcagcgaagctaccacgcgcttcgacgtcggacagcagcgcctgtacctcaccgtcccccaggcatttatgggtaaccatgcgcgcggctatattccgccggagctgtgggataacggtatcaccgccgggctgataaactataacttcacgggcaataacgcccataacaccacaggtggcagcagccgttacgcctatctgaatctacagagcggcctgaacattggcgcctggcgtctgcgcgataacagcacctggagctacagcagcggcggtagcacctcatccaacgagaatcgctggcagcacgttaacagctggcttgagcgggacatcacgcctctgcgttcgcgactcaccctaggggacagctacaccaacggcgatgtcttcgacgggatcaacttccgcggcgcccagctggcctccgacgacaatatgctaccggacagccagaaaggctttgcgccggtgatccacgggatcgcccgcggcacggcgcaggtgtcaatcaggcaaaacggctacgaaatctaccagagcacagtgccgccgggaccatttaccatcgacgatctctacgccgcgggcaatggcggcgatctgcaggtcacgatcaaagaagcggatggctcccgccaggtcttcagcgtgccctggtcaacggtgccggttctccagcgtgaaggccatacccgcttcgccctcaccgccggggagtaccgcagcggcaacagtcagcaggaaacgcccgattttttccagggcacggccatgcatggcctgccggcaggctggacgctctacggcggcacccagctggcagaccgctatcgcgcctttaaccttggggtggggaaaaacatgggctatttcggcgccctgtcgctggatatcactcaggccaacgccaccctggctgacgacagcgaacatcaggggcagtcggtgcgttttctctataacaaatccctggatgagaccggcaccaacctgcagctggtgggctaccgctactctacccgcggctattataactttgccgataccacttaccgccggatgagcggctacagtgtggaaacccaggacggcgttatccaggtaaaaccgaaatttaccgactactacaatctggcttacagcaagcgcggcaaggtgcagctgagcgtgactcagcagttggggcgcaccgccaccctctatctcagcggtagccaccagacctactggggcaccgacgatgccgatgagcagctgcaggccggcctcaacgccgccgtggacgatatcaactggtcgctaagctacagcctgacaaaaaacgcctggcagcaggggcgcgatcaaatgctggcgatcaatatcaatatccccttcagccactggctgcgttccgacagccgctcggtctggcggcacgccagcgccagctacagcctgtcgcacgatctcaatggccgcatgaccaatctggcgggcctgtacggcaccctgctggaagacaacaacctcagctatagcgtgcagaccggctatgccggcggcggcaacggcgacaacgggagcacaggctacaccgccctcaactaccgcggcggctacggcaacgccaacgtcggctacagccgcagcgatggctttaaacagctctattacggggtcagcggcggcgtgctggcgcacgccaacggcatcaccctgagccaaccgttaaacgataccgtggtgctggtgaaagcccccggcgccggcggcgtgaaagtggaaaaccagaccggggtacgcaccgactggcgcgggtatgccgtcctgccttatgccactgagtatcgtgaaaaccggatcgcgctggataccaacaccctggcggacaatgtcgaccttgacgatgcggtggtcagcgtggtgcccacccatggggcgattgtccgcgccaactttaacgcccaggtggggatgaagatcctgatgacgctgacccatcgcggcaaaccggtgccgtttggcgccctcgccaccggcgacagcaaccagagcggcagcatcgtcgcggacaacggccaggtctacctgagcgggatgccgctggcgggcaaagtgcgggtgaaatggggcgatggcccggacgctcagtgcgtggccgattaccgtctgccgccggagagccagcagcagccgctcagtcagctttcggtcgcgtgccgctaaggagattatgatgagaacactgcagtatctgctgggcgccctgttcaccctgggcgcaccggctgcgcttgccgccgatagcacgatcgccatcagcggctatgtccgcgataacgcctgcgcggtagccggcgaatcgaaggattttactgtcgatttacaggataacgccgcgaagcagttttatgccgttggggcgacgacgccgccggtgccgttccgcatcgtgctgtcgccctgcggcacttccgtcaccgcggtgaaggtcggtttcaccggcgtggcggacagcatcaacaccagcctgttaaaactcgatgccgggaccccggcggcggcaggaatgggggtggaaattctcgatcagcagcagtcccggctgccggtcaatgcgccgtcatctaccatgacctggaccacgctgaccccgggccagaccaatattctcaacttttacgcccggctgatggccactcaggtgcccgtcaccgccgggcatgtcaatgcgacagcaacattcaccctggaatttcagtaagcggaggctgaaatgaaatggactcatgtgggctggctgctggccggcctgttaaccgcgagcgcttccctgcgggcggccgacgtcactctcaccgtcaacggcaaggtggtggccagaccctgcacggtttccaccgtcaatgccaccgtcgagctgggcgatctctatacctttagcctgatcggtgcgggctcggcatcggcctggcacagcgtggcgctggatctgagcaactgccccgtgggtacttcacgggtgaaagccaccttcagcggaacggcggacagcaccggctattacaaaaaccagggaacggcgggcaatattcagctcgaactgcagaacgaggacggcaccacgctgaacaatggcagcagccagtcggtacaggtggatgaggccagccagtccgctcgcttcccgctgcaggtcagggcgctgtccgtcaacggcggcgccacgcaaggcaccattcaggcggtgattaacgtcacctatacctacgcctgagccaggagagcatcatgatgaaaaaaataatccccctgttcaccaccctgctgctgctgggctggtcgatgaacgcctggtcttttgcctgcaaaacggccaccggggcgacgattcccatcggcggcgggtcagccaacgtctacgttaacctgaccccggcggtgaacgtcgggcaaaacctggtggtcgacctctccacgcagattttttgccataacgactatccggaaacgatcaccgactacgtgaccctgcagcgcggatccgcctatggcggtgtgctgtcgagtttttcaggcaccgtgaaatataacggcacctcttacccgttcccgaccaccacggaaaccgcgcgggtgatttatgattcacggaccgataaaccctggccggccgtcctgtatctgacgccggtgagcactgccggtggagtggccatcaccgcaggatcgttaatcgcggtgctgatcctgcatcagaccaacaactacaatagcgactccttccagttcatctggaacatttacgccaacaacgacgtggtggtccccaccggcggctgcgacgtctccgcccgcgatgtcaccgtcaccctccccgactacccgggatcgatggccgtgccgctcaccgtcccctgcgcgcaaagccagcagctggggtattacctctccggcaccaccgcggacagcgccaacgcgatcttcaccaatcccgcctccgcctcgccggcgcaggggataggcgttcagctgacgcgcaacggcagcgccgtcccggcgaacagcacggtctcgctgggcaccgtcggcacctcgccggtcaacctcggcctgacggccacctatgcccggaccacaggccaggttaccgccggcaacgtgcagtcgatcatcggcatcacctttgtctatcaatgatgaccgattatatcctctcgccctgctcgctggccgcccgcgggttgagccagctgatgctgaacgccgcgaagcggcccgttgagctgccggtcgagggcgtgtccctgcgcgagctggccgccgtgaagcggatcgtggtgtatctccctgacgatcccctgtggatgctcaccacgctgcgccaggcggcaaggctactcgacgaggccttgccgccgttaccgatgttgattctgagccgcagcccggccatctggctgtggcaaacgctgctctatcaggggagtcatccggatcgtctgcgcaacgtccatactgcccccgccgatctgtcctgcgcggagctggcccatcggctggagaatgcgccgcggcttgagcggcttgccagcgaagccgccctgatccacggaaaacgggtcgtcgggttgacccacgccgagctcaaggtgatcctcgccctgctgcaagggcagacgataggcgagcaggcccaacgtctcggattgagccagaaaacgctctacacccaacggctggctggggtgaaaaagctggtggaatgtcatccgcatctggccccccgctttccgcgcacgctgctgccgcgctcacccgcaaacgcactgacggcgtttgaacaggaatgggtacaagcgattcacgatcgccaggtcttcccggtttttcaacctatcgtcgatagtcgctcacagctacagggggtggagatcctgatccgctggcgccaccgcggccaggtacttcacccccagacctttctgccgcacttccgcgccgactacacctggctgctgcttacggcctttgttctgcaggaggccgtgcagaatattaatgagtatccaggcgccttctatttttcggtcaacataccctcctcactcgccgacagtgacagcctgctgcggatggtggaagccgctcgccagcagcttcggcagccagagggcgtggcaaggctggtgctggaatatgctgaaactatcgattttcgccatcagagccgctccgccgcccacgtggcgcagctgcaacgtgctggcgtgcgcgtgatgctggacgactgcttttctcaggggagcgttatctttccggcgcgtcgactgcacttcaatgcgtataaactggatatgagcatcgtcaatgacgcccagcacgatccaaaggcgcttgcgctaataaaaagcctggcctactactgccagttgagcggcagccgctgtgtggcggaaggggtggattcactggcgaaatttacgcagttaaaatcgctggggattgatcgcttccagggctatctgttttcaccaccgatgcggcgcgaacatctcccggatctgatccgccgcttttcccaccagcgcgatccggcgaaacgttgagggtgcgagaaaagcgcaccggttagcaccggtgccggtacgtcatgcgcgaatatcgtcgtattcgcgggtgttatcgaattcatgtttggcaaacgggcagagagggataatcttccgttgctcctggcgcattttttccactaccttcgccaccagctgtttccccacgccctggcctttcaggctgggatcaacatcggtatgttcgataatgctgaggtgttcgccggtgggaacaaaaacaatctccgccacctggtttccctgcgcgtcgttaacataaaatttgttatgcccttccagtatttccatcttctcctcgcttatttatgacgatattgcagagcgccgctcgggcaggtatcaatcacgtttaccaccgtcgcgacatccacttcatccgggataatccacggcttacgcttcaggttgaagagcttcgcgctgccgcgcacgcagttcccggaatgctgacagatcgccgtattaaagtagacgtcgattttctccccggtgtaggcccggtagccggcttccagtaattccttatccatgacattgcctcggtcgtttttatctttcaggctaagcatagccctcgccgtggcggctgactatgcgcaagcgcgggaattgacgcctcacatcatgctctcccatcgcgcaaggatcccgcagtcaacgatcggttgactttcattcccgcaacgaggcgattacactcatgacacactggtatgatcactcagggatgttccattgaatcatattgccaccatcgcccgcccggcgcggttactgctcgtcttgccgctttccggctgctcactttcgccagagatcccggtattgggcgctgcttttcccggctggtttttctgcttactgggcggtgcgtttttactgatcccctgccatatcctgattacccgtaaaggctggcagccgcgcttttctcccctggtcttcagctacgtcgcgctgatgttcctgttcgccacgttgctgtggtttctgttttttgttcactgatcgcttatgacaacttcccgcactcccctgttacgcaaaaagtggcctctgctggcgctggtccttgccgccatcctggcgctgatcctcgttatctggcagttgcaaacctcgccggagaccaatgacgcctatgtctatgccgataccatcgatgtagtgcccgaggtcagcggacgcatcgtggagatgcccattcgcgataaccagcgggtgagaaaaggcgatctgttgttccgcatcgacccccgcccctatcaggcaatgctcgatgacgcgaaagcccggctgacgaccctcgacgcgcagatcatgctgacccagcgcaccatcaaagcgcaagagtataacgcccagtcggtggcggccgccgtcgagcgcgccagagcgctggttaagcagaccacctccacgcgtatccgccttgagccgctggtgccgcaggggttcgcttcccaggaagatctcgatcaggcgcgcaccgctgagaaagcggcgcgggcagagctggaggccacgctgctgcaggccaaacaggcctcggcggccgtgaccggcgtggatgccatggtggcgcaacgcgccggggtcctggcgcaaatcgccctcgctgaactgcatctggaatttaccgaagtacgcgcgccgttcaacggcgtggtggtggcgctgaaaaccaccgtcggccagtacgcctcggcgctgaagccggtcttcaccctgctggatgacgaccgctggtatgtgatcgcgaacttccgcgaaaccgacctgaacaacgtgcgccccggcgtggcggcgcggatcaccgtgatgaccaaccacaaccggacctttaacggggtggtggattcggtcggctccggagtcctgcccgaaggtgggagcgtcatcgaagggctgccgctgatccagaaaagcattaactgggtccacgtctcgcagcgctccccggtgaaaatcgccgtcagcgatcccgacccggaactgttccgcatgggcgcctcggccagcgccgtgctgcagccgtagccgggcgacgctatgtttcctctcgcccattttttacgccaggaactgcgcgacgcgccgggacgcgccagctacacgctgcgcctgacgctaagctgcgcggtgctcatcaccctgtttatgaccctgcagatccctttcctggccgttgcgctgatcgtcgtgttctacgtcagccagcctaacgtgttgatgattaagctggtcagcgtggtcttttttgtcaccgtcaccgtggcgctcggcggcgtgctgctgatcatcaagtggacctatgactacccgctgatccgcctggcagcctccgtggcgctctttttctgcgccctctatctgatgcgggtgctgggcaagctgggactggcctttttcgtggtggcgctggcggtgatttacgctcagaccttcccgtcgatgaccagccagagcgagatcctggtgcggctgctgctttggctgtgggtggcgattaacaccgcgatcctcgtcaccctgctggttaacgcctgctttcagcaggcctttcccggtaaccagtttaaggcgcgtctggccgggatgctgcacgaggtcgcccggcggctggcggccccggacgctgaagcgccaccgaccttcggcgagaccgccgcgcagttcaatcagctgcagtcgctattcacccaggccagccgggcgacaccggagatcgccgccgatccccaggcctggcgctcgcggctggccgccactttgcgctgctaccagctggcggccctgctgcaagcagacgaggcggatagtgacgatcgccagcagctgtcgcaggcggtacttcagctgaagaacgcccttagcgaggggccgtttgacggcgctattcctcccctgacgctcagcggtcgcggcgtcaatcgcgctgttctgcaggagatggctaccactctgcagcggctggcgcagggtgagccggttgccctgccgcagggtgaggtggagaaggcgcccctactggcgccggacgcctggcgcaacccggcatatctccattttgcgctcaagaccctgctggcgaccctaatctgctatgtcttctataccgctgccgactggcagggtctacataccattatgctgagctgcgtgatcgtcgcccagcccgggctgggcgccacgatgcaaaagacatggctgcgcatcggcggggcgctgctcgcctccctgctggcgctgctgttaatcgtctttgtccagccctggaccgattcgctgacgggcctgctggcgatgtccctgccggtgctggcgctggcggcgtggattgccgccggctcggagcgtatcgcctacgccgggatccagattggtttcacctttgcgctggcctttctcagctggtttgctccgctgacgaacctcaccgagctgcgggatcgggtgctgggcatcctgctcggggtgctggtctcctccattgttcatttgtatctctggccggacagcgaagcgccgcagctgaaaacccgccttgcggcactttatcgccggctggcggactgcctcgccgccccgaaggaggcggttccgctggctcccctgcttgtcgccttcaccgacagcgaagcgctgctccaccgggttcgcgccgaaccgctgggcacgtatgctcacccctggccccaggcgaaaggctggccgatgcgcgccaccctcgcccaggccgaggagatcgcccgcctcagcgaaggctaccgactcaacgccgcgccgggagacccgaccctggcccgctgcgccgaacagctgcggcgctacgctgaacgtatcgaacaggaggcgacggcgcctggcgaacagctgaccgccgacctgactaacccctttggcccggcgctggccgccgcgctggccgccctgcccgactgggggccgacaccgatagcgactgagcaacaggctaaaacgtcatgatgatccttcctttctccgcgcgcctgcgcggcactctttttaccctgacgctgacgttgctcagcggctgcgcgctgatccaggatgagcctgcccaggtcgccatcgtcaatccgcagcaggcccagctggcgcaggtgatccacctggcgaacagcgactggccggccgcccgctggtgggaggcctatgatgatcctcagctcaatatgctgatcaaccgggcgctgcagaactcgccgaccatgcaggccgcccggctgcgcatctcccagtcgcagtccacggtggaactcgcccggtcggcgatgggcctgcaggccaccgccgtcgcggcgcaaaaccgcctgcggatcaccgacaaatcctttagctggccctactcatactccctgccggtggataaaaacggcccctggtatacgctgaataccgttggcgtcggggcgcagctgaatatcgatctctggggggccgatcgcgcccgggtcgccgccgctattggcgagaaaaacgcccggctggcggagaccgccggcattgagctcgacatcgccagcagcgtggcgcagctctatttcgccatgcaggcgacgttccagaaaatcgcgctgctgcaggagctggagggcattgcccgattctcggtggaagcccacgagcaccggacccggcgcggcctggaagacagtgtggatgtggccaacgcccaggccgaacagctcgccgctcgccagcagatcattagcgccgaggggatgctgacccagtatcgtgaaaccctgcgggcgcttatcggcgccgatgcgcagagcatgccggccatccatccggtggcgctgccggcgctccaggagacgctgccgccgtcgctctctttcgagctgctggcccgccgtccggacctgcaggcgctgcgcggctacgtcaccgcctccctgagccaggtcgatgcggcgaaagcggccttctatccccattttgatatcaaagcgttctggggctataacgccctgagcgtcggggatctgtttaagtcctctttccagcagatcaacctgctgcccgggctgtatctgccgatcttcgacggcggtcgtctgaacgctaatctgcagtcggtacgcaccgccagcaacatcctgatcaaacagtacaaccaggcggtgctggatgcggttcgcgatgtcgctatcagctccagccagcttaacgacctgaatcagcagcgcgcgctgcagcagctaaaagtcaccgcggcgcagaccaccaccgatagcgctcgcgctcattatcagcgcggcctcctcagccgctacgccgccgaagaagcccgccgggcggtcctcgcccagcagctgttgctgctggacattgagacccagcggctaagcaccgacattaccctgatcaaagccctgggcggcggctatcgagggcagtaacaagaatgccttcccaataggggaaggcattaagctgaaggggcggggtagatgcgcggcgattacaccagggcgcgcagctcttcccgcatataggtggaaaagaattccggatgcttaatcaccagccgttcgccggcggcgacccgttcagcccactccgccactttatcggtaaacccagcgctccagccctgctgttggccgcgcgcagcgacgtcggccggggtggcgggtacgcccagttcttttaaatatttgagaattcccttcgcggtactttcatccatagactgtggtactggctcagacgtattcatacaaccgatgaaatccaatgctttatcaatgactgctggcataggtgtgtccttatattaaccacatagtaaacctgactacactatggaccggaaagcgacgtgatttcaaagaacacgctcacgttatgggacatcgcgcattgtgaaaaggggattttgttctgctggggcggggattggacaaaaaacaagccggcccgtagggccggcctgaggatcgcgtcaggcgttgctgagggatttttgcgcggcgctggaccgactgttctccagcatccggcggaccgggacaatcagcacggccagcacggcggcgcagatcagcaatgcgatggagcagcgggcgaagaggtccggcagcagcgacagctgatcggccttcacatgaccgccgatcaggcccgccgccaggttacccagcgcgctggcgcagaaccacagccccatcatctggccgcgcattctctccggcgccagcagagtcatggtcgccagcccaatcgggctgaggcacagttcaccgagcgtcagcatcaggatgctgcccaccagccacagcggcgacacaccggccccgccgttgctcagaacgttctgcggcgccagcatcatcaggccaaagcccgccgctgcgcacaggatgccaatcacgaatttggtcatactgcccggacgaacgtttttacgcgccagcgcaggccacgcccagctgaataccggcgcgaggagaatgataaacaaggcgttaatcgactggaaccagaccgcggggatctcaaaatcgccgatcatccggttggtatagtcgttagcaaacaggttgaaggaggtcggtttctgttcaaacgcggaccagaaaaaggccgccgagaccagcaaaataaagcacaccagcaggcgcgcccgctctttacggttgagtccggcgaagacgaacagccagatgaaatagagcgccacggaggcggcaattacatagaccagcacgctggccaccgccaccgggttaatcacgatcgtgcccaggctgataagcgtgaccagcaccgccactcccagagccagcgccagcagccacgctccaacgccattctttttcgccaccgggctgttccaggtggaatcgaggccaacctccgcgtcatagcgcttcatcgacggtacggcaaagacacggaaaatgatcagcgccaccagcatcccgatccccccgatgccgaagccccagtgccagccatgcgatttgataagccagccagagatcaatggcgcgataaacgagccgatgttgatccccatgtagaacagcgaaaaaccaccgtcgcggcgcgcgtcgccctttttatacagggtgccgaccatcaccgagatacaggttttaaacaacccggaacccaggacgataaacatcagaccgataaagaacagatcgttgcccagccatgctgacagagcgatcgacaggtgccccagggcgatcaggatagagccgtaccagacggcgcgttgttggccaagccagttatccgccagccagccgccaggcagcgcggccagatacatactgccggcaaaaatcccaacgatcgccgaggcgttctctcgcgccaggcccatgccgccgtcgtacactgtcgccgccataaacaggatcagtaaaggacggatgccgtaaaacgagaagcgctcccacatttcagtgaagaacagggagcccagcggataaggatggccgaaaaaggtacggctttcgtttttattaacagaggaatgcataaattctccaggtaaggtgcgccgcagcgcaagttaaccgtataaagcaggctgacgatttataatttgtttgtattaacatcaaacacgagcatttttaaccatttgataaccacgcaatggttttgtccagccccttaccttccctttttagatgaaaagtcgacaaacatctagttttacagatttaatgttcgcaataatgcaaacgacgttgactttatatcattacgcacaaaacgaaattttacccattaaaaacaaacagttaataatttatcgagagacataaaccaccggcgcagaggcggtgtataacggcaggaaaagtaagggaaacagactggatagtggagaaatagcgctaagcgagaatattgtcagcaatccaggcgctacatacctggagagcctaccatacagcaggattaacacggcatgccggctgctacagccggcgccattctgcgcgctatttcacacgctgccctgcggcatcaatgactggctcaccgtcctccttcacgaatgcgccttgttgcggcgccgtcaggatctccagcaccacctctgacgggcggcagagtcgggtgccctgcggcgtcgttacgatcggacggttaatcaggatcggatgctgaagcataaagtcgattatctggtcgtcagtaaaccggtcttccgccaggcccagcgcgtcgtagggttcgacgtttttccgcagcagcgcgcgcaccgggatcctcatcgcggcgagcagctggcgcagctcatcacccgacggcggcgtctccagataatagataatggtgggctcggcgccgctgttacggatcagcgccagcgtattacgcgaggtgccgcagtcagggttatggtaaatggtgatgctcatagtacgttctcatggctggttgaaggagcgacgcagcgccagcgcggccagcgtcacaagcagcaccggcagggtcatggtgatgccgcagcggacataatacccccaaccgatggtgatgtgcttctgcgccagcccatgcagccacagcagcgtggccaggctaccaattggcgtgatcttgggccccagatcgcagccgatgacgttggcataaatcatggcctctttgatcgtccctgttgccgcgctgccatcaatcgacagggcgccgaccagtacgctgggcatattattcataatcgaagagaggaaggccgacagaacaccagtgcccagcgtcgcggcccagaggccgcgctccgccagcatgttcagcaccgtggtcagatagtccgttaacccggcgtttcgcagaccatacaccaccagatacattcccagcgagaagatcactatctgccacggggcgccgcgcagcaccttgccggtgttaattacccgcccgtgcttcgcgacagcaaacaggatcccggcgccgagcgccgcgatggcgctgaccgggatccccagcggttcaaggatgaaaaagccagccagcaacagcagcagcacgccccagccggtgcggaacgtcgctggatcttttattgccgtggccggcgctttcagtaacgccatatcccaggccggcgggatatccttgcgaaagaacaggtgcagcatcgccagggtggtgaggatcgccgcgagatcgaccagcaccatcaccgaagcgtactccctgaagccgatggcaaagaaatctgccgaaacgatattcaccagattcgacaccaccagcggcaggctggcggtatcggcaataaatccggcggccatgacaaaggccagcatcgttcccttgctgaaccccagcgctcgcagcatggcaatcacgattggcgtgaggatcagcgccgccccatcgttggcaaacagcgccgccacagccgcgccgagcaggataatccaggtaaacagcagacgaccccggcctcttccccagcgggaaacatgcagcgcggcccattcgaaaaagccagactcatcaagcagcaggctgataatgataacggcgataaaggtggcggtcgcattccagacgatatgccataccaccgggatatcggctacctgtacgccaccggtggccagcgccagcgccgcgccaaatgtcgcgctccagccgatccctaacccccgcggctgccagatcaccagcaccagggtcaggataaaaatcgtacctgccagcaacatcgttcctccgccaatcacattcgaaaaatcatatatgttaagataaattttttaccggcaacccggcccgccagccagtctgctgatcatcagccgcacatcctcctgctgactgagccaggcctgctcaatcacctgcgccgcccaggccggcatctgcggagagaggcggtaatggacccacttaccctgtttacgatccagcagcaatccgctctcacggagcatcgccagatggcgggagatcttgggctgggactgggcgagcgccgtacagagatcgcacacgcacagctctccacgcgccttgagcagcaatacgatccccagccgagtttcatcggcgaggtttttgaacagttgcaggggcaataaagacatgatttctcctcaagcgtgacggacagcatacggggccacaaagaaagatcaatatacatgcgcaaaaacatatatattaattcacgtctgcgatgagcatccgggatgttgcgccccgccatccctgctaaatagcacggaaaaatgccgcgttttcttttatccatcatcgaaatatgtcaggctggagatcccattggattgccagggctttcaggatgagtacgatttatgtggttgttttaacgtatataaaaccgctcgaagaggttgaccgtgcgatccccgcccacatcgaatggctcaaaaaaggctatgccgacggcctctttctcgcctccggccgccgtattccccgcaccggcggcgtcattctggcaaaatgcgatagccgggaaactctgcaagcgcgtctgagccaggatcccttccagcagctgggtctcgcccgtacagagattattccctttgaggccagcatggcgtcacccgcgctgcagtcgctgttataaccctgtctgaaagcatatcccggaggaaaaatgcagccgtactttcactggatcaatgaacctgccgagtggcgccgcgattccgacggcctgacggtggtcactaataagcataccgacttctggcgccatacctggtatggcttcgagcgcttctctggccatctctatgccgcagaagtggcgggcgattttaccctgcaggcaaaaatctgtgcggatttcaccacgctttacgaccaggctgggctgatgatgatggccgacgagcagacctggctgaaggcgggaattgagtttaatgacgatgccccggccatcggcagcgtactgacgctaacccactccgactgggccaccgggcttttccccggcgacccgcgcaccttctggctgcggctgacccgcaagggcgacgcgttaaggctgcagtattcaaccgacggcgagcgctggccgctgctgcggctcggctactttccgccaggcccggtgaaagcgggcgtcatgtgctgctcaccggagcgtggcggactggcggttgcgtttcaggatattcagctttccccaccgctggacaaagcgctgcacgatctgagctgaacgctagcgggaagacccgactttctctgcatcatccgcggcatgcattatcaggaaatcaatcagggctttcacccttttcgttctgcccgcgttttttgggtaatagagataaaccggcggataggttttccagtagtcctccatcacgggaataaactgctcacgatcgggctgtaattgcaggattggttcaaataaacggccaatccccagtccgtggcgaataccgtcggccatgacgtcaatatcattgctgattaactgtccgggcatctcgacggtgagctgctcgccgtggtcattgaggctcagcggcaggatgcggttgttggtaataaagcgatagccaatcagccggtgatgatggagatcggcaggcatcgcgggcacgccatattcggcaagataggcagaggaggcgtatagcccttcacgaaacggcttcattaacgggcgggcgaccacgccgccttcgagaatatcgccaaagcggatcccaaggtcgaaacgttcttcaataatattgacggtaccgtcatagaccgatatttccagctggatccccggatattgctgacaaaatgccgccatcgccggtttgagaataagcaggtaggcaaagcgcgagagggttattctcactgccccggagggctcctgattctggtcgcggatgatttccagcgacttttccagtgtctccaccgccgcggcggtctgctccagcagctgttgcccggtttccgtcagctcgatacgccgggtagtgcgcacaaaaagggggtggccaatatgctcctccagcagcctgagcgcattgctgaccgacggcggcgtgatttcgagcttgcgcgcggcggccgagatattgccctcgcgcgcaatgctctgaaagatgcgtatctgattataaagcgcgttattcatagcatctccttacgacaccctcgcctgattattaagtacaggctaaatattcttaagtcaatgaccgcctaatcttccccccctgcggctcgtatacttttgtctcttcccgctgacaacgactttccggagacaactatgcgaattttatgtctggatatccctgcccccggcgcgacgctggaacactatgcgccgcaccttaccgcagaagccctgcatgcctggggactgtacaagtcaggctttattcgcgacatctatttccgtcaggatcgacccggcgtcgctattttcctcgagtgcgacaccgtggaagaggcgaataatgtcatggccgaatttccgctggcaaaagcgggtctattaaccttcgagtgtattccactcggctcgtttattagctgggaaaatctcttctccgctgaatttaaacatcaggagtaacgttgggaatggctcatattcttgtcgtttccgggcatccggatcttaaccattccatcgccaacgccaccatcctcgatgagctggcgaccgccctgcctgatgcggaaatccgtcgtctggactggctctatccggacggcaaattcaacatcgccgctgagcaggaaagcctgctgcaggcggatgtgattgtctggcagtttccctttagctggtatgggctgcccgggttaatgaaacagtggctggacgaggtatttgtccacggcttcgcccatggctcaacggcgaaactgggtggtaaaaagctgatcctctccttcaccacgggagcgccacaggcgctctataccgctgacggtttctttggccatgccgttgaggagtatctccttcccttcgagaccacggccaggctgtgcaatcttgcgctgctggcgccggtttatacctgcggtattagctacgccgaccgggatgccgacaaaatcgctcagcaaaaaacgcttgcccgggaacacgcggccagactgatcgcgcggcttaatactctggtggaataacccaaagggagaaaataacgatgcagtatacccggctcgggaagagtgacttactggtctcccgtatctgcatgggatgtatggggtttggcaatccgtcaacgggtcagcatcgctggacgctggacgaaacagccagccgggacatcatccgccacgctctggaacagggcatcaatttttacgataccgccatcgcctatcagaacggctccagcgaacggtacgttggccgggcgctgcgggagatggcaaaacgcgaggaggtggtgctggccaccaagtttctgccacgaaccgccgcgcagattgccgaggggatcagcggaaaacaggctataacccgctcgcttgaccagagtctgcgaaacctcgggatggactacatcgacctctacatctaccacatctgggattacaacaccccggttatcgacgtgctggaggcgctgcacaccgcagtgaccgccggcaaggtgcgcgcgattggcatttccaattgctatgcctggcagctggcgaaggcgaacgcccttgccgaacgcgaagggctgacatcctttgtttctgtgcagagccactacaacctgattatgcgtgaagatgaacgagagctgttcgggctgtgcgcggaagagggtatcgccatgactccctatagcgcgctggccagcggccgtctctcccgcttagaaggccacacgcggcgagcggtggaagatgattatgcccggggcaaatacgacggcacggcagagcaggaccggatcattattgcccgcgtcgccgaacttgccgaacggcatcaggtctcgatgaccgaaatttcgctggcctggctgctgactaaagtcaccgccccggtgatcggcgccacgcaaaagcatcatgttgacggcgcggtcaacgctgtagcccttcaactgagcccggaagacatccgttatctggaagaagcctaccagccgcacgttctcacaggcgtgatggcgcaaaacacgccgcaagccaaagaccatcctcaggtgtggacgcggtaaccctctgtcctgttcagcagggagaataaaacatgaaaaacgtgattgccgcggcagccttgtcgcttgtgctgtctgattttgcttatgcccacgaacaaagagatgaagctatgatgaaaattaccccttccacccttgcggacgctgatattcaagcggtctccccggcgctggcgcgcttcggccgcgaggccatcagcaacgacctctggcaacgtgacgccctgtccgcccgcgaccgtagcatcgtgaccgtagcgatgctgattgcccgcaaccagccaggcgagctgaagcactatattgccgttgcgctcgatagcggcgtgacgccagcggaagtgtcagagatcattactcacctcgccttctacgctggctggcccaatgcgatgtcagccgtcagcgtcgctaaaaccatctttgaagccaggggcgtgacggcagaggccctgcccgccgcctcgccaacgctgctgccactcaatgaacaggtagagaaacagcgtgcagacaccgtggaaaaaaatgtcggccccatttcgcctggcctggttaaatttaccgccgacccgctgtttctcgacctctggcaacggcccgcgcttacgccccgcgacagaagtctggtgacggtcagcgcgttaatcgccgccggacagagcgcgcagattggctaccacctaaacagagctatggataatgggctttcggctgaagaggccggagaagtggtcgcccaggcggcgttctacgcgggatggccaaatgcgtttaccgccgccccggtggtcggtgaggtattacgatcgcgcgagagcaaaactgaataaaaaagaataaaggacagggaagctgtcctttatttatttgcttcatttaccttcatcgctgaaatatttcagaaataacaactccgcgtccgaaaattcctaaatactcctgcctgttgttgtaaacgcaactccaccaaaaaacggtaacactaaatacttcaccccagaccacaagaattactgctatattgaagaagcattgagagtcatccgtttagtctggccaataaccctgaaaatgatagtgaaaaaatgcggaacgtacttattacaggcgcaaccggttttttaggtggtgccgcattgagttatatcttgaaagaaaaatccgaatgccaactgctattactgacaagaggtgaatcgacaaaacatgctgtgatgcgtgtcaatgagaacctcagaaaatttcaactcgctgaaacgttaattaacagaatatccagtggcaatatcctgctaggagacctgacggcaccggatttttttcttgaagattgtcgtctcaatgccattactgacgtcatcaattgtgcgcatatcacctcatccggtaataatccgtttatttggacagggtatgtggaggggatgctcaggtttgtcgatcgtatgagccaggccccctcattgagacatttcctgcatattgaatctgcagggctaggtgtatccgcatccgaatgtgggctagacaacaaaccagggttttcaaactatgagaatgcgattgcccagtgcagttgggcaaacagcctcatcgagcaacggataatagaatgttatcccgagcttcctctgatgagaatcgtgccttccaccgggatcgagcagactgagttaggtaacagcatctgtcggcatttaaatctgccttagcgctgaggaaattcacgctctcactgcggcataaccggcggataaattcgggaataaaaacaacacggacctttttgccagtgcaccaactgaagtgcgtctggctaattattaacagagatgatcaccatgatgcagctgagtaaaaggatgattgttgtcagccttctcgttccggcgattctggttggcctgctatcgttggggatggccgttcgtcagttgcaaagggataccgccataacggcggagattctgttaggccaggttgaccacgtgacgtcgattgctcgccataccctccacacgacagcgcaaatggcgaatcagccctgcgaaaacgttgttgaaaagatgaccgaaaccggtgcgctcaccccttacatccgtagtaccggtctggtgcgtggggacacgcttgtttgttcctccatcaccggctccagacagcaaagtattcggtcagtttatggactccccctctcagcagagatgggcagtctcgaaataacggcgattaacggtacccgcagcgttccgcatcagacggctatcatctacgcctctggtgccggtaatggcatcacggttttcagcgtagtagatggacgatattttaccgatctgatggaaaccctggatgatgaaaatcatgccatcctgcggttgcggtttagtgacggtcccgttatctccagtcaggataaaggcactgaagacctcgcgggcttcagtgcggtattcaattctgactttagtcaggcgcgtatacagatcatcaccccctggcaatcgcttgctcgctacctggtgcgcaatatgatttttctcggcccggcctctctactcctgacgctggctacgctgtatttatggcgacgctggctgacaggaaaattgtctctggctgatgaaatagcgaagggaatggcgcgaggagagtttgttgttcattaccaaccggtatgtgaggcggcgtccggtatgtgcaccggtgcggaggccctgatgcgctggcagcgggctgacggcagctcaatatcgccagcgctgtttatccaggcagcggaagaagaggagatgattatcagcctgacgcgacatctttttggcctgatcgctgccgatgtcaaagcctggcaggtgaccgcccctttccatctgggggtcaatatcgctgcggcccatctgacggatgacgcctttaccacggacgtgctgcagtttcgacaatccctcgctgcctcatttcgcctggtactggaagtcaccgaacgcagcctggtcgatgacaccgcattggcctcagagaatctgaacgcacttcgtcagcatggctgtcaggtagccgtggatgatttcgggacaggatactgctcattgagtctgcttcacaacctgcccgtggactacctgaaaatcgataaaatttttattgatacgctgacctccgccgggacggatacgccagtattggataccatcattggccttagcaagcgtctgggcctcgccacgattgcggaaggcgtcagtacgcaacagcaggcagagtggctcaaagataaccgggtgtcttacgtccaggggtatctttatgccagaccgatgccggcagctgatttcatttcctggtacgaagaaaataacagaaagcgtgagactggccgtacataacaccgactgcgataccccgccgctgatggttgatgtgtatcagcgatataccgcatagtggataaagagagagcatagtttcggccaacaaactgcgctctgcgtttgaaccacaccgggcggctccccatctggccagtaccgccatgatgactgaagatactgcctttgagacttaccgtcatggtgtgggcaccattaccgccgctaatgaagcggcaaacggtctgctgagcgcagagcaaaggaatgtcgacgcctacacctccgcgctgatcgccgcagcgaatctcgcttttgtcatgggggaaatgacgcaggcctctggcaatataccaaacacgatggagccgcctttgtccgacgagacacaggaaaccactttcggctaaaccataattaaccaacgcgaagacgccctggcaatgggaaatttgatttcgcccatatctgttcagcaaagctgagaaaattatccgagagcatgaagcttgacgcccctcactgcttcctttttatggtattggatgcaattcatcacgtaatctctctaacttgatccagacctcgcacggcctatttcccattgaatgacaggcagtgaaatcttactcgaggtgatatcaaccgcagatattgtcgcatcatttaatttgatcggtatttatttacatccgggaaaatcctacatccgtcatcccccaccttcaccaggcccactataatcctacatatatctggcaagtccaaagcaaaataatttttttgatgaaattaggggggtgtagtatttcaggagacttttcatagcattttcttgaactaaaaaaatcacccaagcctataaacaaacaaaaaaaacaaccattattatcaaagtgttacggaaggcgcctttagagtatagactaccacagttcctttaagcgattgataacgatgacaagatagctttcacctattcaaggatggtttttataacggcaagaacgatttctcatctatttccctctctgctagtcttcagcttacattaatactggtagaaaaatacttattatcaaaagcgaatcattgcttatcatacctgattattatcagcagaaatttactgatacatgtgtttcctgttcttttaccaaaaggtgtttttatgccagacttaatcttcaaacattgctctctcagcgcctatgaaaaaagcgaatccgccgcgctctcgtggtcaaaaaatgcagcatgtcatgcctcctgtccacggtttatccctaagcaaaaaaacaggtcaggagcgcgttttgcaacatggcttaacggggcagtgtttctggcaatgatacctcaatcggtatcggtatttgttctcgagccgggttatacaaaacctggtaactgggatccctcgtgactaaaacgcaggatagccgtgaatgtcggggccaggcagcagcaactttgatgggatcaacgtagggaaagatccaaattttatctcaatacaggcttacgccaatacgacagggttactcccgggcaaacgttaagagatacccaccgatgattctcgggatgatgccattttaaaaggtataaatatggtcgctactgacattttttgggtgggcctgggcggcggcaccggctctttactacgctggtgggttggtcttgccgtcagcaaactttaccgcggacattttcctctcggcacgtttttaatcaatgtgagcggcgcattaatcatcggatatctcagcgcgctgttcggtatcgactggcgcgagcgctatggtgaatggttaaatgcaggcctgctgaccggtatccttggcggttataccaccttcagcagcatgcagttagatgccgccaacctggctcatgcgcaccagaggttactcgctgcaggatatttaatcgtctctgtggttaccggcgtggcggcggctgcctgcggtgcatggttagcctgtccataaggagcgcatcaggtgcttaattttactattctgatctttgttggcggggcgtttggcgcaatatgccgcgaattattgatgttggtagtgcctcgcctgagcgatggctttcccctggatatcttcatcgccaatattattgccgcttttttgcttggtttatgcacatcactgtataaaaggaaccgggttaatcagtacatccatatgatggtggctacgggtatcatgggagggctatcaaccttctccagctttgtatctggcgcggtggaaatgatgaatgagccactcagcgcgctgatcgccatctgttatctggttatcagcctgatagtcggttttatggctgtggagctggggttaagactgggctcccgagtaaagcctgcgccgcccatgactcataacagatcgactggttaagtcgaactgactttttctcctgttgcgccgcgcagcagagcaatcaggagcgatccggtgaaagcggcactatcaatggtagtccgcctgactggaaaaaaagattatcgccgcgcttaatgcctgcaactgctgcgtaagttcatctattccctgcggcaaaacggcttcaggttcccccgccgccagcgcattctctaactgttcagctgtcgcatggatagcggttgcgccaagaatctgtgcagtaccattaattcggtgtaaatggtattgcgccagtcgccagtcttgtccactgatggccgcgcgcgctgcggcgatatccttttcgttttccacccgcgattgctcgagcatctgccgcattaattttttatcacccagcgtcagcgcggtgaatatcttcatatcgaggaattcatcaagcgagctgccgggctggggtatatttatttcacacagcgcggtggccagctgagaaagatccaggggcttaaacaggcacaagttcatgccactggccaggcaacgctctttttctccggccacgaggttagcggtaagcccccagatgaccattctggtatcgtactcgcgcacgcgacaggttaacgtaataccgtccatcacaggcatattcagatcggtaattaacaggtcatagcgctgttgctggatgagtttaagcgcctcggcgccatccttcgcttcatcagcagcgtagcccaaggtatcgagctggcggcgaagcagctggcggttggcggggagatcctcggcaatgagaatacgaattgcctgcggaactgccttaacgttcccaggcagggtatcaacgttcaaaccaagcaaagactgagcggtggcatacgccagtttaaggcactgctgatcttcttctgctgtttgttggcgggtgaagataagttcaagaaaccccaggatagcacttactgacgtacgaacatcatgactcgagcagggcaaagaggcactgctctcctgactggcgtctttgacctgttctttttcattctgaagcttctccactaactgtcgggactcagtgatatcctgccagccacacattaagaccggtgtcagggttgtgggtaagcggcataacaccatccagtgcaaaatcgttcgttcctctataccattatgtaatgccagtggatgcgtgataatgatatcgggggtcaggcccagctgaacctcatgctggatcgcagggaagatatgcgcgagaggatgacgccggtcgaacagtgaaaaatgcatcgcttcacgcagatgctcggggaaaaaagcgctgaaggcgttgttataactgtcaagctcgcccttaagggtaatcacatacaccggtatcggcatcgcgttgaacaacgtctggtgaaaactgagctgatgctccagcgccgcctgaaccgcttttcgtttgcgctcagatcgcagccaatgcacgccccagagcaaaccactcaggatcaatagcgtcgccagccctgcaaaccagtaaaagggtcggctatagaagctccaggtatcgatagtcacttcaggcatgttggtccactttcccgtagggttcagtctctctgttagcggggatatcatccgatgccttattgagaatgcattgccattttattgccctacacgggaacatgaaggcatcgttcgcaggcggctctgcccgcgacatttatcagtataacaggcaggcacaatactctttccatcaataataaataatcgatttagaatccgcgatcgcgttcagaggactcatgtatgcttaactgtgaaaactttgcacctacaatgacgatacctgacattcgtttttgcgccagccgttgctgacggctttgatttataaagacgggggacacgctaacatcccccacagtaacgctggatatgcccttcaccggtatatcgcattatccgattttattacggtttgcaaatgagaagagatccaccagcgatttacaacccagcttctccatcaatcgacctttataggtactgaccgttttattgctgatatgcatctctgaagcgattttcatattgtctgccccattcaggatggcgcgcatcaccttgacttcctggctggagagcgactgcagcatcgcctgctcattagataagctgccgacaaagccactcagcgaaaatggaaaatagctgtatccattttgcgcagcatggacggcagagatgatattgtttatcccctcttttttactgatgaaggcattagcgccggcatctgcactacgcttgccataaaagagatcgtttttcgccgaaaccacaatgataatctggctaaattgcttcttacgcagtttttcaacgacttctataccgcttatgacaggtatatccacatccacgatcaccacatccggctgatgttcggctacagccgttaacgcttcgcccccatctcccgcttcggcaacaatgttaaaaccctcactttccagcaggttacggatcgccattcgcgcaagaggatgatcatcaataataatcgcgcttaaatttgccgttttactcatcattattccttgttatgttgaacgtaatgacatgctgtgctctccttctatccaaccagacatgcctgatcgacgatatgcaaacgtagccggaagaccgggaatcgtattattcatccattatctacaatagcatccttcatcgtcctcatcctagataggcattgaaagttttgtcgttgcaacctgataatgccgttttctttcacttaccttctgcagggattacatctgtaagaattaacctgcaaatatttccgatacatccaatgtgactgttccaggcataattttacacttgtttaaccgggactacatttaccaccgctatgcatagtgatgctatgtcattcccgctgggctaaaaatcattaaccaagtggttatatgcataaggaaataacatttcaatacgcccattttcctcatagcatctatcaaacgcagcgcttcctgcacataaatttctcttgcatacagacatatggaataagtttcatcatgaacaacttacatactgacgaaaacattaccggcaagcaaattcaaaaaagaaaaaaaatgttgcttattttcgcggctatcatggttattgctgctggttccagcacagcctggtggtattttgatttacgaaatgtgcagagcactgatgacgcctatgtgaaagggaatcaaattgccgtctcttcgctggttgcgggaagcgtaattagtattaattacaccgacacggatttagtgcgtcagggtgatattctcgtcacattagatgataccgacgccagaattaattttaacaaagccgccaataatctggccaatacggtccgcaagatcaaacagatgtatattgctgacgatcaatataacgctaacgttcaggaagccaaaatcgcatatcagcaggcactggcagactaccaacgccgtagcaggctgcagggcgcagcggcgatatcaagggagaatatgcaacatgcaaaggatgccgtggacagcagcaaagcagcgctggatgttgctgttcaggcttatcgcggaaaccgtgtactgattcagaatacggcgttagaaaaacagccggaagtgttaatggcagcggaatccatgcgggaagcctgggttgcgcttcagcgaaccaaagtgcgcagcccggtcacgggttacctcgcccaacgcaatgtacaagtcggggaaactatcggctcaggccaggcgctgatgtcaatcgtaccagccgagcaggtctggattaacgctaacttcaaagaaacacagctcaaaggggtaaagatcggtcagaaagtctcgatcgtcaccgatttttacggcagcgatgtggtgtttaacggccaggttgatggtatcaacatgggcaccggtagcgcattttcggtattacccgcgcagaatgcaaccggtaactggatcaaagtggttcaacgcctgccagtacgcattacgctggatgccgagcagataaaggcctacccgttgcgcatcggtttatccaccaccgtgcggctgcatgaaacccgttcgcagggcgaagcactggcaacaacgcagcgaaaaaccccggcttacgcaagcaacgcactggttatcgataccacccctgttgataacgaaatcctcaatatcatcaaagccaacgcgatgtgatttatgagtaataatactgcacttccgccgctgaagggtgctgccttagtactggtgacattagcgctgtcgatggccacctttatgcaaatgctggactccaccatttccaacgtggcaattccgacaatctcaggatttttaggcgcctcaaccgatgaaggtacctgggttataacttcgttcggtgtggcgaatgctatttctatccctgttaccggtcgtctggcgcaacgttttggcgaacgcaaactatttttaacctcggtaaccctctttgcactggcatcattatgctgtggactttcgacaaatctggacactctgataggattccgtgttgttcagggtctggtggctggtccgctcattccactctcacaaagtctgctgctacgcaattatccaccggaaaaacgcaatattgcactggcgctttggtcaatgacagttattatcgctcccatttttgggcccattattggtggctacatttgcgataattacgactggggctggatatttttaatcaacgtcccactgggtgtcattgtggttgcgctgacctcctggttactcaaagggcgcgagacgccaactgaaccggttaaaattaatctcatcgcgctgagcctcctggtgctgggcgtcggcagcctgcaaattatgctggataaaggaaaagatctcgactggtttaactcaaccactgtcattgttctggcgattattgccgttgttgctattattttactggtcatctgggaagcaacggataataacccgattattgatcttagcctgttccgttcgcgaaattttactattggtattttatgtatcgcctgtgcctatttaatttatgccggggcgatcgtgttaatgccgcagttactgcagaccgtttttgagtacacttcggtatcggccggactggcttacgcaccgatcggtatcatgccgctactgcttgcgccgcttattggtcgctatggcaataaaatcgatatgcggatgttggtaacgtttagttttatcatgtacgccctgtgttattactggcgttccgtcacctttagctcggccattgattttacgtgggttattatcccacaatttatgcagggttttgcggtcgcctgtttctttttaccgctgaccaccatttcactttcagggttaccgccggagaaattcgctgccgccaccagtctgagtaattttttccgaagtttgtccggctctattggcaccacgatcaccatgacgctatggagtcgtcgcgactccttccaccacgcgcagttaacagaatcagtgacagagtataatcctccgtctgtcgatatgttccataaactgcaacatatgggttttgataagcagcaaatagccacctatcttgatgaccaaattactcagcaaagcctgctaatggcggccaacgatgttttttacctgtcggctggcgtattcctgatgctcactctgctggtatggttcgcaaaaccaccgtttaactccagcaaagctggataatgcttgttatctatcaggcccggcaacgggcctgataatccccctcctgtttcccactcgctacaagcctgttaatttcacatcatgtccagccagtttatacaaattacatactataaccgttgccgtcccgccttcccatccataaaagaaaaagcggcgccaacgactccgttgagaaaaattaaagctcccccaccattgcatcctacacctgtaagatattgatgatatcgatcgactcgcactccgatatccacgaaaataaccgccacttataataactgaaatactattaaatgccgtcgcctactatctgctgcggttcattttgctaccgtaatgactaacggagaaatcatgttatttattgacagcagtaaaataaatactctcggcagtacgctggtaaaaagataccgcagagctactgccgttatggccgttatactgctgttgtgcgcgctggcctgtatgctcttcccaatatatagcggtgtggtcattagcaccctgactggtgctttaatgttcatctgtggcatgtactctgtggcgatggcattgatattcattaaatataatactcgttcttacatctcatcgttattatttggaattatttattttggcatcggctgtggttttatctttagcacgtcattcggcattaatactttgtcattgctgttttgtgttttatttatccttgccgggtatagtcgcatcgccatgggatttaaagatcgggctatgaagggtcgttattggtgtattttcattggcataatagacctcatcatcgccctggcctggctccgcgctagcgaagacgccagctatatcatcactgtcacctttattgggctggaaatgctgttctgtgccggattcttcttagtgctcagctatgcactgaataaagcacaaaaaaaattaattaccacataaatcgctattttatatatggtttataggctttttaaacaggaaaacatcatgaaaaaattatccactctgtttctcacacccgttgtgactcttgttttactgaacgccaacgccgccgtggcggcggagaaagcgtcggaaaccacaccgcaaaacatgacttgccgggaataccttgatatgaaccctaaggcaatgaccccggtagcttactgggcaatcaataatgaaaccgtctataaaggtggagacaccgttgactggaatgaaacggataccgtctcggtaccaaagttaatcaaaatctgtcatgaaaaaccagaaagtaaaattatgcaatgggtgaatgatattcgataatcctgcgcagtttattcttttctgccatagctgataaaccaccagcggaaaacagcctatcttacagattgctgtttttcgcttttttacgtgcctgccttcttattccgtcctgagatataatttctccggcagctaccctgacagaaataagccaatattttattccgtcaggcaacaacttacaccagtaggatgggtatgactcatgcgggtatccactctgatatacagattataaaacaagctatacactcttgaagtatataactttacaaaagtcaggagacctattttatcgaatgcaaggcatgcatttataagaggttgttagcatgtctggcctcctttaggaaaatcagcacacagcctgccatggagaaaagcgtgaacgattaaaagcatattaacaggttaataaaaccactccctcgatgcgtggaggatttattttacgaatataaacaatgtcctgcatatatattttacatatcgcactgtcatatcgtgcaatctgcgttcgccagcttaaaaaatcaacgcttacaggcgctgtataagatcacagggataattttatggaacatgcacttgtaaattatttatcattagatgtacctaacactgcttttatgttgctctgcgccagcctcgtgatgttgatgacgcccgggctggcatttttttatggcggactggtacccagaaaaagtattgtgacgataatggcgcaaagctttttctcgatggggtgggtcgccgccctttggtttattgtcggttattcactgagctttggtccgacgctcaacgggatcatcggcgatcccctctattattctttcatgaataatattgatccagggacgatgtacaccggtaacaaaggtggcatccccttattagtacattttgtctatcaaatgatgtttgccatcattacccccgcattaataacgggtgcgtttgcgaatcgcgtcaattttccggcgtatctggtcttccttaccttctggacacttctggtttactgcccgtttgttcatatgatctggagtccggagggaatgctggcgaaatggggagtcgtagattttgctggcgggatcgtggtccatgccacagcgggttttgccgcactggcttcagcactgtatgttggcaaacgtacggtggcctcagacggtacgcataatattccttatattgccctgggagccggtttattgtggtttggctggtatggttttaacgcaggttcagaactgcaggtcaatactgttacggtctccgcgtttgtgaccacggatatcgccgccgcttttgctgccgtcacctggtttgtcattgagaaaatccgtacaggcaaacccaaactggtcggttttttaaccggcgcagtagccgggcttgccactatcaccccagctgctggctatgtctcgattcagtctgccgcgctaattggcattattgccagcttcgtctgttatttcgtggtgctgttggtacgccgctaccttgatgatgcgctggacgtgtttggcgttcacggcgttggcgggataacaggttcgattctggtgggtgtctttgcctcagccacatggaacgcgaatgggcctgacggtctgctggaaggcaatgggatgcaaatcattaaacagattaccgccgtggtatttaccagcgtctggtcgtttattttcacactggctattctgtggctcattaataaattcaccgtagttaaagtcgaccagaataaagttggcggcgaactcgataacactttattcggcgaagatgcctatagcgagaaaaattaatatctctctgccccatccctgtggctggggcagcatcaccgatattaaacaatgtgtgtaatcaggaatggaggaaatatgcaactcacgcccagagaaattgaaaagctgatggtttataccctggctgacgtcgcgttgaagcgcaaaaacaagggtctaaaactgaaccacccggaagcggttgccattattacgaccacggcgatggagggtgcccgggaaggaaaaaccctggaagtggtgatgaatgaagcacgtaccgtattaaccaaagaggacgtcatggacggtgtggctgatttaattcctcacgtccaggtcgaagccattttcaccgatggcagtcgtctggtcacggttcatgacccgattcagtgaataagcctgaaatgactctgcaaaggagctctaatgaaaaagcaatccaacacttcggaaaccatggttaaaaaggtggagacaggggtccccatcggcggctatgtattagcggactcgccaattacttttaatgaaggccgctccattactaccgttcatgtcaaaaacacgggcgatcgtccaatccaggtaggctcgcactttcatttctttgaagccaataaagcactggagtttgagcgcagtaaagcgtttggtaaacgactcaacattaccgctacgacagcgatacgatttgaaccgggtgatgctattaccgttgaattaattcctttcagcggtcagcaggtggtatacggctttaataatctggtcgacggctgggtcggcaacgcctctggcattcagggcgatgcacctgaagatattcttaacaatgccatcaaacatggttttaaatcagtaagttaaatttcagaattaactgtctagtgaggattttatgccaactatttcaagaaaagaatatgccagcctgtttggcccgacggtcggagataaaatccgcctgggtgagaccgacctttatatcgaaattgagaaagacctccgcggctatggtgacgaatcggtctatggtggcggtaaatcactgcgtgatggaatgggatcgaataataccttaacgcgcgataacggcgttctggacctggtgattaccaacgtcacgattctcgatgccaaactgggcgtcattaaggccgacgtcggtattaaagatggcctgattgttggcattggtaaaagcggtaacccggccattatggatggcgtgacgcagaatatgattgtcgggctcagcactgacgccatttccggggaacacttgatcctgaccgcggccggcatcgacagccatatccatcttatttcaccgcagcaggcgtacagcgccctatcgaatggcgtggctactttctttggcggtgggatcggcccgacggacggaaccaacggaacaaccgtcaccccaggcccctggaatattcgcaagatgctgcgcgcagtggaggggctaccggtcaacgtcggactgttgggtaagggtaacgcgtttgggcgtgctccgctggttgaacagattattgccggggtggcgggcctgaaagtgcatgaagactggggagccacgccaaacgcgttacgtcattccctgcgtattgctgacgaaatggatattcaggtatcggtgcataccgatagccttaacgaagcgggttacgtcgaaaacactatcgaggcgtttgaaggccgtactattcataccttccataccgagggggccggcggtgggcacgcaccggatatcatcaaggtggccagccagttaaacgtgctgcccagctccactaaccctacccttccattcggcatcaacacccaggctgaactgttcgacatgatcatggtgtgtcacaacctgaacccaaacgtggctgcggacgtttccttcgctgaaagccgcgtccgtccggaaactatcgcggcggaaaacgtgctgcatgacatgggcgtaatctcgatgttttcgagcgactctcaggcgatgggacgcgtcggagaaaactggctgcgcgttgtgcagacagcccatgccatgaaagtctcccgcgggaaactgccagaagacagcgacggcaacgataacttccgggtattgcgctacgttgccaagctgaccatcaatccggctattgcgcatggcgtaagccatatcatcggctcagttgaagtgggcaagatggccgatctggttttatgggacccgcgctctttcggtgcgaagccgaagatggtgatcaagggcggcatgatcaactgggccttgatgggcgatccaaacgcatcgctgccgaccccgcagccggtattctatcgcccgatgtttggtgccatggggaaaaccctgcaagacacctgcgcgactttcgtgtctcaagccgcgctggatgatggtgtcaaagagaaagccggccttgagcgtcaggttatcgctatcaacaattgccgctcagtaaccaagcgtgatttggtacgtaactccgccacgccgcatatcgaagttgatccggaaactttcgccgtgaaagtggatggtgaacatgccacctgcaaccccgtcacaacagcggtaatgaaccaaaaatatttctttggctaagcgccatatccgtgcgttctgatgtgaggcaaataaacatgatactgattgagacgattatcggaaatgtaaaaaacgacccgtcgtggcaggaaaagacccgcggatatcaacacgatgtgctgtccctggaacaatgggaagctcaaaaaagccgttgccgtaagcaaagcgagcagggttttgatatcggtatcgctctggatcgtcgcatgcggttaaccgacggggatattttgttatgtgatgacgacaaaaaatacctgttaaccgtacatatcactctgcgggaagtgctggttatccagctcgcctccctggccacggcagagttcgaaggcgcaattaaacgcgtgtttgaactcggacacgccctgggaaatcaacactggaagtcggtgatcaaaggcactcaggtatatgtccctttatcagtcgaaaagaaaatgatgaattccgtgttgaaaactcatggttacgcgcaatctgaatatcactttgtcgcgggtgaaacggtattaccacacctgacaccgtccgagtcccgcctgctgtttggcggtgcggaagacccgcatgtccatgtcagcgtactcagcggcgatccacagcacggccacgcccacgatcgatctcaccacgcacatcatgggaatgcgcatgagcataaacattgatgaatcacatcagctcctgcgtctgatcagagtattgcagttcggcgactcggttctgccagtgggagcatttactttttcatgtggtgtggaatccgctattcaggtgggattggtccacgatgtcgtgagcttaaaagcgtttgttgaaacctcgctggtccaggcagcgcaatgcgatgcgattggcctggcccatgctcaccgggcattacttgatggcaacttagatcagcttctggccgttgatcgcgaaattatgaatcgcaaactcaatgaagagtcgcggttaatgacgcagcggatgggtaagaaactggttgagatgacccgtcaggtgttcgaagccgacctgctgacgtggtggctggataacattaaaaccggacagacagcaggcacatttccggtaagccaggcgctggtcatggggttacaagggatcagcgctcaggaaaccatcgctatgcatcagtatggcgttgccatgactatcctgagcgccgcccagcgactgatgaggataacgcactttgacagccagcagattctgtatgccgtaaataaaaacatacctgaattttgccggcaggccgtgaatgccgatatcagcgaaatggcgtcgtacacgccgcttatcgatattctggccgccgtacacgttgatgcgcatgtgcgtttatttatgaattaaaaataaggactggagaatgaaaaaaattactcgcctgggtatcggcggcccggttggttcaggtaaaacagccatcattgaagtcatcacccctaaattaatcgagcgtggttataagccgttaatcattaccaatgatgtggtcacaaccgaagatgccaaacaggtaaaacgcaccctgaaaggcattcttgatgaagagcggattatgggcgttgaaaccggagcctgtccccataccgcagtacgcgaagatccaagtatgaatatcgctgcggttgaggaaatggaagataagtacccggacagcgacctcattatgattgagagcggtggcgataatttaacgctgacctttagtccggcgctggctgatttttatatttacgttatcgatgtggccgaaggggaaaaaatcccccgtaaaaatgggcccggcctggtgcaggcggatattttgattattaataaaatcgacctcgccccttacgttggagcgagccttgcagtcatggaggatgataccaaaattgtgcgcggcaaccgtccttatatattaacgaactgtaaaactggcgaaggcatcgatgccctggtggacatgatcgaaaaagatttcctgtttacgcacgcaaaataggagccatcatgcagaccaaacacaaggcgtcgccggcgttcgatactctttctctgggcgcgttggcgcccgaactggcaaagtatcaacaagagccaccgcaaatggccagcggcgccgtcggcaaacatggctatttgcggctacgttttgccgatcgtggcgccaaaagcaccctccatgaaatggaaagaaaggtgccattgctggttcaaaaagccctctactgggatgaggaaatgccattcctgccctgcgtacccatgatctccacctcaggatgcgttttgcagggggatcgcttaacggtggagattgaggttgatgcgggcgcctgcgcccatatcaccacgcagtcagcgactaaaatccattcgatggataataattttgccgcgcaaacgcaacatatacgcgtcggtaagcaggcttatcttgaatttatgccggatcaggtcattccgcatcgtcattcgcgatttatcagcgatacccttattgaatgcgacagcaccgccaccgtgctttattcggaaatcctgatgccagggcgtaagcatcatcaccaggatgagcgttttggttttgatgtttattcctcgcggatcagtgccaaaaatgaagccggtgacgttttgttcactgaaaaactggtacttacccctaaagaaaagccgctggatgtcgtcggcgtaatgggaacattcgatatttacggcaacgtaattgtgttgaccccttcaacctgccaggacgaaattttgtcccgttcacgctctttttatagcgaggagctgtgtcatggcgtaagccgtttacccaatggggctgggcttatttataaggtactggcaaacgacagcacccgtataaaaaaagccatccgggatttctggcaaaccgtgcggcaagttgccaccggttattcattgccggcgccctttctctggaaagtctgacctttacatcagcgtgttgccttcaggaaaagggccttaacggccctcttccgtcagacaagctcagaatgaaaaataattagcaggagacgccacatcatgaatacctcatcagctatagcgagtaaatggactcattacactgaaataaaccctgctgtcaggtttatcgacgtgacgctgcggggatgtgctcaggtcatgtttcagaataacccgctgaccgggttaatcttctttattgccatatttattgccgcttacggcgaaggcaatcccgcagcggcctatggctgtgtgctgggtacggtggttgcgacatttaccggtatgttcgttaacgatcgcacctcatggctggccggactatacggatacaatggttgtctggttggggtggcgctgccgacctttttatccgtcacgccgcagctttggggctgcattattacaggcagcatcgtgtctgttatcgccaccgtcagtattgccgacatactgaaaacctggaaagtagcggcattaacggctccctttgtgctgacgacgtgggttgtgttgctggcaagttatgcgttttcaggcctggatgcctccgggttatccgtacctgaactcccccacccgttagttagtgctccggcgggggggctgttcaacggccacatatttgccacggtattacacggtgtttctgaggtgtatttattcagcagcgtggccgcggggggattatttgttgtgggtctggcggtggcgtcacgttgggcggcgatatttgccatcggcggttcgctgctcgcggtattaactgcctcactgcttggagcgaataccaccagcaccgacagcgggttatatgcatttagcgcggtgctcacggccattgcgcttggctcaagtttcaataaacccagctggcgagttttgggttacacctttatcggcgtgatatttaccgttttcgtgcagggagccatgaacacattgctggcgccggtaggcatcccaacgctgaccatgccctttgttctcgcttcctggctctttctggtgccgaataaagacattatgccggcccatcgtcagggtcactaggtagatgtgaccggcgcccattatcgatattgctgaaaaagcagagttgcataccaggcgtcagggcattttttattgactatgcattgttacaaggaagccgcatgcctcacctactaaaagtaatgtcatatacttttgcgcttatcgccagcacgttaccgttttatgcgcaggctgaaacggactcaacctcaggtcactcactgacattggctattggtgaagagcccagtgaaggctttgatcctttactgggctggagccatggaagcacgttgctgttgcatagcgcgctgttaaaacaaaatgtcgatatggactgggagaattttcttactgaacacgtcgagcacagtgccgacggaaagatctggaccattacgctcctgccggatttgaaattctcagatggctcgcccttaacggcccaggatgtggcctttacctataaccaggccgcgcagggtggcggcaaaatcgatatggggaatttttccgccgccagggttctggacgaccgtcgggtcgagattaccctgtccgcaccgcaaagcacgtttgtcagcgtattaggatcgctggggattgtgcctcaacatcaatatgatgcaaaaacctatgcgcaaaatccggtcggcgcagggccgtatcggctggtgagctttcagcccgggcagcagcttatcgttgaggctaatccttattattcaggccaccgaaacgacttcgataaactgatctttgtctttctggatgaagacagcgcctacgctgcggcgcaaagtggtcagttaggattagtcagagtcgcaccatccgtttcggttacgccgcaacagggcttaacactatgggtacgcccaagcgtggaaaaccggggcatcgctttccccaccatacctgccggtcaaaaagatgctaacggatacccgatcggtaatgacgttactgcggatgtcgctatccggcgggccatcaactacgccatcgatcgtcaccttctggcaaaccagcttatggaaggtcacgcagtacctgcttatagcgcggtgcagggcttaccctgggacaatccccaggccgccttcaaagatggtgatctcgccacagcgaaacacattctcgatgatgccggctgggaggtcggagaggatggcattcgtgttaaaaacggtaaaaaggcacagttaacgctgtggtatgccagcggagacagcacccgtcgcgatttggctcaggccgtcagcgcgatggtgaaacccctcggtatcgcgatggagctcaaatccggcagttgggaaaccgtcgagcggcatatgcatgccaatcccacgctgttcggctgggggagtctagatccgatggagctttaccatcattacagcagcaaggcggcgggcgttgagtattacaatccgggttattacagcaataacgccgtggaccagcatctccagcaggcgctcaacgcgccaacgtggcaacaagcggttcctgtctggcagcaggttgaatgggatggagagtctggcgcgggcgtgcggggcgatgccgcctgggcctggctgctaaatttacaacatacctaccttgccagtccgtgtattgatttaggtaatgctgctcctgaaattcatggcagctggtcagtgcttaacaatgttcaggactggaaatggacgtgccagtaaagcattttttaatgaccaggctaaatctaacccgatcttacgggccaggtcctgttttgattgctgtcttcaggctcgccattctgctgatactggtatcggccggaacctttacattgctgagtttttcaccggttgatcccattcgtgcctatatcggcaatgatttgctgcatgttcccccccaacagtaccccctcattgccgcacgctggggactggaccaaccgctgtggctacgcttctggcattggttttcgcaagtcatccagggcgatctcggatattcaatgatttataacgccccggttgcccaggttattggcgaacgctttgccctctcatttatcctgttagccagcgcctggctgctgtcagggttgttagggatcatgctgggattgactgccggacgttatctccaccgctggccggatcgcttaatctgccgcatcagccacctgttgtcctcactaccgacgttttgggtgggcttattactgctggcgatatttgccgttcactggcaatggtttccggtttgctgtgcctgggcaccgggtcagaacgccgacaatgccagcctgggggagcgccttcaccatgtcatcttgccgatggttgcgttaagcctgaccggcattggacaaattgcactgcacactcgggaaaaagtggccgaaacgatgcgcagtgactttgtacactacgcgcgagcccagggcgagaaaggctgggggctattacgggtacaggtactccgccatgcattaacccccgcgctttgcctgcagtttgcctcagttggcgaactcctcggaggctcgcttctggcagaaaaagtgtttgcctaccccggactggggcaagccaccattgatgctggcctgcgcggcgatattccgttgctgatgggcatcgtgctgttcagtaccgtgctggtattttgcggaaatagcttcgctgcgatgttactggccagaacaaatcatattctggagccgaaatgatgcagaataatcccgctccggcattactgcgttttattttttcatccttactgctcggcatgatggctgcctatggcgtttcattgttgtcagtggatgtaccgatagatctgcaggcacgctatcttccgcccggcgccagccactggtttggcaccgataatatggggcgcgatctgtggttacgttgctttcagggggcattgaccagtttgcaaattggtgtcggtgccgcaatctgcagcggtgttattgcgatgctgatcgccagtctgacgcttatccatcccgtgatggatcaggcgctacgattgatcattgataccctgctctcattaccccatctgctgctgcttatcctaatctgctttacggtaggaggaggaatgcggggcgtggttttagccgtcgcgttcacccactggcccaaactggcgctgatcctgcgagcagaagcccagcagattcggaccagcgactacatgacgctggctcagcgtattggaaatactcgctggtactgctggcgggcgcattatctgcccgcgctttcatcacagtggcttgtgggaacattactgatgttcccacatgctgtcttacacagcgcagcattaagttttcttggtttcggactggcgcctcatgatccttccctggggattttattagccgatgcgctgcgtttctttagcaacggtagctggtggctggcgctgtatcccggcctgatgctgctgttaattgttttactgtttgatctctgcgtgcgcgccattcgcgatctgtggttaaggaatccatcatgctgaatttcagtagcatctacgtcgaccatgtacattacacctggtttggacgccaacagttatcgcctctccttagcaatattaatctgtcagtcaagcgcggcgaaatgacggctctggtagggggaagcggggaaggaaaaagcctcctgctgcaaacggctctggcactcttacccgagaacttacggatgcgtggggaaatcagactggagggcaaagcgatagattcccgccattgcgcaacgcttcggggtaacacactttgctatattccgcagggcgtcggttcgctcaacccccttctgaccgtaggcactcagctgaagcgaagcctgcacctcagtggtcgtcatacctgcgcactggcgctagaacagcaaatcaaacattatcatcttcagcacgatattctgctgaaatatccccgccagctgtcaggcggcatggcaaaacgcattctggcatgtaatgccgcattaggaggagcccggtatattctggcggatgaaattacggcatggcttgatgaaccgctggctttccagctcctacatcagttacgcgatctggtggctcagggggccggggtgctatgggtaacccatgatttgtcgctggcggcacgtttcgccgatcgcattgtggccctcagtcacggacagatcagtgatgatatggtcgttaacgaactcaaagacggcggtggaagcgcagcattgcgacgtcagtggttggccctgccagaacaccaacgcttattttccgatgaggaaatgcctgtccaggccgggggcgtgtaatgttttctgtttcagagctcaccattgagcaagataatcgcccgctgtggcaaaatttctcttttgaattgccggcgggtgagcggttgggaatttcggcaccgagcggctatggtaaaaccatgctgggacgcgtgcttgcgggctggcagtcctgccgccaggggcggatcacccttgacggccttcctttgccaaaacgtggttattgtccggttcagttagtgcctcagcaccctgaacgcacatttaacccttttcgcaccacgggaaatgccttacgcgatgcgtggcagccggatgatgaacaactggcgcgttttcacgttaaccccgagtggttgaggcgaaaacctgctcagctgtccgggggggaactggcccgtattgcgctgctgcggtcgctcgatccccgtactcgcgtactgattgccgatgagatcaccgcccagctcgatccttctgtgcaacgggatatctggcagcagttaatccatgaatcccgtcggcgcgggttaagcatcattatatttagtcatcagacagcgcttctggagcaaataagctcacgcatgatgatagcctcgcgttaagcacagcgacttagcggatagttgcgggtatgatctgcagggacgagtcgcttaacgcggatgcgaaagcgaaatcgatgaagtatttacttagtcgcaaaaaaacagagccacgttataacgcggctctgctactcctaacattattgcggaataagggattgtggcattcccctgggattaatagatttcctttttcagattatcccattcagcacgaactttatctttgaaagacattttcttgtccttctggcaagcctgaacgattgtcggggtgactttttcaatcccagaaacgttgagaaccgcatcctccggtttgtctttagaattcagcgcttccgcaacccccactgccgtaggctgaaaatcttcatttaccgccagaaaatcttcacaggtccaggaattaaccggcttcttgtggtcagctgcatgggcggcagaggttaaaaacagtgcgccgatggcactaaaaaccaatgatttaactttcatttattcatctccatcacgttatttaatttacaagaccgtacgttgacaacctgagccctccatcatttactggcaaagacaggcgatagccagttgcacaataaatggtatgaaatagcagacaggttatgataagcatgcagccgacagaccagctgattttatgaaggtcaaaatcagcacagcgtaataatagtgttattcaccattaaatggagccgtatctgttggcacaggctgcaagcaataataatatttataatcttaatagtacataaacaatttaaacaccaagtgtaaaataaagcaaaggtggcatagacagacaaaccctctcgatattctcatcattctaccgcgccatttattaatcgtttaggcttgatattaaataataaccgtccatcctcaataaaaccaggatgaatgcgttaaccgcagagcacaaacactgggataattccttcccgtaataacctttatccaaactgaaacagtctaagcatttatttcccgcacagcttgtgaaccctctgcacacaagcatggtaaacgccatcactggcaaggttccccgacatcgaaaacttcatggaagcgtcagggaaggatcgccaggccagtgattatttttaggatgattatatgcgtaacgtgacaatattcctgctgttcaccctggtttgtttaacctggggtaccacctggcttgccatgagagtcgccgtggaaaccatttctcccatattcgccacgggcatgcggtttatatttgcctccccgtttttaatttccattgcgctgcttaccaaaacccctttagtttttccagaaaagcaacgtatatttcagggtgtggtgtgtattttttattttgcgataccgttcactctgatgatttatggtgaaacgtacgtgagttcaggcctcgcctccgtaatattttcaaccatgccagtcgcggtactgatcgcatccattttctttctacacgaaaaaccaaagttattacaaatcttgggcctgcttatcgcgcttatctctttgtctggcattattcttcatgaggcaaagtcaaatgccggtagccagtggcagggaattgtggcgctggtagctgccgtgctcatccacgcggtgatctacacccagagtaagaaaagatgttgcaccgtttcagtgctcacttttaatgcccttccctgcttttttgccggtctcatccttaccgctgctggatattttctggaacatcctcaggtatccacattctcattgccctctgtgctgtccacgctgtatctgggagtgattggtggggttttcggcatcctgtgctactttttgctgcaaaaaaaatcaggcgctttccaggcctcactggtgtttttagtgtttccaatcattgccataagccttgaaaattatatttatggctatgcgatttccttgctttcgcaacttttaacgctgccgctcgccatagggatcttacttatccttgtgtctcagcgggttcgtcgctgaaacagccacgctgactgaaggcgcgggcagatcacctgccagcgccctctcctatgcatggccagatcgtgccttttatcgatgtttatcaattatcagaagcatcacccattatgtagacttgcttgatgcattacgggcgcgaaatccaggctatatgcagcatcatagacaggaggttatatggcagaagaaaagaaggggctcatatgaagcgcccggatacagaggtgcgggcctcccctgtgaccgggcgctatcgaagtcgtattgcaagaaaatagtgaccaccaataagtggtcactttttcgggatgaaagcgtccgctgtcgccccgatcttcaatatgcaaaaatatcaatagtccctagggaaaaataatgcacgcaactctatttccccaataattatctggatgagttttaccagcttaaattgctccctcaagaactttatctggttcaactgcgacctcaccgccactggttaatgacatatttaatccccccaaatcagagtgatgccttttttgaatgctcctctgaaagctttcgtatcagtgaaaaaaacttgactatcctgtgtaattacaactcccctggatgacgcttttattgccagtaaagctcaagtgttgcagtagctgatgctaaacccggatttgcatcggatttcggacaaagcacccagaataacggctcggaccaagaagaattattggtaatggtccgcagaggtttaggtgttccatccatcaaaatagaagtgtttttgttgacgcaacctgcttcggagcctgcattctctcccaggaagccacgtacgcttccaacagccgcaccgccagatttggctattaaaggtatactcgttttatcccctttttgacttttaggtgtgaatgagtatccaacagtcgttgatactggcaagcctcctgtgctgctgcagttaacagcaaaagtggattgttgactgatgccttttgcagcagtttcggcatctgacgtaacacttccaaaatcgactactgccggaacattcaaagtacaattaacagaagggaggttcaggtcaaaacttctggttacagcgctattcattccattagtcagcaaaccaaaatacgtttgatgtatataaaccgttttctgaaaaggagccgctgtcggactaacataaacaccatagcccatattaaattgcgctgtgccataatcatagttaattgcttgccagtcattattattaataggattattccctttaataaaagacttacaactccccctggcggctgaagatacagcatctccggatattattcccttttgatcccatgaaccatttgctatgcccgtcgccatcgtattgggaaccaacgcctgataatacatttgagaagtaccactgtgagtagctgcagataagcgaaagggggtacgaatagatccatatggaataagcagaactcccggcgaaacctcataacccgtataaccatcgatcgttaaataaggtaatgtgttattacagtaacgatcaggactgctcgcggccgaagcatatatgcttcctagcagtcctgatgaaagattttcattcataaatgcctggatattccaagcccatccggttggcggattacgagagtaattacctggctcagggataacgctggaagaaatgttggtaactgagggtgtctggattatctgataaccggaagacaggttcaccgcagaactcgttgatactcctgcccccccatatatagttaatacataaaaagcccattttagcaacttagtataataccgtggtattctcacttcagatctgcctatatttcggaaaagacgatatttagaacaaaaattatggtacttattgcaacatttaatctcgactggcttatctaaagtcgatatgtgaacaatacgtttagttatagcaactttattgagttcagacataataatcccaccacgaaaataaatagattatttagcatacaccggccatttcacctaaatatcaagtcacctttagcaaacactacaataataaattttgaaagtgatgctttataatctatagtgcattgacatactcaccctggttcactggcattgatatcctcaacgcaagaataccccataccatagaaaagcaatgtaaataaaaacactccctattgaatccattattttatcagtagccccactaatttacatcctttcaactaagaaaaactactgtttattcgtctgcttcacaaagctttcttcttttacggctggctcgtgcatctttatagtcacatcatgctcaaccggtgcggtatcttcctctgtctgagcactttcattaatatcctcagttctgggtctttcgttgctctgagatgttggggttgtcaaaatctcattcttagtggtcatatctgcagcctcaatatccgatgacggtgacgctgtcgtagcctgttcgctataaagcgtgtcagcttcaatcctcttcgtgccgttgattatcagtgcgtccggtgatgctacttcactcgccacgtccgtatcgatgacgctttttacgttagcttcgggttcaactgtctccggcgttggtttaacatcttcctccgttgctactgcagtttcagacgttacatctgtcgcaacactgacgtgatccttgccagctttatcctccactgaaatccctctttgctcactcataacagcaacaaccggcgtctcatccggcatgtcacccgatttagtatcagtttgttcatcctcattgtgagatccgagccgaaccggtggcacaatatgcggcgcggcagcagggttactgctcgccaccatcagtatctcgaagggactctgtttgcctcgttcattcaatacgctgagcaatctggcggcctctggatcaccctgcccggcggctttatccgcccagtaacgagacttctccagatcgcgatcgccccctagtccttcgctgtacatgaccgctaaattatattgggcaagcacatgcccctcattggctgcgcgttcaaaccattgccgggcttttacatcattcttctccagcggttcacccttgctgtacatcacgccaagcgtgtatttgtcttcaggcgaaccatcttgcccggcaagctcaaaccagaaagccgcacgaaccaggtctttggcagtcccaattccctggccgtagatcatgcccagattataacgggcgccgatatggccatgctctgccgctttttcaaaccaggtaagcgcttttttactatcacgcgccacaccatccccattgccgtacatcacgccgagattatattccgcatcggcataattttgtttaccggcctgttcgaaccacgaccgcgcttttttataatcacgggtgacaccactgccttcagcataaagaatgccaagttgggtttgggcagaggcgtccccgctctttgcctgggaaagcttcgctttaatgtcatcattatttggcgtagcccatgcgtgcgggctgatagcacccagtgccagaaaacagataacacttttcattttattcatatcgatctctcttgctgcgctgctgcctgaggccaggacataaagcattttcattaacggcaatcgccattcatttgaattaccggcatttgtgccgttggcttaaggccgttaagattaaaattcacccgacactgcttatcggcgcctttaccccacaccacggacaattcccctttcaccggcagaccagccatatacacctggccgttatcccccacgatgctggtcgcatcatcacgctccttgttattcaacagcgaaaccgtcgcaccaaagggcacaacgcccatcccgcccacgcgcgtcagggtcattaatacctggtaaccgatacgggtagcgaaatcggctttcaccactgcgcctttcgtcgggtaaacttcaacgttggttttcggcaggtccacattatccggcagggtgctgggatcgaggccgatgttgttgctggtataatcggaaaggtaaggcgcaacggcaaaaccctgccaatcggttacgccattgccgctggtaagacggacgccgcttgcttccggtgcactgaccagcgccattgaacttccaagcgttcgcgacagcgtcaggccttcagagtgcgcaattgcccctccggtaatattcatgttcattgaacgcgtatcatgggagtagccatagcccgcgttaatgctgcctttgcttccctgccagcccatattaaggttgctgttactggcctgattttgattgccccagttctgcatcatgctataagaaaaattcccgttactgccggaaataccggcctgattcagagtgcgcccggtgttatcatgcgaaatctgagatgtggcatagacgttttgcagcgctggcgaatagctgaaaatactaaaaggtatgttcaggctgaatgtaacctggcgattctctggccaactcccgttacctttcatgcgatcgatggtgtaataaagcccataactcactcctttaaagccaccgttgtacccggcagataaaccagtcagcgtcttagtggagccccagtattcatcgcgatgcgcacgaaggctgatggatcccagctcccccagttgctgagaaacctgagtctgaaaactactgcggcgacgatccggcgtataaaaaatatcttcatcgcgtctcgcataacccatcgtgttgtattcgctaaaggtataaaagttcttcgttgaatagcgcagcgccgtcagatcgattgacgtcccggtgctaaggagactttttgagtaacgcaaacgccacgatcctcccgtttcacgggattcaccatgaaatttggcggtggataacgtcgcgtccgcagacaccgcgccccagtcccccagcgagaccccgcttcccagggataatgcggtgtaatattccgataccagaccaccgccatacagcgtaatgttttttggtaacccatagattagggtgccgaggacaaaattttcctgacgcgaaccataggtgagcccgccatcgtaacgaccggcagtaacttcatatttgaacgtgccagggcgtaacatcaccggcagggttgaatagggcaccacaaagctgcgaacactgccgtccgcttcggtgatcgtgacctccaggtcgcccgacattcctgcctgataaaggtccttaatttcaaacggaccgggtgcgacataggtttcgtacaccacatagccattctggcggatggtgacacgggcattgctgttcgcaatcccggtaatttgtggcgcaaatccacgtaaacgagcaggcagcatctgctcactggactggagctgcacgccccggaatggtacaccatccagaacttcgctgccggtactggattcaccgatagttaaatgcgatcgccatgcgcgaatatcacgcatcagatacgtattagaaaaacgcgtatcatcggtatgtctgctctggccgttacgcccaccattttgatctgaatagttgtgggtgatggtgctgcgaagacgccatgctcccaaattcgccccggtttgtacgttggcaaataggttattcatatggcgagagtcgttattgatattctgttcggtacgtccggcgctcaggctgtagttgaacagtaatgccggtattccgtcgtcccacagttcagggtccatacggctatttttgcccggctgcattgccacctgcggaatgctgatatccagacgcagacgcgcaatatcaagcttgaccgatgactgggggatgagttcggcaagatccttcaccggtttatctttcggcaaatctttaaaggccggtaaatggtcaacattcacccccaaatcattgagcaatgcaggcgtcagctctgcgaccactttaccctgcgcgttcttacggaaagggatcgtacgcgacatcgccatacgctggttaataaagatattgaccaggtaatcgccttccaccacgcctccgggattagcaaaggcagaaaggtcgacatcgctggttcctgtaccaagcgcaagcaactctggatcaaaatagtccgtcgcccacgcgctgttgcagctcatgaagacacagagagagatcgttttcagtgggaaagtgtcaatcctggcaaccctggcgttgcttcctttccgggatgtcttttttttaatcacaatcgttgcctgctttttatctggcgttaacggacggttcttcatggtgttacagagcctggtgctgaagcggtgtgggacggtgttcctcatccagcacctgccactccaccggcccgctcatacccttgacaaggtcataacgttgttgaccataaggaggaaccagcttgcgcaagccatccgctgagatcggcttgcctcccaccgtgacctggctgaaattgatgtaaaatggcgtcgggttatcgaccaccaggctctctccctggcggctgaatcgcagctgcgcggcggctttctttactccccccgcaggtaacccttcagggcgataaaacagcttgatattgttcactacggccaccaccagcttcccgttactagcgctgtcgctatcggttaccgccgggattgcttttaccgacaggtaaaacacggattcacgatctttcggcagggacaattccgtgaggcgaatacgcaatgtcatcccttccccagcgtccactcgctttaacggcggtgtcaccagaaaagggattttggcgctggaagcactactctctgtttcaggcatcggcaggccggtagtaaagtccaccggacgtatccaggactggatcagccaggcacggtcggtgttattcgtcagcgaccaggtaacgcctttggtgtccgcgcccggatagataatccggaactgactcagcgaaataccggacgactccggtgccacagcaaagcaggatggcgtacaggacaatgcagcaatcaatacggctgacgtcagaggtaaacgcattaatttctgcctccctgcacagcagactgatacaacttgctgctaccgccgtaatcattaatgacggaccactgagcctggcgtaccattcccttcgccggatatgtcgcctgcgaaaaaggcgcaatcattgatacgccttcacgcacattcacatccgtgccatcaaaagccagtcgcgaaaacgtcaggtaatagggagtggggttatttacctgaatttttccgttctgctgctgaaaggttaatttgccgcccgcttcttccgcagtcatagccagtccgacagggcgataaaatagcttgatagtattttgtatgccgactgaaagacgcgcagacattgttgcgtcatgtccctgattcggtttatcggtcgccggtacagcaatagcggtaaaatagaaaacggattcacgatcggccggtaatgccgcatcaccacggcgtaaaatacgaattgcgctctggctgtcggcttcaagccggaacagcggtggtgtactaataaacggcgcaagctcacggctatccggtgcggtgataatcgctgactgaaccagataagggcgcggcccattatttttcatagacagcgtttgtgctttatccgcagaggtaaaaataatgcgcgtacggctaagactgatcccaccatcagcggcatatacgtgctgaacagcagctatcaataatccactcaccagaagagtgcgctgcaagagacggaaaagttgatgcacttaagcactccttactgataagcaaaagtaaaggtaacgctggcattcagggaaccaggcctggtggttgcgtcattacatttagtgccacaggagagcgtggcggtgagtgggatcgtgtcgctgccaccatcaaaatttgtcgacgtcagagaggccggtaaaaaagtgttattttgtaccaccgcttttgatgcattcttaataagaacgccataattcaccgactgagatgtcgctgagcgaaacagaaagtcacccgacacagcagaacccgcgccggtcactttaattccgggtttttgagtcgtcccaataaagccggaacattgtgaaagcgtgacgtccagcgataattcctggcttagaccttgtttaatctcggaggaaactaccgatccaaaatccagagtagcaggggctgaaacttcacaggtcggtgcctgaaatgtggcggtaaaggtaatatccacggccctggcgctggtcgcgaatgtcaacagacccaggcaaagtgccactctcgagacaacaccatgctttaaaaatccataatattttttcattgtgttatgccatgaaagcgttacggaaagacaaaggcgaaattgattttggcgttaaccgtcccgttaccaatcggcggatcccctgccccatgaaccagccctacggtaaaatgctgaacagaatcaccatcatctttatcgatagcaatcacatcgccgggggcgaccgtattaggcgcgttatagaaatcgcccagatcggtgacggttccctgcttcaacataaagcctgcataattagccgttgaactggccgacctaaaaagccgttggtcgctaacgcctgacgaatcgccgctcactttgaacgtgggcgctaagccgctcatacccgagcaactcaaattcacgtcaagtggttgcacctctgccgttccagtcgcaaattgctgggagccttttgtcgcaaaaacaatttcggtagtactgaaagagatatgacaaattccgtcgataatatcggccgtgatctctgtagttgccgcccgggctggattcacagccagagcgatacataagagtgcaaggcctggtatgtatcttttatttaatgaccccattaaatgtttctcctgcaccaaaatcattaatcgcagtccattttgtaattccctgccctgcagctaccggatacgtattcgcagagaaaggggcaatcatgctcgtccctttaattacatcgagtttgacagaacgaccgttaaccacgagattcctcagcgatatgtaatagggagtcgggttaaaaacttttactgaattgccagcacgtgtaaattctaatttgcccatagcttccttctgcgtcataggcaaattatccggacgataaaaaagcttgacggtgttacccgttgcaacctgaagggtaccgccaagagaattccccgcatcagcctcgccaactttacctgtcggaatagccataacgttaaaataaaacaaggactcgcggtcgcttggcaggttatacgcctttttcaggatccgaacggtattcctggaatcaggctcgatacgaaaaagcgccggcgttggaagaaacgcagtattggcggttttggcattgagcgtatccgaaatgccgacattaataagataggtttggctggttgaactgttattaatgtcgacactctgactactgtttttctcatgaaagataatccgtgaggtaccaatgcttatccctgccagcacgggctgaacacataagatacccaaggtaaaaagcatgcctagtttttgatataatttcatgatatttgcaatcccaaaaatgaaaagagagaacggagaggaactctcttttcaaagagtaaattaattagttagtaacgtaagaaatcttgatcggcgcgttatattcgcccggaacaatatcagcgatatccattacggtcatacctgcattgaaggtataagtcaggttaccatctgcatcagccgtaaccggtacagcctcgttgtttttaatctgcgtcgtaccatcttccgcagtcagcataaagccagcagattcgccggtattgctcatgaaaatttcgctgtcagcaccaacaataccggttacctgcaggccgccctgttcatcagcatcacactgagtcagagaaacctgcagcgactcctgaccaacctgctttttagcagtgttaaatgcggttttaccaaaagaacccacattcagctctgccgcaccgttgttaacagtgatttcacaggtagtatcaacaatggtaccgcgcagcattacatcaccttgagtggcagcttgtacattgctagccagtcccaggattaatgcaacaggtgcgagggtgataatttttttcatagccaagtccttcattaaataaagattacaattaaattcctgcgcagcctaccgtggctgacaatgcctatcttaaagattaagttaaattaataaatgagagcgagattatttcatcgagagtaatttcctacattcgtaggatgacgcccacaaatcgtgtcatttttaataaatacagcctcggcaactaacaaaatactacactcaagcctttaagtaacgccccaatgtctcagcagttgtatgaacctttctttcgcccaaggttcttttacaaatttaagtcattaatactcctgacattaggcctgccggattaatactacttgtgtaggaaacgccctacattaaaatcaccacaatcttaaaaaaaactttcgcgcttgcattttagataagaggcctctattttttacgaaatcgtgcggcctttaataaaagtttgttatttacccaatacacagcccgcattgactgaccaacaccagggggaatttcaatgatgagtatatatgtcagccttttaaattaaaattttgacttaagtcacactaaatgtatctggtttattcaaaaggatgagataacgaagttatgaccaccaatgctaatcccccactgaaatatttccgatatacaagcccttgcgctcagcaaggttaatgaagtttactacgctaccgcgttgtttgtatgcgttgaaagtcgcgcttgtctattttgggaaaagtaacagtgagttggtaaacgcacatacccccttgcgccgaccagggaataacatcagtaaaaagtagcataccaggaagttacataggatccggctaatcatataaagcaataattcaggccgtaccatgataacacttgcttcgatcacctacaaaaggatctcgaaatgaacagaagtacccccaaaatgagtgcagtcattattgacgatcatccgtttgcacgtttagcactaagaaccatcctggagaaccaaaatatagtggtaacgggtgaagctgcagatgattttcatgccatccagctggttgatcggttgcaacccgatatcgttatcgtggatgccattctgattgggtcgagtggaatcgatgtggtgacaaaacttcgccaaaatcactacgctggcagtattgtcatggtgtccggaaaaaaccaaattttttaccgaaaatgcagtgtcgatgccggcgccaatgcctttatcagtaaaaaagaatcaatggataacatcgttgctgctattcaggctgtacaacgtggttattattactttcctttgccatcgcataaccttactcctgctgaaaataaaatactttcattatcggaacaggaacttaagataatgagacacatccttaatggcgcacaaaatcaaaatattgctgttgagatgaatatcaaccaaaaaacagtaagcacttataaaagacgtcttatggtaaagctcaattgtaagacacttaaagatttattcgtcttttcaaacattaacaatatcggttgaaaaatgatatctcgaattattattgcgctggcgatgatattgctgatcggccaaacaacagccgctacgactgaaccaatcacgctgaaactgaccagcaaagcgcacagctttatctctaagcttccattaagtcaggaggatctctcgtggcttgccgataaacgtaccatgacgattgccgtctatggcgaagaaaatccaccttttgccatgaatagtattaacggctgttatcgagggatcaatgcagattatttgcaattgctgaaagacgctttgcacgttaatcttgtgcttcactattatgatgatgaatctcaggcgcttggtgccctgaagaacgctgaagtcgatctggtactgacctcagataacacctccgttccagtcaccaccccgtttattatcagccagctattattccagacctatccggcattagtgacacgcaattcgaacggaattatgccattttaccagctcgataaaacggtgaacgtggcagtaagccaacatcatccatcggaaaacttcattaaatcaatattcagacatgccaatattgtctcctatgacagtaattatcaggcattggcatctgttgctaacagagaaaatgagtatttcattggtgataatattgccagcaattttcttatagctcgggatttttatcaaaatctagatgttgttaaatactggcgctcaccgttaacgggtagttattttatcgcacgagaggatcaatccaggctcgtcgcgataatcaataaatttatttcagcattagatgcatcgacacataccaggatctcccatacatgggtggatgatggtaacctcacatttttaactaaaccgctatctttaacgccaaaagaaaagcgttggatagaaaaaaacccagtcctcaggactctggtcaatccttattatgcgcctttcaccgtactggatgaaaaccgggaaattcgtgggttagtaggggatattcttaatcttgttcaattacagaccgggctgcattttcaacccgttatcgcaaaatccaacagtgatatggcagagattatgcgtaaaggtgactgggatatagtacctacagtgacctatagcccggaacgtgaagatgaaatggcctttacgcagccttttttttcaacaccttatgttgtggtgaccagcaatgaaaataagcaaaaggatattttcaaagccggttcaacgatcgccatacctgcttattattccttacgggaaaagctgattcagaagtatcccgacgtccattgggtcgtcgttgaaaataccagtaccgctctgagtagtctcaatcttggtaaagtggatagcgtggtgaccacccaactggcggctcgatatatcatcgatcattactacccagaaaccatgagctatcaacggatccccgatcagccttccgcacagatcgctttcgctgtacctcgtgataaacccgagctacaaagcatcctgaacaaagcgttggccgaaattccacctaaggagatgctaaacctggcaggcaaatggataaaaatgcctgaggtaaaaatcgatacctgggatctctatagtcgtcctttttatattttgacgattagcgcggtattgctcattttgagcagtttactctggggtggttatttactgcgcgccattcggcgggaaaaggcctcgcaggcagcgctggaataccagctgagcttacgtcagaccttatcgaattcgatacctgtccctgtctatattacgacgccggaaggagaaattgaaagttacaaccgtgccttcaacgcgttttttacaccacaacaaagagaggctatacattattccctttttgatcgccgaagcccgcttgtacatatctttccgattattcagcaggaaatgcagcaaggattggctccggatacggtggcgtcacatcagtttacactcaacaacggtgccgaagaccgtaccattctgcactggatgacattgtgcccgctgccagtgccattaccacccgtgctgatttgcggctggcaggacataactgaatcccgcaaacttatggaagcgctgcaggtcgaaaaggacaaagccattgaggctagccgggcaaaaagtagatttttggccaaaatgagccatgaaatacgtactccggtcagcgcaattatgggctttctggaactactggcaaccgggccgcaaagtgaacgagaagcacaggaatcacttcagctggcttatgccacggcgcaatcgttgataggactgatcggcgatgtgctggatatggaaaaaatagaatctggcaattttgaactgacaccggaatgggttgacatagaggcattaacccaagccacgatggccaattttgctggccttgcacgccaaaaaaacctgcatttaacggtaagttatcaattgaatgctggaggcatactgtggctggatccgcaggccattaagcaagtgctcgccaatttcttaagcaacgcgatcaaatttacggttagcggtggtgtagaaattaaggtcgaaacacaacctcgtgaaaatgatggagctcagctgatgctcagcgtcaaagatagtggcgtagggatcagcgaagaagaacagcaactgctgttcaaacctttcagtcaggccagctgtggtaagaagcaaatgggctctggtctcgggttaaccatctgtaaggaactgatggatcgcatgcatggcgccatttcagtggccagccaccctggcacgggcacaacaatgagcatatatgttcagactcaagtttctgagcgagcccctacagatttaaataaacaggaaatgacccttcctgtatcatcagggctacgggtcatcattgctgatgataatcctaccaaccggctattactgcgtcgccagttagatattcttggctattatgtggatgatgccgaagatggtgaacaggcattcagtttgattaaacaacgacagtacgatctgctgataacggatctcaatatgccgggaatggatgggcttacgctcacccagcaggtaagaaagattaaccccacactcgttatttggggtttaacagctaatgctcaacctgacgaaaaagtacgttgtttggccagcggtatggatctatgcctgattaaacccgttaatttgccgcaactcgctgccgcttttaacaacataacgaagcgtctggaaaaatcaattctttctggaatatcggcgtcattaaacacaccatatgatacgacagcctttaatgagcttatcgatatgcgggtactacgggataacgcaatggatgatacagcattcatgcttgaattaattaaacaggcataccatgagaatatcaacgatctggcggcgcttaaaaaagcaatgtccagtggtgaacgggatatcgttcaatatcatttacatcgtcttaatggtacagcacagttaatcggcgcaatttctttacaccatcttgcagataaattagaaaatgcgctggcaacagggcaaccgctttctctgatcgagcaggatatacaattgcttgaacaacaattgattgcattaggaaagataaccgctgatttttttcagcagaaatagacttatcttcacaaaataaaggcaatcggtagctctataaacaatttacaggttagttatccttacgggatatatgtaaatggatactctggttccctatacaacggcgattggtatttgccatcccactggctgcgggcggactatttgtggaacacaaacacccccgcgttgttcctttgaattaaaaagataaaatagtgataaataaaatacagcgacctgtaatcaacttaaaaatatcacccattgcgctcacacttgccatgctctttccatggatgataagtgtcattatgcaggagccgggatccgggagtattgcctcttttggtgcctatatgatgatgatttctttttcagtattgcctgcacggaattcactcctgcaggtattcactgcggccgcaataatgatctttttcgcggtgctgggtctcagtgccccaagcggctcaatttattttttcctgttcaccatcctggctgccctggcgcaaggcatggctgaacttcgtggagggaatctacgcctgccggtctcactggcagctcttgttttttttctggcgcacggacaatcatcctcagaaaagttaagtcagtacattttttccttcggtctgggttgcctgtgggctattccctttattctgctctttatccccaaaaagcccctctcaccagctctcactcccctttacccattgaagtcaccgaaacaacgctggtttctattaggcattaccctcaccgcgttgttaggaagtgcggccgtgtcgcttattccattggcacatgcatgctggatccccgcagcctcgctgcgggtgattaaacctgcatgggaggaaacgcgatatcgcatacataccagaagcatgggaacaatactgggagccattgccggaagcataatcctggcatgttatccttaccccttgtttcacttaaccattgttggcgggatgttcctgttaatgttacagtttggggccaaaaattacttccgctggtcattttgtctgaccacaattgctttagccttcaatcctgccgtcggcaacgatatattttcattggctcaggaacgagtgcttttcactatcgagggaatttcgatcgcattcattatgatgaagatgttgtcgtacaaacggtcatagccttgtggttcgaaaccggtgaacgcttcagccacccttaaacaatatccagaccattgttgaagtggggacggtagtattccatcttcattcaccttgttggataagaaaacatatcaccctttatctctctaagtgccagattacgctctcagtacaggatatattcatcgggtttggcgagtggctgctcgaataccagaaatcaatcggcagccagacgttatgatacgcgacttcaaactacactatgcttacactaaataacaaccgctgtttaatcccctttcaactcgtcacagcgagttgtcatctgcgatcctaaaaaatgaaactcctatgctccttatgcagttatcttttactcagcataaccggaaagagcaatttgcatggcattcatttcagttagtggcatacgattgcattacctttctatacaagcagtcattgctattaccggctgacacttttcgccatgaacaataaacacaaccgccaggctatattattggtgaacttatcacaatatataaccctaaccactaaggagtaatcactaaatataagcatatgattcccacatagctattcataaatataggcgttatcaattttaaatgtattggcaaacccaataagttccaccagcgtttgacaatttagctttttcatcagacgacttttataagtagaaacagttttcgagcttatatccattttggtggctatatgtgaattactatcccccacgagtaaatatcgcaatactatagtttcctgctcggataaggcttgtagcttattcctggcaaacgtttcctccccggaagcattatgttgcgaaaacggaaaataagaataaccatcctgcgcagccagaacagcggaaggaattacattcatcgatccttttttactcacaaaaccattgcctccagcattggcagcacatcgggaataaaaatactcgtatttattcgaggtcacaatgatgcttcctttatactgacgcttacggaacgtctctaccagttcaatcccgtcaatatctggcagatcgacatcgataataatcgcatttggcctcaattggtcaacaaggctaagagcatcaataccgcttatcgtctcgccagtaacggccactccttttttctccagaatggattttatggctatagattcgagaggataacgattaatcaggaccacgctgatatttctctcttcggttagagttccatcatttaaatctggcatttatcttgaacacctctttcgctgatggcctttttttgatcttcatacaaacgaactaaaaaataattcatccgccgataaacagacgattcatttaaaaagtaagttgtctgcgtcacacaatattccaacattttcttactcgcattgattgcataaaattaaattaatcaaaaaaagaaagccgaactttcatttctgatcacataaaaaaactcaattaatttgtattagaaatatcctctttgctaaaacctgacactcaaacaactcacacttcatacgatcattttgttcaaaccaataataataaataaaattaacgaatagaggaaaagcgaggtaacatactgaattttttagttatttcttgatcagagaaaaacactcgcagctaaaaccatcgcaggaaaacaaaagtgttgtttatcatagacctgaagatattcattattgcaaaatcgttttgtctataggaaataggttgcttcttcaagccagggaagagcatttagccccataaaacattagaaaagtaaaacattgttcgagagaatagaaatagtttataccgattgaagacaaaaaacaacatagacaaaaactatcaaaattgtttttaacaacattaaaatttttaaggtttgcttaataaaatgactaaaataaaataaccaactgattataataatttttatcacaaaaaaacaaaacgtattaattcaaaataattaatcacacacagcaactataaccaataggtattttttggttatgattatttgatcacataaattcagctgcacaacaactatacataagaacagctaatccatatccaggattaaacatgagcatctattgtttcaagttgttccattaacctactgattttacaagaaagtcataaactccaccttgtagaaccgactgcgcttgatattgacataaagattactcacaacataaccactcattctatgagtattttttcttagaagagatcatcgtcgtagcaccaggcacggtaaccctatgcctgttttttctgcctatttcagcttcacgcattcaaccgttgacgatcactatactgacaccaatccttcacgaagattacggattgaatctgcgaccggcatgcatcccctgttgcaggttcatttgtaatgattgtggtaaggtgcgcttggcgatgttccagcgtattaaggaggctatttgcaacatgcccgaggtaatgatgttgcatggtgcctatcgaaattcgttagtctgagattgcagaattgctcccgattattcgccaggcccattataaaaaatcaaggaaaagctatgtaccttaaaaaattagtaaaccaaagcttagtagtcttcacccttattttacctgtcacaagtattgcaatagcaaagacggggacagtggtgacgaaaatgccactggatcccgcgcatgggcttttagaggcgaagagtcagtaccggattgagtatacggctgtggatggtgtacggggcaaaggagagcgtacggacagtgcggcagtgtttattccctttggcccagagccagagggcggttggccggtaatcgtttggacacatggcacagtaggaataaactcggactgcgcaccgtcactgaatacacgcacggcacgagacagccaatatcttaatacatggctttctttggggtacgcggttgtggctcctgactatcccggattaggctcagacgggatgcaccactatcttaacgcacaaggtgagggctggagcgtgcttgacggtatacgtgctgcgctcactgaatttccgcttaaaaacgaactggtactggttggccagtctcagggggcacacgccgcctttgctgcagcaggctatcagcccacctacgcaccagagctgaatatcatcgggaccgtgctaactggcaccccctatttttctgcagagagcgatgttgccagcttattcaccaaaagtgatgataaaaatcagtcatctggcgatcctaaaataccgtatattttttatatatggcaatcggctgcggatactaaccctacgctgaaggcggagaattacttccagaacgctgccttagcacagttggatgaggcaaaagccctctgtatcaccccgttaacgcaaaacgtgatgcataaccgcctgaatatgaacaatagtctgacacctaatatccagtcactgctgactaatgcgctcccttcactttcttatccgacgctgaaaatcacgcatccggtatttattggcattggtggagacgacattaatgtaccaacagctatgcaacagcagtttgccaaagacgtgcaggcggcaggtacgcatactaatattcatctctaccccggacttgaccacagcggcgcggtaaatccttctctacgcgattccgtaccgtttgtcctaggattgaaagataaaccctgatccacagggcattcctggaatatttaagctaaaggaaggggcttatcatgctacgcagtagcgtacatcgtgagcagtagatagttgaatctaccattctgcctggtcgtaaggtgtggacagtagactcaccatgaaagcgctggaaatggcatggcaaacgtgcggtaagcccgtcggggtgatgttccacagtaatcagggcagtcattatacgagcaggcagttccggcagttactgtggcgataccggatcaagcagagtatgagtcggcgcggaaactgctgggataacagtcctatggagcgcttcttcgggcgggtcaaaaatgaaatgttctacggcagaaaatgggcagacataacactggaaaaatttatctgccttctggacagttaaatacgctggtataacgataagcgaattaaggtatcagtaggtgcaatgagtccgatgaagtaccggcaacatcttgggctaaatacataaccagtccaggaaaacatccgcatccccgagacgaacatctcaatttagctactacacttaatttatttcatcttaaatatcaatgaactgcatcattaacttaagttgatgttatagcaatcgctatacaggctccttagtcatgactgacctggccacaccgcatatcgcaagaatttgctctctcagccagcggtgaccggggtcgcgttccattcttgggtgccacatctgcgataccgtaatacgacggcttttgaacggcagctcgaaaaggtgtacctggtccgttacctgctgattgagtaaatagagtgcgggtatcatggcgataagatccgattccagcgccacggaaagtgctgtcggaaatcccggtacgacgctcgcaattttacgttttgtccccagttcggccagcgcatcgtcaacggatccgtgcaacgcgccctcgggtgacgctaccacatggccccaggcgacataatcactcacgcctatttcagcctgcttagccagcgggtgccctttacggacgacgccaacaaaccgatcctcaaacagtcgttgcagccgtatttctggccccatattactctgaacgccaatctccagatcaaccagcccttcccgaagatagcgcgacgttttttccggcttaggcgcgaagcgtatacagacgtccggcgctgcgtcggcaaccgctgctataagcgcaggcccaaacgccaccacaaaaccatcgtttgccctgatggtaaaaagacgcgccagattttgcgcgctgaacgtttcagttgagggctgtaataccgccctggcatcgtgcactgcacgcctggcgcgatcccgggtcgcttcggcccacggggtcagtaccatgttacgcccggcgcgtaccaggatcgggtctcctgtgacatcgcgtaacctgcttaatgtccggctcatggccgaagtgctgaggttcagacgacgagccgcacctgcgacactcgcttcactcagcagtacgtcgagagctaccagcaaattaaaatcgggatcagacattacccttcctcccagcacattaagataaggcgtttgatgcaacaataaagtgaaaatagtgcgccttccgcctggtaaaagccatctttatagttttgtcatccatacactcttctcagaggacaaatgatgacgctcttttccagtcaacccggcgacgaaggactgcctggcccggcgcgcgcacgggtgatggccgcaataatgaccaccaccttaatgggcgtgtttgatggcaccatgatcaacattgccctgccctccatggctcaggagatgcaggtacctgccagtattgccgtctggttcgccaacgggtatctgctggcagctgcgatgacgctggcgatattcgcggcgcttgcggcccgtctgggttatcgccccgtatttctggcgggcctgacgacctttaccctgacatcactgggttgtgcgctggcgaataagcccgaagtgcttatcggtatgcgcgtgcttcaggggatcggcggcgcggcgacgctgagtattgcccccgcaatactcaggtccgtatttcccggacgcttacttggccgcattctggggttccatgccctgctcattgcctcgagctccgctatcggcccggtattgggcggtacgatccttcacacccttagctggcaatggctgtttgcgataaacgttcttcccggcaccctcgccctactgctggcggtcagagcgctgccgcgggatgcgatccgtatgcaggcgcccttcgccaccgtgggcgccatattgtcggcgctgctgttgggttcgacgatcatggcggcgaacagcctacagaacgctacttctcaattcggcagcctttgctggatggctctcgctgcgctgagcggcatggcttttatctggcaaatccgccgcacgggtcatcccttactgccgccgagtatgtttaaaaatgaacgttttaccctcgcggccttcacgtcgatggttgctttcgtcagccaggggatcacctttattgcgctacccttcctgtttcagagcgaatacggctacagtccggtagtgtctgccctgctgtttacgccgtggccattagggatcgtgctgattgcgccgcatgcaggccgttgggcggacacgatatcagccccggcgatatccaccctggggctggtggtatttgtcgtcggtttgatcctgctggcgacattacccgccagcccttcaatgtgggatatctgcctgcgaagtctggtatgcggaatagggtttggctgctttcagagtcccaataaccgggaaatgctctcaaacgttattcgtgagcacgcgagttatgcgtccggtgttttatccattatgcgcactttcgggcagtgcctgggagccgccgccgtagccgttctgctggcagcagatgaaaggtcaattcatgttgcgctgtggagcgccgccgcggcctctgcggtatcggtcgtcgtcagcgcgagccggtggcgtaaaatcactcatcctgcggaaacaggataagcgcaaaaatatcactaaacgctacgactccagcgccagcagcgcaaaacgccgatcccgcaaccaaagcggagtcttccgtcggagttcaatagactaacagaatgctataaccgctgatttatcaagggaaaattgagtttggtagacttcaggagacttgaatttggagcgggcgaagggaatcgaaccctcgtatagagcttgggaagctctcgttctaccattgaactacgcccgcgaagaggtgcgagaagcattatagcccttacgcaccctgtgacaagcctgccggatgctgactggcgataaaataaccttttagcacttaggtttacttccctgcggcggcaggtaacgcagcggatcgatggctgtcgcccggtagcggatctggaaatgcagccgcactgagtcggcatccgtactgcccatggtggcaatttgctggccggccttcacgctctggccattattcaccattagcttatcgttgtgggcataggcggtgatgtaatcctcgctgtgcttaatcatgatcaagttgccatagccgcgcagctgattgccgacgtagaccaccttgcccgccccggcggcatacaccggctggccgcgggttccggcgatatcaatacctttattgccgccatcggcggtggaataaggcaggaccactttgccgctggtcggccagcgccagcagcgctgtcccaccggcggccaggaggactgaggtaccgcggacgaaggcgtgaccgccgcggtgcgcgtagaggaagattttttcttcgttgtcttcgttgaactgctgccgttaagcttcagcttctgccccacctcaatggtgtaaggcggggagatgttattcaggcgggccagatcgcgaacgctggtgccggtggtgcgggagatgccgtacagggtatcgccgcgtttaacggtgtaggtgccaccggaatcggaggtgctggagcagccggccagcaccaggcttgcagccagcatcagtgtcatataaaagcgtttcatcatcaggcatcctgcacttaacacaaccacttacctcgcaatcagggcgaatatcataccagtccgtgcaacaatccccaatgctctacgctttttctctgatctctactccctcggcgcggtaaaaggataacccccggcgataatatccatcagcgccggcagatacggcatcgacggcaatttcaccagagccggataaaatatttgcggtgaggggaagacatcaaccacatagcaatgaggaagtttttcggcattcacttccgaagatggcagcaatgtcgccgcttccagcccgtcctccagccagtcgaggatcactccgggctgggtaatatgcataatcaccttcgcgctaacgccggatttacggaacaggtccattaacatttcataggtgccggaatctttcgcccggtgcagcagcaccagcggcatctccgccagagcattgtagtcataggggttggaaggcggttgcgacaggcattttttattaatgaccgctaccagtttaatggggtcgaaggggatataatcgaagccttctccgcggtagggtcgctgtattaatgccagatcgatagcgccttcatttaataatgtttccagatgacttgagtcagtcaccgagatatttatcgcggtttcaggattgcgccgatagagctccattaataaaggctgaaaataattctggtacagatgagttaagccaatacgtacttccacgcgggtcttttgcgcaatatcggccgtctcccgagcggtatcctccacctggcgtaaaatttcacagcctttccgatataagaaataccccgcttccgtcggttcaatgcggttgccgcggcgctcgaaaagtgaaacctgcagctcttcttcaagctcctgaatccgcttgctgagcggtggttgcgccatattgagcgacttcgctgcctgactcaccgaaccgtgttccactacccggcaaaaatagcgtaagcgtttaagatccatgaccggcctcattaattatcttccgggcagtatcacactaacgctgagaaataaaaagccgcgtcgaattcaccatattgattaattgtttattaacatttttttaaaaccaacttttttgatctactgaccatccggtaaacggtatttgtttaatttatcgaagaaaaatattgtgcgcttagcaaaattgctttttaaaggaacactcatggcaaattcagataaaaaaacgccgtcaccggtgcatgatttacgttcggctctggcactgttaaaaacgctgccgggcgaatatgttgagaccgataccgaagtcgatcctcacgccgagctctcaggcgtataccgctacgtgggcgccggcggcacctgccagcgcccaacgcgcaagaacggcccggtcatggtctttaacaaaattaaggggttcgacgatatcagcgtggccatcggtctgaacggctcgcgccagcgcgttagccagttcctgcagtgtgaaccggcaaaactgggtcatttgctgaaagattccgttgaaaatgctattagcccaaccatggtacagggcacggcggtatgccaggaagtggttcacctcgccagcgatgctgattttgatctgcgtaaactgctgcctgcgccaactaacaccgaagaagatgccggtccgtatatcactatgggcctgtgctacgcctccgacccgcaaacccatgaatccgatatcactattcatcgcctgtgtgtccagagccgcgatgagctatcaatgtggctgacgccgggtcgtcatatcgatgccttccgcatgaaggcggaagcggcgggccagccgctgcctatttcgatcagtatcggcgtcgatccggctatcgaaatcgccgcctgctttgagccaccgaccaccccgctgggtttcaacgagctaagcattgccggcgcgctgcgtggccgcgcggtggagatggtgcaatgtaagactattaatgaaaaagccattgcccacgccgaaatcgttatcgaaggcgaactggtgccgaacgtgcgcgtacgcgaagatcagaacacccataccggccgcgcaatgccggagttcccgggctataccggtgaagcgaaagaggcgattccggttattaaagtcaaagccgtcacccatcgtactcagcctatctggcgcaccaccgtcggaccaggcgaagaacatgtcaacatggccgggatcccgaccgaagcgagtattctcgatatggtggagcgcgccatgccgggcaaattactcaacgtcttcgcccactcggcaggcggcggcaaactactggcggtactgcaatttaagaaatcttcccctgccgatgaaggccgccagcgccaggcggcgctcctggcgttctccgctttcccggagctgaagcacgtcattttggtggatgaggatgttgatattttcgatagcgacgatgtgctgtgggcgatgcaaacccgctaccagggtgatgtcgataccgtaatgatcccgggtgtgcgctgtcatccgctcgacccgtcgcaggtgccagagtacagcccgagcgtgctgcagcagggaatgtcgtgcaaaaccattttcgactgcaccgtaccgttccatctgaaacacaactttgagcgctctaagttcaaagcggttgatgtaaaacgtttcctgccggacttcgaataagggcgaataccatgacaccacgcatcatcattgggattagcggcgcttccgggttccagtacggcgtgaaagcgctggaacttttgcggccactggcgatagaggttcatctggtggtctccaaaggtgcggaaaaaacctgcgagctggaaacggattaccgcttagatgaagtgatggcgctggctgacgtggtacatcccatcaaccatctgggcgcgtccatctccagcggctcgtttaaaacgctggggatgttggttgccccctgctcgatgcgatcattgggcgctatcgcccactgtctcaccgataatctgcttacccgcgcggcggacgtagtgctaaaggaacgccgtcggctggtactgctggcgcgcgagacgccgcttaatctcggccatatacgtaatatggcggcagttaccgagatgggcggcatcatctttccgccggtgcctgcactctatcagcgtccgcaaagcgcagatgacattattacccatagcgtaaaccgcgcgcttgacctgtttgacctggaggtcaataacatcccgcgctggggtgagggcgagctgctttacacgtaacaggaactcgcaatgttaattggtccgtatgtaaatggttccgccgtgattatcggcggattgatcggcgcaatggccggaggaaaacttccggaacgcgtcaaaacagccctgccgatgacctttggtctctgctccgtcggcctgggtatcaccctggtactgaaggtgaaatatatgccggcggtagtgctggcgatggtactcggcgccttcctcggcgaactgctgcatctggaaaaacgcatcggcagcgcggcgggatcaacgcgcgggttgattaataaagttcttccacccgttcagggattaggtcatgaagagttcaccgaaaaattcgtggctattttggtcctgttttgcgccagcggtaccggtatttttggtgccatgaccgaaggtatgagcggcgatccatcaatcctgtacattaaaaccatcctcgatctttttaccgccgggatcttcgcgacgctgctgggctacgcggtgatgaccatcgctatcccgcagatcgtgattcaggtggcgctggcgatgctagcggtgtttattctgccgatgatcacgccgtcaatgatggcggatttctcctgcgccggtggattgctgatggtggccactggattacgcatctgcaacattaagcttttcccggtcgccaacatgctgccagggcttgttttggtaatgcctttctcccatttatgggctaccctagtggcctgagtacatgacccggcgggtttgtgccgggtcattttttattttcaggagtcgtcatggccggggaacacgtcattttgctggatgagcaggatcagcctgccggtatgctggagaagtatgccgcccatacgtttgatacccctttacatctcgcgttttcctgctggctgtttaaccagcagggtcagttactggtcactcgccgttcgttgggcaaaaaagcctggcccggggtatggaccaactcggtctgcggacacccccagcagggcgagaccttcgagcaggccgtcacgcgccgctgtcgcttcgaactcggtgtggagatctctgatatcgcgccggttcacccggccttccgctaccgggcggtcgccccaaacggtatcgttgagaacgaagtgtgcccggtatatgccgcgcgcgtggtaagcgaagtgcagcctaacgacgatgaagtcatggactatcagtgggttgacctggcaaccatgttaagcgcgctggccgccacgccgtgggcgttcagcccgtggatggtgctggaagcggaaaatcgggacgcccgccaggcgctgaccgactttgttgcgcgtctgcgcgggtaagctgactattctccaggccaggcgcagccctgtgcctgtcattaatgcctggcggcgctacgcttgcacaggcctacggttctgcgccattgcgtagcccggataaggcgtttacgccgccatccgggatccccggcttgcgctgcgctgagccaggctacgccagccttaggacctcacatcagacataaaaaaacccggcaagccgggttttttgctcttcgcgaagggcgattatttctgcggacgcatcgccgggaacagaataacgtcgcggatggtgtggctgttggtgaacagcatgaccatacggtcgataccgatacccagaccagcggtcggcggcaggccgtgttccagcgcggtgacatagtcttcgtcatagaacattgcttcgtcgtcgcctgcggctttcgcatcaacctgatcctggaagcgctgcgcctggtcttcggcgtcgttcagctcgctaaagccgttaccgatctcacggccgccaatgaagaattcaaagcggtcggtgatttccgggttgacgtcgttacggcgcgccagcggagaaacttccgccgggtattcggtgatgaaggtcggctggatcaggtgcgcttccgccacttcttcgaagatctcggtcacgatacggcccagaccccagctcttctccactttgatgccgatagattcagcgatcgctttcgcggaatcaaagttatccagatccgccatctcggtttccggacggtatttcttgatcgcttcgcgcatggtcagtttttcaaacggcttgccgaagtcgaacacctggtcgccgtaaggcacttcggtattgccgaggatgtcctgcgccagggtgcggaacagagattcggtcagctcgatcagatctttataatccgcataagccatgtagagttccatcatggtgaactctgggttatgacgaacggagatcccttcgttacggaagttacggttgatctcgaagacgcgttcgaagccgccaaccaccagacgcttgaggtacagttccggcgcgatacgcaggtacatgtccagatccagcgcgttatgatgggtgatgaacggacgcgcggaagcgccgcccgggatcacctgcatcatcggggtttctacttccataaagccgcggccaaccatgaactgacggatgcctgccaggatctgcgaacgcactttgaaggtcttacgagattcatcgttggagatcaggtccaggtaacgctgacggtaacgcgcttcctgatcctgcaggccgtggaatttgtccggcagcgggcgcagagctttagtcaacagacgcagctcggtgcagtggatagagagctcaccggttttggtcttgaacaacttaccgcgggcggcgatgatgtcgccgaggtcccactttttgaactggtcgttataaacgccttccgccaggtcatcacgcgccacgtacagctggatgcggccgcctacgtcctgcagggtcacgaaggacgctttacccatgatacgacgggtcatcatgcggccagcaacggccacttcaacgttcagcgcttccagctcttcgttttctttgccatcgaagtcagcgtgcagttggtcagaggtatggtcacgacggaaatcgttcgggaaagcgacgccctgctcacgcagcgcagccagcttctcgcgacgggttttcagttcattattaaggtcaattgccgcgtcagcgccctgtgcttgttgttcagacatgttggttcctcataaccctgctttcaaacttgcttcgataaattggtccaggctgccgtcgagcaccgcctgagtgttgcgggtttccaccccggtacgcagatctttaatacgcgagtcatccagcacgtaagagcggatctggctgccccagccgatatcggacttgttgtcttccatcgcctgcttctcggcatttttcttctgcatctccagttcataaagctttgctttcatctgcttcatggcctggtctttgttcttgtgctgcgaacggtcgttctggcactgcgtcaccaatccggtcgggatatgggtaatacgcaccgcggattccgtacggttaacgtgctgaccaccggcgccggaggcgcggtatacgtcaatgcgcaggtcggccgggttaatttcgatatcgatatcgtcttccacttccgggtaaacgaacgcggagctgaaggaggtatgacggcggccgccggaatcgaacgggctcttacgcaccagacgatgaacgccggtttccgtacgcagccagccgtaggcgtaatcgccaatgatcttaatggtcacggatttaatccccgcgacttcaccttcggattcttcgatgatttcggtcttaaagccgcgcgcttccgccccgcgcaggtacatgcgcatcagcatgctggcccagtcctgggcttcggtgccgccggaaccggcctgaatgtcaaggtagcaatcggcgctgtcgtattcgccggagaacatgcggcggaactcaagctgcgccagcttctcttccagggtatccagctcggcgacggcttcgttaaaggtctcttcgtcgtccgcttccgcggccagatccagcaggccggcaacgtcttccagcccctgggacatctgatccagggtatctacgatggcttccagggaagaacgctctttacccagcgcctgggcgcgttcgggttcgttccacacgtccggctgttccagctcggcgtttacttcttcgagacgctctttcttggcatcgtagtcaaagataccccctaagaacgtcggagcgctccgtgaggtcctgaatgcggttttttaccggatttatttcaaacatggtcggtttcttttaatggatttgtcaaaatgcggtgataagagcggaattctaccggattcgcgcccttattcctacactgttgtcaatttggccagaggtgatcgatgatcagctgcaggctacggttgccgcggaactcgttgatgtcgagcttgtaggctaactggacttcacgcacgccgttatccggccagatggaagtatcaacgttgaaggcgataccgtccagcagcggcccgccgtcaaccggttcgaccatcaccttcaggtgacgctcgcccaccagccgctgctgcagcaggcgaaaacgaccgtcaaacagcggttccgggaacatctgcccccacggcccggcgtcgcgcagcatctgcgccacttccatgctcatctccgccgccgccagcgggccatcggaaaccacctcgccctgcaacagcgcaggatccagccattcggtcaccagctcgccgaagcgctgttgaaactcttcaaaacgcgcctcctccagcgataagcccgccgccatcgcgtggccgccgaacttcaggattagcccgggataaagcgtatcaaggcgctccagcgcatcgcgcatatgcaacccctgaatggaacgaccggagcctttcagcgtgccgtcgccggtaggcgcaaaagcgataaccgggcgatggaagcgctccttaatccgcgaggcgagaatgccgactaccccttgatgccattgcggatggtacatcgccagcccgccgggcagggtatcggcgctgcgctccagctgctgacagagcgttagcgcttccgcctgcatcccctgctcaatctctttgcgcgtctgattaagcgcatcgagctcgttggccagcacccgcgcttcgccgatgttgtcgcacagcagcagcgcgacgccgaccgacatgtcgtccagccgtcccgccgcgttcaggcgcggcccgagggcgaaaccgaggtcgctggccgccagcttttgcggatcgcggttggcaatttccagcagcgccttaataccgggccgacatttgccggcgcgaatgcggcttaacccctgccaggtgaggatacggttgttagcatccagcggcacgacgtccgcgacggtgccaagcgccaccagatccagcagctcggcaaggttcggcgcggggatgccgcgagcgtcgaaccagcctttatcgcgcagaaaagtgcgcagcgccagcatcagataaaacgccacccccaccccggccaacgattttgacaggaagtcgcaggcgcgaaggggtgggttaaagatacattccgcctcccgccaccactcacccggccgatggtgatcggtcagcagccacgggagcgccgacgcagcgatcgaaacgccgccgcacggcaacgagcggccgcggcgcgcgggcatggtgccgtggtctgcg
